United States Patent Application Publication US 2011/0191912 A1 - sequence listing, part 11

SEQ ID NO: 12793 - DNA, 3000 bp, Unknown
  misc_feature (1)..( 3000): cDNA_ID_3026488_gDNA_ID_2214572_Annot_ID_186229 3000 nt of promoter + ATG
ttaaatgaacggaatagtactctaagaattttttgttaaatcttttacttgaaaagttttgctgttaataatttagttgaaggttttcaataaatcacaagatacttagggttttatttatcattaagatattaatagaataaaaaagtggaattatttttcttctacaattacaccaatcaagaaaaagagttttcctctcaattactctggccctttacatggaaaagcaaaaaagttgagaaaacttccctctacaaaactgaaaaaataaaaataataattttcttaaaagtgcatatgttttttttcctaattgttcttgttaattccgctgaaattgtcactgtcacaccctaaatacactaaaattatgtgcctttttaaaggacggacgtttcaaatatatatttagtaaggcccactaataaaattgggtttcaaaggacaggaatgggcttctgcaaaatttgcaagacacaaaggcaaggcaaggaatatgtgtgaaagaaacaatgtcaataacaaacttaaaaggaacagaagcgccaaagtcacattggtcaagtgtatggtttcaattggttatgtaagttaaagtgatagtccaaaagaatggttctaattatgttgagaaggtaatccaagattgttgctggatgtgataaaaataaatggaagaaaaagttgttggcttggctcaaatagatctatgtttatgactatacatcaagagttggcttaaatgactgcttcctgcatatttgtaaatctttatatacttttgggatacacatgtttgtatagtttacatgatgcattatcattctaaaatatcagtttccgattaaacgttgaagactggtatggctttctaacttaaacctctttcatctatcaagacatatgcactgctcaacttgagcagctcaagcatatatataattttattttttctaaaagtaacttaattataaactcttacacatcagtttttgtaaggcgaaagatgttatagtcaacaatttttttttgcagagaatgttggtagaaatttggtagacatagtagaaagtcgaaaaaaaataaaatcggaaaataagtatgctgatgggaaaaacattaacagaagttaattggcataaaataaaaagaagaagtttattgctacatcgccacgaattccaagtcaattattacatatttacatgcataaatggttttgatatggttgtattatactattacgggctatgataaagaaataaaagcatgcacgtaaatctaacaagagacatcttcatgcacgagtttttattccatttcagctttccaacaaagaaagaaaaagcaaataatcgctttaagcttttcttaaattgcaagttaatgctctcatttaatcaaattgtttatccgttcctcaaagaagatgcaaaattgaaatttctcttaaacatctatccatatattcggaagggagattattacctcagagtggtcttaattggcatattgattactgtatttgttacttgaacgtggtcataatgggcatatatattggttgaagataaatgccttcttcttccgggtttaaagttcatcttcttctttagcacaaaaaataaaataaaattatcttcttaagactactgattaaatttcatattaataggtatgattggtaattttttacagcttaggttacctccataaatgtggtcgtagacaccacttgaaatgggaatcatcctttttgctatgcctttgcggttattctctgagaatcctattgttagatttatatatggctatattttatgatttcatatttctaaaggtatacggtctagtgtttctgagtccaaatcatggtgttgtgacagtggttaccaaaatttctttcaaagtatttctcacataagcgacaaccatatctaccgacttcaaacacctctaaatcaacaatagattttgggtttggatcactcttccacaagaaggtatgattctcatatgagagatcccaatccaatgattagtgtctcaaaacaaaatatatccaactatgcgagtcttccaaatttaattgaatatttagaaaccatgatttgaatcttcctcttttgtggaaaatttatttatttcctcatttctcctatatggagagaaccttgcttgctattttgctatttagtcacaagttaccaacttaccatccttgctattttgttacttcgtgtagaacttctcgtttttggaatcgtcttcaacgttaccatattttttttatcgagattatcatttcaatttttttatggacgaattctcgattaaccatgaactcatttgtaccaagatactatctaacttttatctccaaatttttatggatctaatgtcgacctatcctagtattttatagcattcgagaatgctttattacctttttttttttttttttgagaatgctttattacctttcattgttatgtataaacattgaaatatttttgatttgtgaatgaacaaaatccaatattttcatggcgaaaaaaatcctttaattatttatccagtaaacctgtaaaaacgtatttgtggaattttctttaatttgattaaattaaaaatagacaaaaaagaaaaagacacgagcgaataaaatcacagtgattttcagtgtttttttccctcgttacaaaacaaaatagctctgtctgaaaaataaagctttaactctctctctcttaacactgttactgtcgtctctctgtctctccattaatctccactgctctaaaaaaattcattaattgctgaaactctctctctctctagtctctatctctcttcttcatccttgagctctgttagattctctctaactctaccatcgtttcatttcttaattctctgttttcttgttcctccagagtgatagatctggcagagaacaatgtcggaattagccaattaggtcgccgagataaaaac

SEQ ID NO: 12794 - DNA, 3000 bp, Unknown
  misc_feature (1)..( 3000): cDNA_ID_2712578_gDNA_ID_2214572_Annot_ID_186224 3000 nt of promoter + ATG
tcataattcgttttttttttgctaaaaatatggtataaggttgattaaggttaattggtctttttacttaaaattggagtcattttagttaatcattgccaagaggagtcattctagttatttttgttaaaattagagtcaatctgagcaaatttcagttaaataaaactcgttttgggagaaggatttgggagaaggatttctagctccaaaagcgtacttttatgagttgagaatgtacataacaagaatacgttaaaattgttgaacacttgtatgttgtttctagaaatttctgatcaggtaagggactcgtaatggtacagtcgtgaaaatatttataaattgttacatatctacataaccttacaaataactaaactagaagagggtttatgtatatttattcattcgaaaagggaatacttttttgaaaagggatacataattatagtggaaaccctgatattacttaattaggggattgtatatattcttgatgattacgggaacggagaggtggttcaacatcaatttgatttcttctttttcgtcgaaatttttggtttttattgtttctagcaacattttacagtacttttttttactgaaatgaatatctaaaagtcttttgaaagttcatcacaacgatgtatgttcttagaccattcttattgatgagtttttagtagtatttttaacattttggatagacaaaataatacttaaatattaaatggttcttaataagaagagaaagtgtatcaacaatatcttatttaagagtcaattttacttttctaagaacctttttctattttttttttgtattttattttatataatattttaaaagtttttttaaaatttttaagaacctattgataatgatgctcttaggcttctacatatttgctagtgccacctaatattcttatctggcttgattagatcgaaaatgtcaatctatagaactattatagaagccaaagaaagttggttgacgagtcgttttctaagtgtatacaaaactattttcttcaaatctcttgtatcattaaatagtaacgttttaaatattttctggataagcataagtttctttgaaaactattttgtatatattcctacttctccatttttctaaattattttatattatacatagttttccaaattatcaaacatttttacatgttttgactaataaataaacatattactgcgaattaattaaaaataaatattccacacaataattaccttacaagcgaataaacttttactatgttttcgatgtaaatttttcttacatatttgtaactgaaatttctaacttgttgtttcataagttttaaaatttattatctaattatctacttttatgtgttctagagcaaagtgctaaatgtatatatacttagatgttgtgttgtaatccaatgtcaatataatcaatgatttagctatttgtaaacatactaaatagtattccaccaaaaaaaaaacatactaaacagtaaacaaacagcaaaaacaaaatccacatgtcctaaaagatagtctgattttcgttcataatgctctggtttttgaaagataataattgtgttgtatgagtgtatgacaaatattcattggtttgagaagttaacaaaatttggtggctacaaatggtttcctattcgagttgggtccattatcccttggcgtgtacggaaataatacctacccatcataatctgatcaaagatgaggtagtctttaaataaattttgcggcttatatcaatctttatgtactataaactgtgaactttttgttcttcaggacttccacatcattgcccaatccggttataccttcgctagttaatatgttaattaacattaaattaaagagctaacatttcttaggtagtaaaatagaagttttgaactactatactactaacatgtgaaaatactttagtcacaaatatgacaatatacaaatttattggaatgcaaattcttgaatttcaattgtttgaaaattatatatttctacataacaattctttataaactaaaaatattaattttccatggctatgcgttatacgtatatgtcaaatatttttattatttatataattttacgataaattagtactccactttactatattactcaacactaaaagacctctttaactccgcctaacatagatatgttttcttttgaatgtttcggttaaacatgacagagatttgttttcttgctttcgctcaatacatatttgtgctcctttagaaaagtagtatttcctaacaatccaacattttcatatttattatatcttttaaatattatcatggttctttttctttcgtcatgtttggcctctttaaaataattcttgaattgtatgagcattaatccaataacgtcctgatcccaaaaacctcatattaggtttgagagtccgaaaatatacttttcacataaagcacctaaggtgtcatactttaacaacttcacaaaatatgcaaaatttgtcattgtcactttgagatgtaagtttttttttacatgcaaatagattgagtctctttacgtgtaaattcatttaataaaattgtatggaatatctatttatatcatatatttctaacatatatataaatatctatacaaaaatacgactttttggcacatgtaattagaaaaatccacaagaaacagaaaaaagaaacaccaaatacaacgaaatgaagaaattattataaatttgaatggcttaacatctcttaagagtcaacaaggtaaaggattaattagtagtcttcatcaatctttctccaccttcttctattccttaatctccactttatctcccaaacccgaaaactcctcttcaccaacttaaaccctattaactaatcccaacaatcagatgtttcgaattcaacaaccagctcaggccataagattcatcccggagaaacaagaacgatg

SEQ ID NO: 12795 - DNA, 3000 bp, Unknown
  misc_feature (1)..( 3000): cDNA_ID_3026498_gDNA_ID_2214572_Annot_ID_186223 3000 nt of promoter + ATG
cgaaacgagattgtgttaagaaacataacgaatccatggttcatcgatttagatttctagggttctgaacggagattgtaccttctaaacgacgagataagcgaacgattctagcgatacagccgtcacagtgaaaatcaatcttaagaacgacgtgaaccggcgacgtcgtattgttctgtttctttttcttctcctcctccacatctccgtggtaacattcacacacttgcggattctccattttcgtctctaacttcttctgcatacaggtttaaaaaaaaaacctcaaaaaaaaaaaactcaaaaagcaaggagacaaacacattagcagagacagagagaaccttgatggaggatagagaatagagactggagtatctgtctcggtttcttcaaaggaaaagtggagaagacgacgaaaatgggtttcagagacggctgcgtaacagaagggagtgtagggaggtggttcacagtgtacgtacaactttgttatagtcctttccttactcttgctttttctatttttgttttcattaagatcatttatatattcaatatttttttaaaaaatgaaataagttctattaaacaggttattaaaaaaaaaaaattgttagtaatttgagattcctatttttgttttggttaataatgtgtgaatttggtttacactaaaaaaatgtcgtgcaagaaaatactaataaaaatgagaaatgttgagaaaataaatctttttaatcattactagacagtagacatttttctttcaattccattaaaaatggaaaaattggtcatcatttattcaatgttatttagtcacatagttatactaaaaacaaatttttattgcgtttgcattaagtttccaaccaataatgaataatcacgtcaaagttagaaccaaagcaaaaaaaactaaaaagctcaagaagaaaaggatagagacgacaaaactccattgaagaacttattagagaagaagaacaacaacaaggaagataacgaaagtcactaaaatctttcaagacccatgaactctcaaatcactcttttcttcttcttcttctcaatcctctccctctcccaaatctcaaattcatcatcactactaaaaccacacccatgtccaattttacccctcccatcctcccaacagctccaatggcaactcggatccatggccatgttcctccattttggacccaacactttcaccgactccgaatggggcaccggaaaagctaacccatccattttcaacccgacccatctcaacgcaagtcaatgggtccaaatcgctaaagactcaggcttttcccgcgttatcctcacagctaagcaccatgatggattctgtctctggcctagcgaatacactgattactccgtcaaatctagccaatggagaaacggagccggcgatgtagtggctgaactagcttctgcggcaaaggaagctggaattggacttggtctttacctttctccatgggatcgacatgaacagtgttatggcaagacattggagtataacgagttctatctgagtcaaatgaccgagttactaacaaagtaagctcctttttctcatatcagtcaaatgggtttgtgattccagttccaagtttttaaaaaggttgaatctttattaggtatggagagattaaggaagtttggttagatggagctaaaggagacggagagaaagatatggaatatttctttgatacttggtttagtttgatccatcagcttcagcctaaagctgttatattctctgacgctggtcctgatgtcaggtggattggtgatgaagctggtctagctggctctacttgctggtcactctttaacagaaccaatgcaaagattggtgacactgagccttcgtgagtcactctctaatgttgaaactttctatagatgttagggatgatagagatcatagcttgaagttgtttgtttgatcttgtaggtattctcaagaaggtgatggctatgggcaagattgggtaccagcggaatgtgatgtatcgattcgacccggttggttttggcatgcgtcggagtcgcctaaaccggctgttcagcttttggatatatactataactcagttggaagaaactgtctcttcttgcttaatgtacctcctaattcttcaggattgatatctgagcaagacattaaggttcttgaagagttcagcgaaatgaagaactccattttctcgaacaatctcgcccgtaaagcattcgttaactcgagcagtattcgtggcgatcaaagttcacagtttggtcctaagaatgttttggaagaaggattagacaagtactgggcgccagaagagaatcaaaacgaatgggtgttatacttagagtttaaagatttggttagcttcaatgtgttggagattcgagaaccaatccatatgggtcaaaggatcgcatctttccatctcgagacacggaagactggaagcggtgagtgggagagagttgtgagcggcacgacggttggtaacaaaaggcttttacggtttctgaatgttgttgagtcgcggtctctaaagcttgtggtggacaaagcgaggaccgacccacttatatcgtacctcggactctacatggataagttttcgggttctagtagaaacacaacaaagataacaatcacaaggacactaaaggaagagcagcaactacatgatttgtaagaaataactctcaaggattcatcacataagtgttaggtattcttgagaatatctatgtgcatcaagtcatatatgtgtcactatcaattcttgtatgttaaggctctaacttttactctattgctttaaaagaaatatgactttttttcttcaatgacataaatttgaggatttgggtcttcttttgtaactcggcccaaatgttttaaagaatttcttatggattggagaaaacttttgtggaaaaacagagaaagccctaaagttaagagac

SEQ ID NO: 12796 - DNA, 3000 bp, Unknown
  misc_feature (1)..( 3000): cDNA_ID_3026501_gDNA_ID_2214572_Annot_ID_186222 3000 nt of promoter + ATG
atgtcgttaggcgtaaacatcaagccgaggtgcattagcactaaagtaaacaagtcgaaggaccatatatgttctttaaatataggaactcaattcttatttggagaaagactttgcttcgtatgaacttaaaggccgggactcatggaaacatatttttttataagttgtaaccattaagttcttcatggaaacatgaaagcttaaaattctatttccaaattcactatgtcgaaaagtggatcctctccacaaaaacgtactctgatatctctcaaaatagaaaatactagtgtatttttttactactctcatgtgacacagaccatcacaatatatccttcagactttacttcttcttcttttttcttttctgtttcctattagtttatttacctcctagtatatatatttgtaataaactccaaatgctttgtcacctcgaaactcacataacgctgcaatagctctgatcttcctcactgaaaaacccagtcattgggccttccatgaacctgtaaggcccaatcccatgagtgcatccatttccaggttgacaaggagacccgactttggtgtttacctctgcattgtccttgtctttcttcttcttcttcttctcaggcacgacctggacggttttcttcagcttgcgtttcaaattatctgtcacagacttgatgtccattgttcccatgactgttaccgtttccttctctttgtccattttgacttgatacactcctattgacaaaatcacatactcaataccattagacacagattaaaatggccgcaaacaagttctgtatgagtcaaaccaaatacacaaagtaatagtcaggaaaaattcttacccttggtcgtagagacagccttttgaattctcttgatgcaaccatcacaagagcaattcactttcaacaccactgtggtcacagcaacctaagaagaagaacagagaatataatgtcatagcaagtaatttcgaaagactaaagtacttattaacccatatgatcacctagaagataacggctatagtacattatctacaaaggaatggtacgagttaagaagattgttacttgaggatcaagtaagcctgagaaaatctaccttttgatactacttacttccttactagttatcacattctagtcatggtttaagtgtttgtgagaaacaaatgtcctaatcagagaacgtatgcaatgaatgtagagcttaccacagtctgagtcttatcattagcctttttctcattgttctctttggtgtctttctttggtttaggagatatcagctccactttcttcttgctcttcttctgaagtttctcagcaatcttcactggatccatgataaacccaatcagagtcagcttgttcgaatcaggatctgctctcactgtttcaactcctgatacagtacaacaatcagaacaagtcaatgagccattgagcatcgatagcaatttcttgtataccaacaaaaatcatgaatcaaagactcaaaaattgactaatttctttacaatcgctgtgttttcaatagcagaaacagagaatatttatgatcctgaaactagatctaagaagaagatcgataaacgtaaataaacgaggaagagaacaaaacttcgtcagggtttagggtttaacaaaaactctcaatcgctttcacgatgctcgaaaccattatcggagaagaaacgaaacaaagcaaacgattaacacggatgattcgactgagatttcagcaacgaatccatgaaaatccacaaaacagagaaatcgaacccgagataaatgcgaaacgagattgtgttaagaaacataacgaatccatggttcatcgatttagatttctagggttctgaacggagattgtaccttctaaacgacgagataagcgaacgattctagcgatacagccgtcacagtgaaaatcaatcttaagaacgacgtgaaccggcgacgtcgtattgttctgtttctttttcttctcctcctccacatctccgtggtaacattcacacacttgcggattctccattttcgtctctaacttcttctgcatacaggtttaaaaaaaaaacctcaaaaaaaaaaaactcaaaaagcaaggagacaaacacattagcagagacagagagaaccttgatggaggatagagaatagagactggagtatctgtctcggtttcttcaaaggaaaagtggagaagacgacgaaaatgggtttcagagacggctgcgtaacagaagggagtgtagggaggtggttcacagtgtacgtacaactttgttatagtcctttccttactcttgctttttctatttttgttttcattaagatcatttatatattcaatatttttttaaaaaatgaaataagttctattaaacaggttattaaaaaaaaaaaattgttagtaatttgagattcctatttttgttttggttaataatgtgtgaatttggtttacactaaaaaaatgtcgtgcaagaaaatactaataaaaatgagaaatgttgagaaaataaatctttttaatcattactagacagtagacatttttctttcaattccattaaaaatggaaaaattggtcatcatttattcaatgttatttagtcacatagttatactaaaaacaaatttttattgcgtttgcattaagtttccaaccaataatgaataatcacgtcaaagttagaaccaaagcaaaaaaaactaaaaagctcaagaagaaaaggatagagacgacaaaactccattgaagaacttattagagaagaagaacaacaacaaggaagataacgaaagtcactaaaatctttcaagacccatgaactctcaaatcactcttttcttcttcttcttctcaatcctctccctctcccaaatctcaaattcatcatcactactaaaaccacacccatgtccaattttacccctcccatcctcccaacagctccaatggcaactcggatcc

SEQ ID NO: 12797 - DNA, 3000 bp, Unknown
  misc_feature (1)..( 3000): cDNA_ID_3026521_gDNA_ID_2214572_Annot_ID_186211 3000 nt of promoter + ATG
gcttctatttcaataagtgaacaagagtcacaacatcaagatcagtaaggtaagagagatctacttaaggtaactaatatatatgccttatttcttatgttgccaatcccaccttgcatttccaaaacaacacaatatagttttgttttgttagaaacaaaaaaggatattatatatggaagttgagataatatatataacaggtctatatggaactattgttgtctagcaaagaaaaggttttcaagacacactgtcagttctttgttttgttggttcatgttggctattacattcaaattgagaatcaatcaagaacttgttgggtggaccttacacacattgtaggctaggcatattcagtccaacctatttgtgtcccctctatttacatatttagatttcgtccttataactgatattgaaacaatgaagaatatatactctctttttctctttattctgttataagggaacaataaatctatagcatcatatatactcagactgtgaacaaaacctattcacagttatgagtttcatgttttgtttatgagcacaacctcccaaacttgtttccaaaacaaattctataaatattagtattatttttggttattatgtcttgtagtacatcttgttatatgtgtgtttagtaatgttttctatgttatggagatgtgtgtgtctaaattactttccattagtcattgtagaaataaatctttttttttttatcatagcttccactatgaatcgaatggttttgagcaatgccttggatgacctagacttcgtccataagtggaagccaaatcattctatcagtaccaatatagcaagttggcagctattttcacatcatgatgatatctttgatatgtccgtcaatcacgtatatttttggatatatttttcagtattgccaaatgaaattgttgttttacgaaaataagtacctcaattaatataatatgtcttcactccaacttgcagctatattgctaatcacataagtagtaccactattcatctttgttatctcttatctctaaacattctattaattatcgcttattgttctctcttttggctaatatatttaccaatttgggtccctaaatggactcgatatgttttaatcggaagaattttatgtgtaaatattttgtgttatgattatcttcgtatttatcgaaatagctagtttgctgtttcatcgcttttatatataaatgcaaaacaaaacataaatacattagaatctttgcgtataatggatctgacaaaatgagatggtaatattagctcgaggggatgaatatatgtgtgtggtccattagcattgaaatcaaacgcaacgctgagtatgtgaggaccatttctttatagtcgtatctattattcccaattttctcaaacttcaagcttttaatgtgtttgtcttactaatttggctcagtttactatttatagctttagacgatatcttctttcaagtattttgtatgccgagcaatttttgaaagtgatatatttacaaattgtttttaccgaattcaacaagtttgctctaccaatatagcaattcaatgtcacatttttacccttatcaaaagaattgacgagacagtttacctttgatatagaaaaacaaatatttctctgactacaaacttttttttattgtctttctcactcagaattttctaattattatgtgattgtttctctttctatttatagctcccacaatattttttaatatacatttggattatgttgaaatgattaaagtaatatatatgacacaaagtaatatatattcttaatacgtactgacgtacacatcacatacatgtggataatagataagataggtcgacccaaattcagaagtagagttatgaaaacgttaacgaaaaataagaggaaattattatccacttttaacatttattcacgcatatgccttatcaatatttcagtagcaccaactagcggaatccaatgagtgggcattacaaaatgtatatatatatgatttcaaaatgtcattttttctttttaacaataaagtatgatttctcggttgaaacattgtaaaattatatttcttttgttaaaacattgtaaaatggatgcatattcaataactattacataagattaaattgatatatacgcttcttcgtttaaactgaaacataacatgacagtcagttttatcaaaacaataaacaaaacatgacagtaatgtgtattatgtttatgaactaacaataagaaaatgtgtgtaatatagtatattaagtaacatgtgtgtaaaatatatatatatatatatatatatatatatatatatatatgtcttatatatatatatgtgatacataacataatgttaacataaccaaaaatgtttcagcaagctattggttacaagatgagaagaaacataatgggaactgaaattgatgctttagaagacaatcatacatggaatcttgaaactttgccccgaaagaaaaaaaggcaattgtgtgcaaatgaatatattatagtaaaatactgatctcatggaaccatagagtgagatatacaaacccagactcgtggcactcagaaaccgacagactgaatgtgttgattatggagatacatttgttctagtagctaaaatgggaattattctttatagcgagaagtgattggtcagtagatcagatgtatgtcgaacaatgtctttgtacatggagatctcttccaagaggtccatatgagattgcctataataagccattttttcttaagctataataagcctataacttagataataaataaaatgttcggagacatgaaggtgataaacaaatcatgccgttctcatattagaaaaccgaacatcttgccacttttgtagcggccggttcaaatttccagttctgatgaacggagtggtgagtgagccaaagccgccgacgagacgattcgatg

SEQ ID NO: 12798 - DNA, 3000 bp, Unknown; identical to SEQ ID NO: 12794
  misc_feature (1)..( 3000): cDNA_ID_2712578_gDNA_ID_2214572_Annot_ID_135094 3000 nt of promoter + ATG

SEQ ID NO: 12799 - DNA, 3000 bp, Unknown; identical to SEQ ID NO: 12793
  misc_feature (1)..( 3000): cDNA_ID_2712562_gDNA_ID_2214572_Annot_ID_135098 3000 nt of promoter + ATG

SEQ ID NO: 12800 - DNA, 3000 bp, Unknown
  misc_feature (1)..( 3000): cDNA_ID_3026480_gDNA_ID_2214572_Annot_ID_135100 3000 nt of promoter + ATG
ttcttatcaatccgaagacagtcctctcacttgctacgtccttcacctcgtcgagttacgaggtcaagacgttcccactttgatctcacacaaagttcagaaactcggagtcggggctggaaataaatattccgaaaatgtcatcctctcttttgaacatttccaccgttctgtctgcagttccatttccatagacacattcacttgcatcgcaaacgcaaaccatatgcaggatgacatttgttggctagctcttgataaagctgtcacgcttatcattcttccttttcaccggacttggtcacttgaccgaacatccatcgtatccgacgttgaggcgatccgatttctgaatgtcaacgtcttgaaacaagcaccttgctctgtcggcattcttatcgaacgccatctcgttaacaagaagcaagaaccacatgaaagccttaaggtatacttacaattacatctactatgcttccatgttggtcgttgtagatgctttaactatatatatagaaaaactaagcacactaagctatttgatgataggtgtgtgtaatattcgtgggaggaaaagacgatagggaagctttggcctttgcgaagcgaatggcccgtcaagagaacgtaacattaacagttctacgcctcctagcatcaggaaagagcaaagacgcgacaggatgggatcaaatgcttgacacggtggaactaagagagttgattaaaagcaacaatgccggaatggtaaaagaagaaacatcaacaatttatttggaacaagagatattggatggagcggatacgtcaatgcttctacgttccatggctttcgattacgatcttttcgtcgtgggaagaacatgcggcgagaaccacgaggcaaccaaaggtatagagaattggtgtgagtttgaggagcttggagtcattggtgatttcttggcctcgccggattttccgagtaaaacatcggtgttagtagtgcaacaacaacgaacggtagccaataataattagaagcggagaaagcatactatggttgtggttgttgttacatctatctctcctttgtgtagcatctacaaaaagaagtttgaaaagaagaaaaaaaatgtatgaccacattttatttgtttttttcattgctacttgtggaatattgttttttgtagagcagaaagaaagactttgaagaatgttttaatccttaaattttcctatccgaatagtctcctagggtgaataattataagaacgaaaaatagtttatttactagaataattgaaaatttcttattagttactagaaatagtttcatacttagtttactttttgaagctttcttacgaaaattagagttcgtaatcaaaaggatctagtggttgagggctcgctttgttagtcaaccttacagtttttggctatttttgatcacttttttgtccaaattccatttgcgaattgcgaccactgattttttttttttacactttcatataaggcaagtaacacgtctagtatgttaaataagcttttaaaactttttttaattgtttttttactaagaaaaacatcaatctcaaacatctaaaccctatgacggatccgaaagactgatcttggacacaagaaatgaaattacacacattcctatatattatatattgatcatcaattagaaatgattctctatttcttaatctatcttaacctaaatctgaatctcgatcattaaacaattaccgtacaattataaccaaaccgttatggtttactgatcaccaactgaaattacatcgccttgtatagatttgagtgtataaaaggagtttcactaattttaggataaacatcgaaatctatctgtcctaacccctatttaatcagttcaccaagaacacaagaaccgaaacacctgcaaagttgtttttatatagtcatgtattaaaggttaaatataggatatctttgttgtaccaaaactcttaaaacaccttttaaaatctaatattttttaactctcacaccatacaacattgttactatacatcctatggatcccttcaatgcgagttggtggaccaatatggcctggcacggctattcgctcagcgaggacgggactaagttctgtgagatgcttccgactaagatcaactctttcggtttgtcggagaaaattcttcacaaatcagtagggttgtatttttgggaatatcctctacccaatctagagctcattattctctcggtatttttcttctggcagttctttgagatcttgttcaaaatgtccaatattcccattcctaaaatgccttccatgatgcttgtaagtagagtgattgtctcttaactttcaaatgattaaggatatttccaaagaaaattcaaaagttattttccgattttgtgtttaattatttgtgataaaagaatcattttataatcctcattcaaaatttgattttttacgatatatatatatatatatatatatatatattaataattacctcattttgcgcatttttgttcattcaaaatttcacatttttaaattacaagcattttatatttggataattgtaaaagtttctcatttagtttgtgctttttttttttttttttggcaaaaagaatatcatattacaccatgcaaacgcaaaacaaacaatgaatgtgattttgattacgtgaaaacaattgtattgctgaaggggtgtgtggtcatcaacctgttttcttacaccaggccaggctctttgcttcatcggatgtttttcccggacgacgggaggccaaaggttgccgagaccgggggtgcattcgggtttgtaatgtactggttccttaaaggcgtgtctatagacgttgggatgcttagaaaaaccgaaccgagggctgctttaattgggttcaatacattggtcatcccatatatatccggttacattctaatgaggactaggaaacattttgggaagttggcaatg

SEQ ID NO: 12801 - DNA, 440 bp, Unknown
  misc_feature (1)..( 440): cDNA_ID_2712550_gDNA_ID_2214572_Annot_ID_135101 3000 nt of promoter + ATG
ttatgcgaaaatgttaaacttgccaatatattttgaccaatttagtgacaaacttggcatgaaactatctagaaatagtttcctatcttatgtgtgaccaaagctgttttcattcatagaaagacagtcatcttatttaaagaaattcctttttttctggtagattcttagttgacttctttctgtggtttataacttataagaagctgaagacatatactatttatagtggagaaacaactcaaaaagggtctaaaactacatatgtctatagatgtccaaagtgtgttttttaaaaacagcataacctataaacagcatatacatctgtgtgtcatttgtttacaaattgtttctttgttatcaaaaggaacacaacatttattttgttatcgtcttccccattttgacaagaactcacttaagattttgaagtcatg

SEQ ID NO: 12802 - DNA, 3000 bp, Unknown
  misc_feature (1)..( 3000): cDNA_ID_2992472_gDNA_ID_2214573_Annot_ID_135102 3000 nt of promoter + ATG
ccaaactccagcaaacgcaaacccagaaacccaatctccagatgcaaaatccgagacgaagaagaatctgacttctacagagacgagaccactcagagagaggttccaacgaggtaagcgtcaaaaccatgaaaagctagaggatacaatatgtagaatgatggataatcgtgcttggacgactcgtttacagaactcaatccgagatcttgtacctgaatgggatcattctttagtctataatgtattgcacggtgctaagaaacttgagcatgctcttcaatttttccggtggacggagagatctggattgattcgtcatgatagagatacacatatgaaaatgattaagatgcttggagaggtttcgaagcttaatcatgctaggtgtattttattggatatgcctgaaaagggtgttccttgggatgaggatatgtttgtggtgcttattgagagttatggaaaagctgggattgttcaagagtctgttaaaatctttcagaagatgaaggatttgggtgtggagaggacgattaagtcgtataatagtttgtttaaggtgattttgaggcgtggtaggtatatgatggcgaaacggtatttcaataagatggttagtgagggtgttgagccaacgaggcatacttataatctaatgctgtgggggttctttttgtctttgaggttagagactgctctgaggttctttgaagatatgaaaactagagggatctcgccggatgatgctacgtttaatactatgatcaatgggttctgccggtttaagaagatggatgaggcagagaagttgtttgtggagatgaaagggaataagattgggcctagtgttgtgagttacaccacgatgattaaaggatatcttgcggtggaccgagttgatgatgggttgagaatctttgaggagatgagatcttctggtattgagcctaatgctactacgtattcgacgttgttgcctggtctgtgtgatgcagggaaaatggtggaggctaagaatatcttgaagaatatgatggcgaaacacattgctccaaaagataactcgatctttcttaagcttttggtgtctcagagcaaagcaggggatatggcggcagccactgaggtgctcaaagccatggctacactgaatgttccagcagaggcgggacactatggggttttgattgagaaccaatgcaaggctagtgcatacaatcgtgctatcaagcttttagatacgcttattgagaaagaaatcatattgaggcatcaggatactctggaaatggagcccagcgcttacaacccaataatcgagtatttgtgcaacaatggccaaacggcaaaagcagaagtgcttttcaggcagctgatgaaaagaggtgtccaagaccaagatgccttaaacaatctaatccgtggtcatgcaaaggaaggaaacccagactctagttacgagattctgaagataatgtcgaggagaggtgtccctagagaatcaaacgcatatgagctgctcatcaagagctacatgagcaaaggtgagcctggagacgcgaaaaccgcactggacagcatggtcgaagacgggcatgtcccagactcatcgcttttcaggtcagtgattgagagtttgttcgaggatggtagggtgcagacagcaagccgtgtgatgatgatcatgatagataaaaacgttggtatcgaagacaacatggatttgattgccaagatcttggaagccctcttaatgagaggacacgtagaagaagccctggggcgtatagatcttctgaaccaaaacggacacacagctgatctggacagcctcttatctgtcttaagcgagaaagggaagacgattgcagcattgaagctgttagatttcgggttggagagagatctcagcttagagttttcgagctacgacaaagtgttggatgcgcttttaggagctgggaagactctgaatgcgtactcagttctttgtaagatcatggagaaaggaagttcaacagattggaagagctctgatgaactgatcaaaagcttgaaccaagaagggaacacaaagcaagctgatgttctttctagaatgatcaagaagggacaaggaatcaagaaacaaaacaatgtttctctatagaaacttgacaaagtgattctttcttaagttattctcctttcattgttggttcaagtcaagtcaacaacttcagttatcttctccaaataaatccttttttgaaacttgttttgaaggacgcgtttgtatgatcattctgtgttttctttttggtaggaattgtatcgttcctgatttagtttcttaacctcttgaaaacgttaaatacgtaaaagatttttttcgaagatttgtgtttggaacaagagttgcatcttccattggctgttagtaaaatatcttatcttctcatagatttttagcttcagcatgagacgtgccatctccactgtccatccaaaattcgacggtccagatctcatctcatctatcatcacacttcatattatgacaagtagttagtagactgtcccaataaaatcacaaccaaacacaactaatttaagtgagaaaagcacataactttatcacaaaaaatatttagaaaagtaaatacaataagcatactaaaatgcaaaacgaaacaatttgcgacatgtattaaattttttgtatattactactaaacaagcgaaaaataaaataattcctatcatttatgtggaaacaaatagttgcaaagaaaataaaaattcttacaaaaaaaacagaaatcagaatattgagcctaaaaaatagtttgaggtaaaattacaaaataaaataagtttgagatatttgtgcaaagaacttaatatatttattcatttgccccataaataccaaagacactgcatcttatctccactctcaaaatcatcttcttcacccaaaaacccctaaaagccttatcccttcttcttcccatg

SEQ ID NO: 12803 - DNA, 3000 bp, Unknown
  misc_feature (1)..( 3000): cDNA_ID_2709682_gDNA_ID_2214573_Annot_ID_135104 3000 nt of promoter + ATG
gtttggttttagttgaagactacagcgaccaaaagaacttattggttgttgacacgcgcacgagcctgttctgttcgaagtaaacacgtgaactgaactgtaccaacttattttattttaactcaacccaaccaaattgaattcggtttatttcggttacacctctgttagataagagacgaagaaaattcagtcatcttgtccaatacttttcactacatgagttaataaaatattattaaataccactacccaatgatcatttgacgaaaatatttattaaacctatcaattgttactttgttagcttgcaatttataacaatattggagtttcaacaaatattggagttgacattattaattgtctaactaatatgttaggttagttaagaagattgttgaagctaatcaatgtggttaattaagaagattgttgaagcttaatcaatgtatataaacacttgtacacagttttagtttctatgaagatttctcttttcttatcaactctcctctctacttcttccttgccttgtgattcgtcaataattttgcgttaggcattttctgtaatcttaaatcatgttttaaattatttcgttcatgacaatgatttctctcatcgagacctctcagtgaaaggagtttagttccggttagcgtcaaaaaccaacaacattacagctttgattgaccatcacaaaggcaatcgaagtacacgtttgtcactgtgatttagattgctatgagccaagtcccgttcagcatttcaaattgaatctgtatttaccatccatactcacgtagggagagttaaaaaccaaaaaaaaattcagagacggcaaacgtaaaacagaagctaggttttgatcacaacaaataacagagcaagtaatacacaatgaccgataatgagagcatcaattccatgatgtaaggaacgattctatcccgcaccgccaatgctaggacagtcaagagctggttataagttcccgtttaatctatgcggctgttttactttactgtctggttgagttctttaaccagccagctcggccagccgcaatatcatcattcatcacattttccaaaaaaaacatatcacaagagcataacgattaaactcaatgcataacaagtggtgtagaagtattgatacattcctgtaatgtcactagcaatctcaaacaatcatgatacatcatatttctctcatggagccaaaatccccggctggtggaaaaataatagtttgcgcaagtgtgtatgattatttctattgaggtgaaaaacaatctaaggttttctttttacttttatttccaacacaaaattgattacgcatatgtattccacatgcaaagaattttaaataccgggatttgatagtgaacttatgctgcgacagactgtttctcctcgtaatcgtcaagccttaaagcttccaatagccttggccatgactctgggatgcctccaggtaagtcaaactccataagctttcccttggtacggtagtattcttcaagaggctggctctgcatatagaaaaatacaaaaaggcactaattaacacctgatcgttcataaactagcaatggaaaaggacaatagaggggcttaccgtttcattgtatatacgaagccttgctttcaccacctcttcagtatcatcagctcgagtgacaagctttgacatacattgatgtggagggagaagtggatccatactaattccaggtcttccattctcaccctttaagttgatgtgagctacattaaaacccttgccacattgactacatgttctccttccaaggcatttgtcaaccaaaacttcctcaggaagcttcaaattcaccaccaaatcgatgtcagttacatctcccagtatttcctgaaccaaaagacaatccactgttagaaatgataatggagattgattatcaaaaattgcttaaaacgaataatacttacagcttgtctcatggtacgaggaaagccatcaaggataaaccctgattcacctctagcttcaccagcctcaagtcttttggacaataagtctacaatgatctcatcagaaaccaattttccctgatttacaatctccgatagctgcatcaagtaacaagagattgtttaacaattatgcatacagataacaaacaaaacaaagccattgactttaatatatatgaatagatctgttatgatactgatcaaatgtagttagaaacactttcaaatggacttagctcactagatctatcgagagatagacggaaattttcagatccaataatgaaagtccgattagctaaacattcaatttcagactatatggatccaaaatcgaacaaagaagagaatctccatcagaatcacagtaacagaaaatgggaaagaaaaaaaaaggtcgcaccttttgagagagaggtccagaagatgcaagctcttcacggacgagatcgccggtggcgatgtgaggaacgccgagaagggttgatagtctactagcgtaagttccttttccaacaccaggacatcccaaaaacacccactgaacatttctatctttcggagcaaccctgctagctccgccgccgtgaagaaacggcgaaggcgacgacgcgtggctagcttcggctgaagtagagtagaaacggttaccaaagccaaagagggaggaggatctagccacacgcactaatctcgccattgcagaaagagaaatgtagagagatagaagcggcttgagctttgagcttaccctaaacaagaacgtgcacgaacatatgctctttagattcttttcccattttgccctaaagttaactgacgtggcatgtgactttttctctgagatcatggttacatcatctgacacgtgtaataacccaactccacgagattaaccaacggtatgagaaaatcgatttcgattttaaattgggattattattattttcagctttctctggaagcaacaatg

SEQ ID NO: 12804 - DNA, 3000 bp, Unknown
  misc_feature (1)..( 3000): cDNA_ID_3409207_gDNA_ID_2214573_Annot_ID_135105 3000 nt of promoter + ATG
tatgtgtatctctatcatgacgaatcaatccagatctctccgtccaccggaaaaattgaagagcatgctcaagtttcttagcaccgtgcaatacattatagactaaagaatgatcccattcaggtacaagatctcggattgagttctgtaaacgagtcgtccaagcacgattatccatcattctacatattgtatcctctagcttttcatggttttgacgcttacctcgttggaacctctctctgagtggtctcgtctctgtagaagtcagattcttcttcgtctcggattttgcatctggagattgggtttctgggtttgcgtttgctggagtttgggtttcttcgatggtgctgaatagacgagggagtgagaagagagatgagtttgatgatctgggaagcgagagataaaccctagcttttgattggtagcgtttagatctggaaatgaaagccattacaggaaatggaacctttgtctctgagtttttctgaaaattttcaattcgacatggaaggacaaaggaagcaagagtttttagtgatgagtagggttttagtttagggaagaaatggagtcctggatccaaatcttgttccgggtcgggtattttctgaacttgaacccggcctgttaagtgttactatccagcccggtttcgtgcataacagatgggcctagaatcgtatctagtgttgaccaacatgtaatttccacactgttatctataatttatttgtttttattaatgtttaaagttcttatgaggaataacaaacatgtataaagtaatttgaaatgtaaccttaaacaaatgttggatggtgataggagatgcctaagctgacatattttgtgggacttcaagatagtaatctatagtcttacctttgatcaactatgttatcatatcaatagagacaaaattgtttcgataactggattatgtgaatttgatgtacatctttatttggaaataaaaatatatatcttctagcaagggccacacttatccttcgctgatctcgactcataagtcataatgatcatcaaaaatcaagaaacaatgatcattactttcggtctacgacttgtctttttttctttccctacctatatatcaaatgtggtcgttgtgattgtggtaatggtgttttatggatttagttgagtatccgggcatagcagtgtcgttactgttttttaaatatctatttttcgattgcgattctttcaactcttcaagcacaacacgctttaaggatctcttcaacaggcgggtcatcaccggcttctttgtcctgaaatccgcaaacaaattgttgaaaacaacaatgtgtttgaaaagatatatcggtatactaggttcccaaatatgaggctagtttcacaatcaagattagacgaaagagattaccttgcgtatataagagatgttatctttcccagggccagcaactaagattccgccttgttgcctgcacaaggtccgtgacaatagttgttaagaaaaacggaaagtaatctcatcgatctctaaccagaaggaatgaatgattcatatactcttaaacttaccagccgcctctttcaactgtatctttcataaacgagagtttccagtcttggcggtatccttccatgtaagactctagtatcttcatagcagcctataataatgccacagaagctactgagagtctgagaccacaaaagcagaacattttggttacctaattataatatgctaagtagaagtcactctactttgggtgtaaatgtaacagaaacccctgaaacgaactcaagcgcctcgtatgatgcgtggtttggatccgcatagacctctgtattgagagaaagttgattacagataattagatcatctcataaaaggaactactcaccaggcttttttagtaatcaagagaaaacatacctcctttaaacttagtctgttccacaaaagtattagcctgcatacatagatggtcataacgtgagaagcagcagcttaaaactgcttacgcttacaaaaattgcgtattcaaaatgttgtttacctgatcgatgcttcccggtccgatcagaacaagagcaacaccagatgcatccatcacatcctaaacaaaaatctcaaaggtatcactcaatgacttcaattgtgtataaatggccaatctttttaaaccaaagatcattctgttaccttcttttctgcaagataagctgctcgtttccgacagagcacacatctgaaaacataacaagcaatcttagatagttacacatagtcataaaccagaatcatcaaatataatgagaaaattacccaaaatgacgagcaaatgcaacaacggccttcctatctttccataaatcagaaatcggaatctcatttcctctcaaatccaagactttcactgtatctagcgaatcagctgtacctttccctattccagctcctgtggagaatcaatataatctagtaagtaatctagaatctccgtattcaatataatatagaaagagaagacacttaagctcaccggaagaagctccggtaatggccgacacgaccacggcgctacgccggagagagacactacgaaagtgagatttgaccgaataaccaggaagtactgtccctaatccatgaatcgtcttcagcttcggctgcagagtaatggacgtgatcgtcgacgacgacgagagagcaatcgccattgttgcttccagagaaagctgaaaataataataatcccaatttaaaatcgaaatcgattttctcataccgttggttaatctcgtggagttgggttattacacgtgtcagatgatgtaaccatgatctcagagaaaaagtcacatgccacgtcagttaactttagggcaaaatgggaaaagaatctaaagagcatatgttcgtgcacgttcttgtttagggtaagctcaaagctcaagccgcttctatctctctacatttctctttctgca

SEQ ID NO: 12805 - DNA, 3000 bp, Unknown
  misc_feature (1)..( 3000): cDNA_ID_3026615_gDNA_ID_2214573_Annot_ID_135106 3000 nt of promoter + ATG
gattgtaaatcagggaaaattggtttctgatgagatcattgtagacttattgtccaaaagacttgaggctggtgaagctagaggtgaatcagggtttatccttgatggctttcctcgtaccatgagacaagctgtaagtattattcgttttaagcaatttttgataatcaatctccattatcatttctaacagtggattgtcttttggttcaggaaatactgggagatgtaactgacatcgatttggtggtgaatttgaagcttcctgaggaagttttggttgacaaatgccttggaaggagaacatgtagtcaatgtggcaagggttttaatgtagctcacatcaacttaaagggtgagaatggaagacctggaattagtatggatccacttctccctccacatcaatgtatgtcaaagcttgtcactcgagctgatgatactgaagaggtggtgaaagcaaggcttcgtatatacaatgaaacggtaagcccctctattgtccttttccattgctagtttatgaacgatcaggtgttaattagtgcctttttgtatttttctatatgcagagccagcctcttgaagaatactaccgtaccaagggaaagcttatggagtttgacttacctggaggcatcccagagtcatggccaaggctattggaagctttaaggcttgacgattacgaggagaaacagtctgtcgcagcataagttcactatcaaatcccggtatttaaaattctttgcatgtggaatacatatgcgtaatcaattttgtgttggaaataaaagtaaaaagaaaaccttagattgtttttcacctcaatagaaataatcatacacacttgcgcaaactattatttttccaccagccggggattttggctccatgagagaaatatgatgtatcatgattgtttgagattgctagtgacattacaggaatgtatcaatacttctacaccacttgttatgcattgagtttaatcgttatgctcttgtgatatgttttttttggaaaatgtgatgaatgatgatattgcggctggccgagctggctggttaaagaactcaaccagacagtaaagtaaaacagccgcatagattaaacgggaacttataaccagctcttgactgtcctagcattggcggtgcgggatagaatcgttccttacatcatggaattgatgctctcattatcggtcattgtgtattacttgctctgttatttgttgtgatcaaaacctagcttctgttttacgtttgccgtctctgaatttttttttggtttttaactctccctacgtgagtatggatggtaaatacagattcaatttgaaatgctgaacgggacttggctcatagcaatctaaatcacagtgacaaacgtgtacttcgattgcctttgtgatggtcaatcaaagctgtaatgttgttggtttttgacgctaaccggaactaaactcctttcactgagaggtctcgatgagagaaatcattgtcatgaacgaaataatttaaaacatgatttaagattacagaaaatgcctaacgcaaaattattgacgaatcacaaggcaaggaagaagtagagaggagagttgataagaaaagagaaatcttcatagaaactaaaactgtgtacaagtgtttatatacattgattaagcttcaacaatcttcttaattaaccacattgattagcttcaacaatcttcttaactaacctaacatattagttagacaattaataatgtcaactccaatatttgttgaaactccaatattgttataaattgcaagctaacaaagtaacaattgataggtttaataaatattttcgtcaaatgatcattgggtagtggtatttaataatattttattaactcatgtagtgaaaagtattggacaagatgactgaattttcttcgtctcttatctaacagaggtgtaaccgaaataaaccgaattcaatttggttgggttgagttaaaataaaataagttggtacagttcagttcacgtgtttacttcgaacagaacaggctcgtgcgcgtgtcaacaaccaataagttcttttggtcgctgtagtcttcaactaaaaccaaacgacaccgttccttgtggccgcgttttccaactaactttcaacttcaactaacgttcaacgagtgtccatctcctctatctctctttttccttttcattggcttcttcatcactatagagactaaaactgaccttgatccatccaacgttccctatactgacacgtgtatccatcacagtgtcggctaaagctcaaggaactcataccaagaaatacatcatcatctctcaataatcacaaaccggatccggatcaatttggatccatcagattttcttcgttccctaactcctaaaaaggagagattcttcaaatccttatcacaacttcagtttttgcattcaccgtcgtgagtgttctacttttggtaatgattcactagtcaagtttctttctttatgctataacttgcaactagatcttgtactaatggaattgatgtttctccaatcatcttctttgattttgctccatctttcttttcctaatttggaaaaatgagtctttacctatagaatctgataaatatgtctcttacataattgattaaggtcaagtaatggaggtgaatgatggtgaaagagtggtaatagcaaaaccagttgcctcaagaccttcttcaagttctggcttcaggacattcactgagcttcttactgattcagttaccgtatctccgcaaacgacttgccacgagattgtagacgctgctataagaccaaagactttgagattcaatcagccagtagcagcttcggtctcatgtccacgggtatcgagttgtctatttaattcttcgcattgttatcttctttccgcatcctctagtcttgactcaactatttctgataatgataggctgaagtaaaaggtattggaaatgga

SEQ ID NO: 12806 - DNA, 3000 bp, Unknown; identical to SEQ ID NO: 12802
  misc_feature (1)..( 3000): cDNA_ID_2992472_gDNA_ID_2214573_Annot_ID_186238 3000 nt of promoter + ATG

SEQ ID NO: 12807 - DNA, 3000 bp, Unknown
  misc_feature (1)..( 3000): cDNA_ID_2712623_gDNA_ID_2214573_Annot_ID_135108 3000 nt of promoter + ATG
gtctcggaattgagaagcccttaaccacccgacttgagccatgtgggcatatacacatgatttgccatccagaaatgctacttacggtatggacaccattgagcccaaatgcctttaaatgcaatgtacatggtgcttggaagactgacagggaaattagaggcattggttgtgtccttagagactcaaaatagattgtttgagttatctgaaatttttcatggctccatctacatcttttatcttggagtagcagcaaattggaaaccatataactaccatgatttatagcactttaaactgaaaaatatatagatgaaataattttaaatatgaaaccgtttgatgatcaagatcccaagtcgattataagcgtcaaaatttcattaaagatagagagatcatctgaaacatatccaaagctaatggaaacaacacaaaaactctttgatataatgcaaacttagaggaaagggagatcccttaacgattggccttagcaactctctcaatctcatctttcttcttgatggcatagctgcaagacaagagaagatgctattattagcttaactaactaacaataaagtgaagccatcaagagacagactatgtagatagagtgttcttacctgttggaagatccctttgcagcattgatgagttcatcagcaaggcactcagcgattgtcttgatgtttctaaaggcagcttcacgtgcaccagttgtaagcaagaagatcgcttggttcacacgtcttagaggagagatatcaacagcctgcctcctaaccacaccagcagatccaatcctggtagcatcttcacgtggaccactaattcacataaagaacaaaccttcttaattagattcagttcatagtaacaagcacgcaagaattttacaggtttcagtatagcaatcttaatatacctgttaacaatggcatcaatgataacttgaatcgggttcaagtcagacaagaggtggataatctccatggcatgcttgacgatcctgacagccatcaacttcttaccattgtttcttccgtgcatcatgagagagttagtgagcctctcaacaattgggcactgcgcctttctgaacctcttcacagagtatcgtccagcagtatggggaacaaaagttgcgtgcttcgatggctgaacaccaatgtagtccacaagactaatatccgtaacctacataacaccaatatgcagatcaaaaacaaatattagcacaccaatcatataaaacacaaaaaatacatgacctttagtgtcaaattagtgttataatcaaaacaaacacaacatgggtttcagtgaagacggacaaagattataatagctaagatctagtaagtgactaagtgaggactataatttgatataattcacacaataaagctaatgtaactactcatatcaatataaaccaatcatttcaatgtctatcatacagctaaataagaattagatcctagacaattctcaagtgtctaaagagatattctaagagaagggattggtgaggaatataccgaaacgtcatcaaagctccaacggttgaagagcttaacctcattggtaagctgctgttgaatctcagcgtcgatttctgcggaggcggccatgactggaggatcaatagaagattagtaaaaacccgtaaataggaaattagaaaatgaaaaaacaggaatcagagaatggacctgaaactctataagtgtcgagagaagtagggatctttagccgcggcttgaagaagaagaagagaaggaagctcaagcaatgaagaataaaccctaaaaatgagtgttagtaatgttctgtttataaaatgggttttattgggcttatgttgggcttttgtgttttgttttagtttagtttctctccgaattggacacagtttggctattgggttgtatttatgttgagagactgactagattaggttttatcttttcttggcaatagttgaagatacggttttatcttttgtctacataaatcatcatacgttgcatcgaacaaagttctcaaaatgcttaccaacttgatttacaagtgacattttattattcttaagaacatgaagaatacattcttctttgtaatgatgaccatacagtcatcttttttcttttctgtctcaaccatccatcatactttattagtactaatttatattactattatatgaaaagaaaaacacgcatcaattaagccctaaatatcggctttgacgtgcgtcgtagtgactttaattattacaaggagcatattagcgactagcgactatccaaagtatgagcttcagaactaactttttattacaaaatacataattatcgtttatgatttcaatgtgtaaactgtgatatgaatctttttaatatttgataaaataaaagaaaagtcgcagagtgggaaggatataataatttttttcatttttatttcttactgcacgtgggaattaagaaactacacaagttttccaacttattaagctattagtcaacttcttaaaaatataagtcttactttattggttgaattgaacgacatgtgtattgctactttaacttattcgagttgttaattttttttttttatcatcatcattcgagttgtttaattgtttaatcacaaaaaattaaaatggaaaattacctaaaaaaacattatattatgttgttgagaatattgatagttagtatgcaacaattcttttagtaagatcatgatgttattacctttaccttctaccacctaactgtttgaaaacacattttactcaattcatatattatattttacacatatacataagaaggagacaaatgcatatttcttaattgatttctgagcatttcaacagagagacaaagaacatagggacccgttgaggcatggctcctttgggtgtagaagaagagcaatagttactgtgagtggagcttgcagagattggaaaaaaac

SEQ ID NO: 12808 - DNA, 3000 bp, Unknown
  misc_feature (1)..( 3000): cDNA_ID_2712619_gDNA_ID_2214573_Annot_ID_135109 3000 nt of promoter + ATG
tttttttgggggttttaggttcatttccctcctctctcaagtctcaggggatttgaatctggatctgtttttctttatttgaagttggaaatattttgaattttcttagtggtaagttgattttaaagtatgatggtgatatgttccttattgaatgaacattaaatgacatgatctaacaacacattggtcttactattgttattttttagtttcttcttttgcagttagttgtgaagttgaactttaagattttaccaatttagttttggttggttgaatgaaagaaaaaacagtatgagtatgaccattgatccctctaattacaacacaaaatgcaggtgggcttctctctctctctctcattctctcttcatatagatatatatgtgtgatttaagaactttaatatagagattgaggaattatatttgtcttcttttctttttttttggttaagaacaaattttgcaagtaagaagatggaagaagaagaagaaaaggaagaaggtcagagaactgtggagtgtttaagaggaagattacttgcagagaggcaagtttcaagatctgcaaaagaagaagcagagcttattactagaaaggtaactttgattaaatcctatctttcattaatcttgtttaaaaatatcagggtttgatcaagaaccaagaaagaatcacttactctgttctcgtttcttggaccaaaaaggtgttgtttcaaagtagttgtagtgttgatctggatttggtttttgttttactcaaagacaacctttaatctcttggaaacagatggaagagttggagcgtaatctgaaagaagagatcagattgagggaaaaagcagagaagagactaaagcttctgatgaagaaacttgaattcattaaagggtcacgcagttcggagggatcaagttcatctgaagtttcttgcatatcatcggtttgcacttcagcctccaaggaagaagaagaagaaactcatgatagtggagccgtggatgaaggaaaaactgaccatgcaactgaaaatgttgcctccacggaagaagctgattcaagttcaaagctcaaagatgtttcttctggtgaagcaagtgttgttgcttcaacctcaagtcataaagaagaatcccagtttggtaatgagttttcttggtactcagatgcaacttaagagttcaagaatcaagaatatcaatcttttattccctaaacaactttgatcagaaccttttctcatggtcgatcataaagttactaatactattactttattagtatatactacttttgttaatcaccagtttaagaacaagaagaaagaagccaagatcaaatgtgggtttggatacagtggacaatggagagagagagaggtggcatgtgaataaagggattgattaggctttaggacacatttgagtttggtagtaataaattcaaagtgttagtagagatggggaggacgacacgacacacatgacataatgtatgtctctttcttcttgtgttttttgttatcaaagaacgaaagtgacctttcttggaaattagtgatatagaccaaacaaaggaagaagcagtatgtttttcattgcacttgcagcgatggaccctgacccttattttcctttacttcatttcgggtcgaaactcactcggcctagtattcaaaactttcgcaatggtcaaagagaatgagttcaaagctcttaaagtgacactattttccctacggatttgatcacttaatctcttttttttctttttctttattgtttcaattcatttcttctaattacatctatcatcatccttaatcatccgtatcaaattcacataatgaacgttgttcctaaaataaatgacaaacagtaaaattatttcggctatcatatttcgttaggaacctatttttgatgacttcaagtaatttttttttttaaatggattttacattatgttcaaatagtttatttttcatcattttatctctttttctttactttccattcatttgttctagttgcattacattgtccacgtcatgtataggtggacttacaaacttcactagtaatccaacaaaatacaccacgtggattaaagtagattcactctctcgatagacatcgggtctaattgccagtatttttttgtaacaagcagacagaaatttttgttcaaattaagtgattttttttttggttcggatgttcaaattaaatgatagaattaacgttacgaaactatgaaggttctttgctataatcgtttcgaaattcatctttttaattttctatataattttttttgctggaaaacaaaataaacaaagagtttgatcgtgcatgaccgatcatgacggagcaacacttgtttgtcgtccacaactatctaagagacaggtgattttttttaatccacaatagtatattttaacaatctcgtcctgattaatcggaaatctctcgttgacgatttctcgatcgcaacagcacgaaactaaccgatcgatgatcctagactttctttttgatcttatcgtcgtttcggtttaatttttgttgttatagttttacatgttaaaatcattaagcttgtgtacggatttgagttttgcgagtgtagtaatgtaaagtaaagcaatgggaattagtagaaataggtttctttgtgaaatatgttgttatctttggtgagcaagcgctcactagaggtagattccaggtaaaattatatttctctaatcatttactaatctcgtgattaagatcataacatttatttgatgaattttgatttgcagggacgcctatggatttgccttgagacctcaacacgttcagagatatcaagaataccttagcatctatacagtgagttcttcttgatcatgcttcatttgctttttctcagataatttagtagttgaattttttttcatatattagctatgattgcattattagaattcatgtatgtcatg

SEQ ID NO: 12809 - DNA, 3000 bp, Unknown
  misc_feature (1)..( 3000): cDNA_ID_2712607_gDNA_ID_2214573_Annot_ID_135113 3000 nt of promoter + ATG
tcatctcatcaaacaatgctcttgcataatccaagctaccacatttagcataaaaaccaatcacagcattacacaaggataaatccatctgaatatgattttcaatcatcttcttgtgaacttccaacccgaaaataagatcgcttgactgtccgcacgcctggaagacgcttatcacagtgactccattaggcttaaaatcagagcaagctaacatcgctttatacatcttcttacagtcctcaaaagacccactttgagaataccctgaaatcatagaattccacgaaacaacatctctctcagacatttcatcaaacactttcctcgcagactcgatgttatcacactttgtatagtacgttatcatcccattgcccacgaagacatctgaatcaaatccacctcgtataacaaacccatgaacttgtcgagccaatgaacccaaccagaaatcatcacagcctgacagtgccttcaacacacaagagatgctaatagaatccggtctggcagcatcggaagagtaacaagaggatccaatccaggacaagaacaacgagaaagcatcgaaatacatctcacgcgaagtataagcgatgagaagtgcgttgtaagagaaggcatttctaacggtaatttcgtcgaacacatggagtgcttggcggaaacgatcctgcctagtgtaaaaactgatgagctttgacgcgaggaagttgtccggcttgatggagaagacgacaatacgcgcgtgaagctgaagcacgtggagaggaagtcggtgacgggtgaagtgctggatgaggtgaccgtacgcaccgccgtcgaccgccgccttgtttagcaagccttgcaaggctcgttgaatttcgaatcccaacttcattcatatctaaccaaaagctaaaccggagaaataaaacaatatgaatatatagaggcaatttaacgggcttattaatgggccttaaagcccatagtgtcgctgtattacagaacggagttttgaaatcgatttgacttttttagtttcatgtcttgtctgagaaattattattgtcgagctttcggttataaacagtctcgatcttgctacagtcgatcactgaatcgtgaaatagctaacgagtcatctgaagttgagagacgagctcgttctctgagagttttggatatcatatcttcgaaatctggtggagtttcgaatcgtcaggaccattttggtttcgttcaggaatttcgacaaacagattcgtggcgattcagaggtcaggcaatttccgaggattttgatctctcaagaaccaaaaatggagtttcaagcgtgctcgaagaagttatgctggaggattcttcaagctctgtcaagcgagatggatggagtttcgatgcttatggtttatcatccgccgtgagatcttgtgggttgaatcgagactttagaaccggttctgggtttcattgtttagcgttgaaaggtgggtttatctcagatgtctacttaggaagttctctggtcgttttgtacagagattctggtgaagtagagaatgcatataaagtgtttgaagaaatgcctgagaggaatgtggtttcatggacggctatgatttcagggtttgcgcaagaatggcgagttgatatctgcttgaagctttattcaaagatgagaaagtcaacctctgatccgaatgattacacattcacggctctcttgagcgcttgcacgggaagcggagccctagggcaaggaagaagtgttcattgtcagacactccacatgggattgaagtcgtatctacatatctcaaactctctcatctcgatgtactgcaaatgcggtgatttgaaggatgcttttcgtatctttgaccagttttcaaacaaagacgttgtttcttggaactctatgattgctggttacgcgcagcacggccttgcaatgcaagcaatcgagctctttgaattaatgatgcctaaaagcggaacaaagccagatgcaatcacatatctaggagttttgtcatcgtgtagacacgcaggtcttgtaaaagaaggaagaaagttcttcaatttgatggcggaacacggcctgaaaccagaactcaaccattactcttgtctagtcgatcttctcgggagatttggtctgttgcaagaagccctggaactgatcgagaacatgccaatgaaaccaaactcagtcatatggggatctctgctattctcttgccgtgttcacggcgatgtctggaccggaatcagagctgcagaggaacgactaatgcttgaacctgattgcgcagccacgcatgtccagctggcaaatctttacgccagtgtagggtactggaaagaagcggcgacagtgaggaagctgatgaaagataaaggactgaagacgaatccgggttgcagttggatcgagatcaataactatgttttcatgtttaaagctgaagatggtagcaactgtagaatgctagagattgttcatgttcttcattgtctcattgatcacatggagttcctctaatattcagggttctctctcattagttttatagtgcataccagatccagatcttttctataatggatcaagttttgctttgaacgttttcaacataacctctattactaatgaaaagactttaatttgtatagttgagtaatataaacacactaatttaataattaaccaggtaatgaaatgaatgtagctgtataatgcggtaaaatgcaccaagagtttctctatgacgtaatgtgaagttgagaaacacacgccatcaaaattttctttggttaataattaaaattttaaggtacaagtttgcacgattaattcaaaatttactacacaagattcataattaaggaatcgaatataggaaagtgtccaactggtcctctcttatatacccttctccactaataccgcactcagaagacgacgacaaaacaaaaaagttgcgagagacagagagaaacagagac

SEQ ID NO: 12810 - DNA, 3000 bp, Unknown
  misc_feature (1)..( 3000): cDNA_ID_1379041_gDNA_ID_2214573_Annot_ID_135114 3000 nt of promoter + ATG
gataaccgcgagtatctcaagagggaaactcgtctctggagcaacgaacaacaactcatcaaacctaacaccatcattccaaacattcgccaatcctttctggattgaaatgatagtaataggcaaacgtgctatattaaactcaagaagacaaccagaactcctcggaatgagactaggagctgtaatggtcaccggaatcatcctagctacaatgttcactaacctagacaattccccaaaaggagcacaagaacgtttaggattcttcgcattcgcaatgtcaacaacattctacacatgtgcagaagcaatcccagtctttctacaagaacgttacatattcatgagagaaacagcttacaacgcttaccggagatcctcctacgtcctctctcaatccataatctcaatcccggccttaatcgtcctctccgcaagcttcgccgccacaacattctgggccgttggtctcgacggaggcgccaatggtttcttcttcttctacttcacaatcctagcctcattttgggcaggaagctccttcgtaacgttcctctccggcgttataccaaacgtaatgctcggattcacagtcgtagtagcgatcctcgcttacttcctcctcttctccggattcttcatctctcgagatcgaattcctgtttactggctctggttccattacatctccttggtgaaatacccttacgaaggagtgttgcagaacgaatttcaaaatccgacgagatgtttcgccagaggagttcagttattcgacaattcgccgttgggggagtttccgaacgatgtgaaagtgaatctgttgaagagtatgagcggtgtattggggacgaatgtgacggcggagacttgtgtgacgacggggattgatattttgaaacagcaagggattacggatattagtaaatggaattgtttgtggattactgttgcttggggttttttctttagggttttgttttatttcactctcttgattggtagcaagaacaaacggaagtgattaaacagttgttctttttttttttttgaaaaaaggtttgttgtaattttgtttcctttttctttcaattatataattgtatgtccttgctatatttaatcgattaattaaagaataataaagtcataatttatgaaatgaaaaataccggtgatatttatatatcttcattctttttattctgtaaaaaatgaaagtgctttaggaaaaaaaaatgctaaatgttaaaaaaaaaacagaaaataaaaatctaagctaattgctattagtatttctttaataacaaaataggattataggcggactttgatttgttcatcaaagaatagtttataacatgaattggtaaacggtaaaatttatcctagaaggtagaagatagatgtcataaactatgcataaatagatagatgtcataacaaatctgatcacttttagatgttgtaagtttttaaagattagaggatccaatttgttataatgaatttgcataactagatatatagtttagtctggataactcattactattagtctttaagcaaatgtgatcagagtgtgcaacatagaagaataccgagacatacaaaacttgcaatttgtaaaccaccattcttattttacaatttacacaaattaaatgggccttattaatataaggcccaacagattgcaaaatggtgaatatggcaacatcgattcttatctctttttaaagatatttaccgttggtttaggacacaacaccaaattattaccgttggatttagtcggttctgtctgaagcccatttttgtttttttctgtcagcgtctgaagcccatttataaacacttgaaaaccatactttagctaccttacgctgttcttcccctttccttccgaaattagggcttccgtgtttcgcagtgctctccttcaatccccaggtatcgaaactctgctcaattcgatgattcatattgaaatttagtgctttcactgctcggaattacgattttatattggttcgatgcatctgcggtgatggtttccttagcttctgtctttccgatttatcgcttccttgtctctgaattaactaaatggcgtcttctttggggcttttttataggtcttgagttagtgaatttttgttacgttcttgttttatagtttctaacaggttatgctcaaaaatctgtggtttctttgtcccttttttttgattttgtagcttgacaatgcctcgctatgatgatcgctatgggaacactcgtctttacgttggccgattatcatcgagaactaggacccgagaccttgaacgtctttttagcagatacggaaggtaattgactcttctatctatgattatggacgaagtattttgatttctcggtaattggaataaatgatggtctcaatgtgatttttctagttatatagtacgtaaattgctattgtgcgaggaaacaattgcagaaagttaaaagtatcgaggagcataatgcttctttatcttgacatattgatttctatgtgttggggttagttaaatgagagtcttcatgcgcctttctatatatcttggttatgaaaattgttagtgcgagggagagatgcagaaagtcgtcattaagcatcgaggggcatagttttggttctgtattttgatatttgtgttcttgagggaaagttgtggaactaggtttagtcattagtgtatgtttttaacttgaatgatcttattgaaggtctctgggattttgcctaacctggaggtgtttgatgagtgggtggacttggtggaaattctcgccaagtgtttaggggacagggcgccttggcgattctgtttgtagaattttttaatgtgttttgatggaaatggagactcagtctcaaaaatggtgtttagaagtaccttaaagtaatgatggccttacttttctgccaacaatttcttccgcagagtgcgagatgtggatatg

SEQ ID NO: 12811 - DNA, 3000 bp, Unknown
  misc_feature (1)..( 3000): cDNA_ID_2709670_gDNA_ID_2214573_Annot_ID_135117 3000 nt of promoter + ATG
tagatttgactgttactgagcagctagctgtccaaatcgtgccaaagcggcaaactcgtacctatcttattaaaactaacgttacaatattgtcttattttattttattagtgtaaaactgtcgttatctttttttgttgacaaatgaaaacatttcttttcggaggaatgaggatggttgatattttttattgagagataccacaaaataacatgttttggatacttaagtatctagcaagattgtttgaccaaaaaaaaaaaagtatctagcaagatttttacaaaaaaaaagtatatctagcaagagaaaaagtcacattattcggatgtaattcagtacttgtcctccataatcaatcgaacaaaaacaaattgttcagaatcagtcacatacttgaggtggcaaaatatttaattagcaaacgagtaagaagtggcaaagtattataaaaggaaaatatttgaattaagcaacaaaaatacaagttaaattttgattaaaccaaatatatatctctcaagtatattactcactcattactaactgactatatctgaaaagttcataaaattttacgtatgccatttcgatttcgattgaaaacatgagagcacaacttaaattacgagagattatcaagaaataagtaagcttatatgtggaacattatcacataggtatcctgagcaacatgggcatatagtaatctaaatagtaattagaaagtcactggaacataaatgtggacacgacttcaatagtatgagtgggttacacgaaaacccaaaattctcattaacgtgaaaaaataggcatataatacccaaaagaaatgcattatataagactaacgtggagaagtaggcatataaaacgtttggtatggctgttatatctgttttccagaactttatactatacgcttcaatatataagacctagatgattctatttacccattcttacaagagatcacatgatccacataaatctgtatacgtaatactatttgtttgttttatgacgcctgtccctttcaattttgtttaatagttaaaataaatgttgaacaaattcttatatctatataaacaaatgttatcaaagagaaccagttctggcagctaatttggtcgaacatgattgagggcctgttcctgtttgctagaaaatataatataaactttcgaatataactaacgaaaaatatccaagaatatctgtttttcgatgatctcttcattgtcccttattatcgaaattagtcgtagttaatctttgtttgtagtcatcagtgatatagatttgatcaaatcatgatcgttttgaaatcgttagcaatagtgacaagttatagtgataacaatatattgcatcgattgaattatgctatagcaactgcaaaccagttaacaaagtattttgatggtcgttgttgctagcgaccgcaaacaaacaaacaaaaactatcatataattttgcatattaccttttgagcatgcgaatattacctttcaaaatctaaaaacctttatgtattgctagattaggatgtatataagtcaatgcccagaagctgaaatcacaattaccggaaaaagcaaaacatgtagcaaacactttataacttattcacatagagcgcttgcaagagaccattctaagctaagtgtttgtgcttgagtcttagaaaactgaatttcatatcgtcattgtcacgtacaaggaacttacaagctataagcaaacatttttaatttctttctatgttattatatcttcaatcttttaaatgtcttctctcgaaattttagttttcaagtggtacaacaatactctatcatctaactttccagttgctaccagttgacgaactatgaattgagcaaacatatagcaagttaactagcatcagagacgtccaaactatgaattgcttaaggctgctacggctagaattgaccaacactattctatatatatatatatatattttgttgcctccaacatcaatctatgcatacaaaaatatgttctggtaagacttataattgtttgctataattttgaccagactttgtaagtgtgtttattatgattaaagaagacttggtaaaaatataagtctgatatggcttacgtaattgtgctatgatcacgacatacttacttaaaaatctctatgactacgacagactaacatcaaaccatgcatgggagagttataagttataacattgttttactattagttacacaaaaatagtcaaatagcaacatatttttcagcacgggatatgtgactattcgtgaataacatacaaatattggccgcaaactacatctgtgactgtaaccatgacaacaaaaaccggctggtaaatttggcccattcaatcacgaactacaaactcgtggccatggtcactatatcatcaatatgtgaattttgctgcaaaaataattgaattcttttttttctaactaaatgttatttgaggagaaaaaaaagattgatgggctattaattttatctattttcaaaattttattatatgagataacgttttatattgacatcaaattatgtaaggaaattctatcctatcttaaaaagatattactttttgaaagaataaaatctagttttgataagacacaactggcgtaaataaatgcaaaataactaactggattataataatttggtaatccaattattaaacaagtccaaattgcaaaacctaaaaaaacaaaaaaaaaagacacgtaggaaaatgttgaaaagaacacgctgcgtctgacttggtctccaatctctcgcattgttgcactctgtttttgtttggtctctctccatgcgatcttattcttctccaaccagtaatatcgtttgaaacctgaacaagaccctaattttagcctaattcaaaactcaaaatccgatcatcgagagaccttgtgaaattttggagaagaagaaagaatctcggcg

SEQ ID NO: 12812 - DNA, 3000 bp, Unknown
  misc_feature (1)..( 3000): cDNA_ID_2712599_gDNA_ID_2214573_Annot_ID_135122 3000 nt of promoter + ATG
gatctctttccttaatccgaatattgttggtgtgaccaagcttttgtgatcctacttactaagaagtaacaagcacaacaattatcatgaatcagtactgctaaggatatatgattgttgttagaactgttcatcttctgatcagtctgaagatttcacaaaccactctgattgatctttttctgaagttttgaagtacttgctgtgactacaatataattgctgtgtttgagttgtgtggatgggctaagatattggaccaagggattcatttccaatgctcaaacattttccactggcgaatattgttaaaatctataactacattatttaagaaccaacaatatctgtggaatggtttcacaaagagaatattcctagattgagtgcataagctcattgaaacataaccataagtgaaaagagagagaacatagcatgctgattcttccatgaacaagaagaattcagctgagaacttaggatagacaaaaagacgacgaaatggaattgatagttgaggcagtaggtaaaccattggatgacagagaaatagatgtccacaaagcttacttgaactcaaatgatggcaccggaggagcatcaaaactctccaacacctctgttttactttcactgcctggttgcacctcctcctttttcttatcaaaaagccctccaaaccatgatgatgatgatgatgatgaagctgtattctggttttgactctctgaccttatctgtgcttgactctgcatctgccccatctgcattccttgcatcccaggcattccttgcattccgggcatcccaggcattccctgcattccctgcatcccaggcattccttgcattccagggtcctccatcatcatattctgaggctgagccagtaccttgttcaacatgatcccagctccttcaatcaaagcaagcaaaacccctccaaaaatagctgatctcgaagcagcaccagccccttgccgcatagacagaaaccctccagttgcagcaccagcaatgatagagttccaaggatcctccttttgccttaggtacaccatggtacagtcaaatgtcgagaataaacctccccaaacagcaaaactgcctccagtacgaggtgcgttcatgctcaccgattgtgttcctccaacaaagcgactacctttaggagaattgtaagtccctttaatgaaatgaaaggcagatcctccaacagctcccataccaaaagcaccaccgatatcatcgagtatacgatcagggcaaggctcccgagatgtctctggtgttcccattattagatgcctcaggcaatgattctatcaaacctgtaatcaaatgaatattgattcattaacaaatagtaagaaatttagggttttgtaagtcactgcgaaatcaacaaatagatctctgactaattccaattaaatactgaacatatacaatcgaacgaagaagattagggtttatcaaagatccgtactttacgatcgaaagcaaaccatagaaaaaggtggaaactttgtgtatagaaatgaatctaagagaattgagaaagcactgttgttgatgatagatgagaatcgaagaagcatacctgagactaacgaggaattaatcgacggacgagttttagagacgagtttgagagagagagaaaaaatgaaggaggtgcgacggtgagcgagagaaggaaggtaaaagaagaaacggcgtcagggtttattagggttggctagaaaaaaataaacaaaaaagttacagcgaccaaactattttgcgtttaattttttgtcagctttatttttccgacactgttgcgttttttttttttttttttaatttccctctcttttttgccggcatcgctcatttttcttttcttttcgaatatggttgctttattttttattgttttaggataatttcgttcagtaaaatttaaaaaaggagccaaaagttttttcaattgcccaaactagttaaaagaaagacctgagagagaaagtaattaaacctattaataaaagcccaaatagttagtagaagatttaaagtagagaagcccaatttggagtagcccaagtttggagtagcccaagtttggagtagcccatagactaagaaaagattaaaggatgttgttgtctgtttacccgtcttgaactcacgcttaaaagctcctttataatgcaagaatgtcattaactctcttacaacggtacgttagtgtataatgtatacagattgttaatatatattggtcttcacaagttacaacatttggattaatcacacatagaacagttggagactgaattaaatactctcatattcaattacaaattcttttgtgttttcttttctttctctctaattttgtcaaatcaatgataataatgagctaatgatcatttttttaatttatccatctccaatagtgctgattccaaattctttccccaaaaaaaaagaagtagtaaatccatctcacatatatatgattgtattggcaaaagtgtttatttaagaataaaatcagaaagtagtagatttacaattccttttttttttttcccttttttccatgtttacaaatcataaagttgttggattattggaacaattttttgactgaaatatttaatatcataatacctgtaaataaataatctagcaatatatgaatactgagacaaaaaagaagaagatatttgcgacttttaaaaaaacttttgaaattaaaggtagtgttgagctctctagtaattcgaatttggatctgcttccactcccaacggttacttaccctaatctttttttgttcttcaaattctctctcaaacttgaaaagaagtctctctttcgatctccaggattcggctctgtttcctgtaagtgaatcttatttagaattcgaatctctgggattctgatccaacctttctcaattgattagggaatttgaatttgatttcacagaaatcgaag

SEQ ID NO: 12813 - DNA, 3000 bp, Unknown
  misc_feature (1)..( 3000): cDNA_ID_2712591_gDNA_ID_2214573_Annot_ID_135124 3000 nt of promoter + ATG
agtacatcacatttcatttatgtctatatttgtgaggagtttaataagtttcaaagaacgattggagaagacgattgaataattgagttcattctcgtaagtaattagttaatttgactatcgtaactaaatcctacatgtttcgattatactcataatttcaatgttatgacaaaaccgtgggctcaatatgaaacttgtgtcaagaagtcaaccagacaagaggattcatttgagaaatgccaaggagttgaccggaatttttaaatcgttggaaaatgtaattcatgttatgttattttgaagcgagtccaaattatgaatgattccactttaatagtctaaagaataaaaacttactaaggacctttcattcaatttatattttatttttttggatcgtattttattattatagattcaaatatgttaataagactttatatccaaattcatactaatattttgtgaatatttaatagacaaaaggtattcttgatccacacacatttcctaatttctaggtctcccataaccaaaaatatactaaatttccagtattacaaagaaaagaaaaccgtataacttcctttttccacaaaccttctataattaacacgattaccatagctttctactactaaccttcccatcctaattcacatttaaataaccgtgcctaggtaatgtaaagtatcattaaatactaaaaatatcacacataaaatattggtccaatgagtccacctcacacataacacaacttttataaattccaatttacagccgtataagtgcacaatgtttctcttcatccttcacaacttttctctctctccctcacaagtttctttcttctcctcaaaaatttaaactggcccttctccattttcgttcacaaaaccttgttttgtataacttatactcatgtaagttctgctactaactctgtaataacctttttgttccttgatgaagaagtcgttttcggacaagactgtttattgtttgaactcactaatgtcttcgcttgaattttcctgccgccttcttctttgttactcgctctgttttcttcttcatgaaagctctgtttcctcattttctcctttaacactatgacacacaattttttccatctcctctataataaatactttccaatttttatcctttatctcatcgattaaaactatcaaatcgatcttgttattgcaccttcctaattcaaagatgggtacgcttatatttttgtataattagcttttatttcgaaatcaagaaacaaagtttcaattttggttttgtctatgtttccatacactctgtttttttcctctcttaaatgctaagcttaaaccaaactccaaaagcatttacatctaaacatggcttcttccgtatcatgcatgatatgtgttaattaaattttccaacatgctttttacataattctccttaattaagactcttggtctggtctctgttttgttattaaaaatcttagtttctggtttccatacactctgttttacctctttgtaaaggaagcatctagattgttccgtttcatgacatgtattaattaaattttccaacatgcttgttatagaattctccttaattaagagcctctaattaatcatttctctagtttttaaaatatctgtctccaattctcctgcaactaggatttttatatacttcccgttgaatttcttagctactagtagtattatttttggttcaatttttgtcttcgttttcttattttacattttaatttctgtctttcttgcttgttgattggacccaaattgcttaagatatattattcgtcattatttttcattaatttcgctttcatttacgcgcactaatatcttgcttacctctaaatttgcagatcctcatcctttataatcctctagattgtggttctagacattttacaaacaacggtggcggaaaaaacggcagaacgttctattacacaaatatgggcaagatcttgaaatctaaggtacgttctgtaaacaatgaaactacatctcgtttattattctcctttactttctttgctgaaaacggctccgtttaacagtcttcttggccaagaaccgtcgtgaggaaatggttaaacctacgtagcggcgcttacgaatttcactctgattacccagtcaaaggtgagatattaactcgtgccgttttagatatttttgctcaaatttcttgccgtttttttaatattctcgtctgacttaccggaggtttttttttctttctagggatggagccaaggcgaaaaagctgctccgacatgatcgtgccggaaaattttcaaggtaaaaatataaaaactagctcatgaatttgatttaattatactactattgttttgttgcatcgaaaacggcgtcgtatctattgtccgtagaccgtactgaattgagactgtctccgtaccagataaagctttgggtccatctctaaccgtaggattagacatctgtgttaaaaacgacggcatataagaaactgagattttctcttgaaaatcgtgttttttttgtcggaaaaaaaaaaaaaaaaaaaacgagtttacaaatgaaaattgtatcatctgtatccacgtgtagggtgagagattaggtttaggcggtaagtttaaaaaagtctttggttttaggtgtacttgccactctcaccattcaccagtttttgttttatccacataatatctctgtctgattataatagtctaaatactaattaagtgaagtatataactaattggttttgtttatgttttgtggttgaaataggttggttgggccaaggaaatggggatttaaaacattcaaccggtgaacaacatgtgacacgcgttgatgacaaacttgatcttaagtaataaatacttccatgattaacctataatttagctctggtctataattagctatgatcattaacgtcgtaattgtttaattgttg

SEQ ID NO: 12814 - DNA, 115 bp, Unknown
  misc_feature (1)..( 115): cDNA_ID_1381793_gDNA_ID_2214573_Annot_ID_186267 3000 nt of promoter + ATG
tcctctagggtttaaggtttgattttcagacaaaagtataatcaatcattctgtaacttaaggtttgatattcagacaaaagtacaatcaattcggcgattggtctcagaagatg

SEQ ID NO: 12815 - DNA, 3000 bp, Unknown
  misc_feature (1)..( 3000): cDNA_ID_2994470_gDNA_ID_2214573_Annot_ID_186266 3000 nt of promoter + ATG
aagtcagccaatggaatggatcaacccattagatatatatgctcacaaaaaaaaattgattccatattcatttgcaaataaaaaatgaagtgacgtcttaaaactcacgtgaaaaataagctggagaatactactacacatggatggagaaggtagacagtagatatactcttttgatattgaatcaaatctgcctcttgttccctactagaagaatcttgttgacattgttagaagcgtgctgctcaatgttacggatcggattcctgatgtctactcacagtaataaaaaagaaaagaaaagaatgaatgtgatcttagtagataatatttgctaactaatatgtagaagtaagagaaaaaatagatctgttgcaaatgtaattttttgttgcacaaggcctgaaattgaactaattaaaactgtgatctaaaactaagagtaaagataatagtttagtttagaaagatgattcaactgtgacttgatacacaagtaaaatgccaatagctccaatatgtagtatgttacgataagatcaaaccagttacgcgatatttccagattcccaccataataaagaaggaacacatccataaaacaaacagctaaataaaggataaaaaagcaaaattaagtggatagattcttagagaatatcacaactaaacatgttgtgattataaaaaaaacggtcttatcacaaatctgatgcttaattcacttcccatcaagctgaatggtccataacttgaaattaatattgtcaacacgcagttccactaataagtggaaatagacaaaaactttgtctcaaagaaaggagaagcagagagtttttgctcgttggcaaaagctgtgactgtgatgaagtgaaggctttagcctcactagtcatgggccttgagctataactttcagatccagcccaataaaaggagcgatgcatcagatattcagatggcagagatcctaaataatctcaaccgttctagagatcctaaataatctcaaccgtttatttatttaagccacgtcatcgatcctcgcgaaaaacaaatacccatttacaagcagttacatatctgtatataaacaattatcatcattcagcatcaacgcgtctctcaattctcacattctcaaaatcactaaaatcaaactcaattttcatcaaatatctctaatggcgccgaaagcagcggagaagaaaccggcagagaagaaaccagccgggaaagctccggcggagaaactcccaaaggcggagaagaaaatcagcaaagacgccggaggaagcgagaagaagaagaagaaatcgaagaagagcgtcgagacttacaagatctacatcttcaaggttctgaaacaagttcatccagatgttggaatctctgggaaagctatggggattatgaacagtttcatcaatgacatcttcgagaaacttgctcaggaatcgtcaaagctcgctaggtacaataagaagccgacgattacatcgagggagattcaaaccgctgtgagacttgtgttgcctggagaactcgctaaacatgcggtttctgaaggcacgaaggcggttaccaaattcaccagttagggttttcctgtaaatttccggttaagtgtttggtttagactcggtttgtttagatgttttgagtttcgtgaattgtttgatgatcactctaatggttcaaaattgatggttgaatttgattcttcttcttcctttcagtgatttataattgttttatttaacgtttgagtccctggaatttggataatatgcaaattgctccatcaggtatttataaactaatttctatccatcaattgcgttatagagttgcgtttgtgtgtgacatcgacaaaacaaactaaacgctatttctctaattagtggattttattacaagagaaacttgttatatcgtcgtcttctacaccaacaggccgttgaatcatgagacgctattgataagaccgacctaataattaggtagatttttttggtgtagtttatttccagtctattattctcagcccattagacccaaaaggaaaatatcaaggcccgtaaggaaagtctaaaaagataagggacacgtgtacagtcataaatctatctaaaggtaggccgccacatctatcaccgttggatattctagtttaaaatcgtcatcaatcataattattcatttcttcttcgtcttcttcttctttctcaaattagcttttctttatcgtcttcctcaagcgtgagattcgttgtggatatagtttttctccttgattctctggttctttccatgatccaattttaagggtttcacggcttcgtttttttgggtatatctagctctatcgttcgtggtggttttctttctggatcaaagttttctgagatctctgcgatttctgggattcgaaaattggagaattagggcttttttacggtaacagggtttcgaagagcataagataagaatgccttcggtgccctctaagcttcttcctctcctgtctttgattccttcgttgactccttatcattctggtttgagttctaatcgtttgaaacctcttgaaaagtgtgattggcgtggtaatcttagttaacatttcctttccttcttctctcctttttaccctttcttctctcgccctcgtttacttcttgagattttcttagctcgatttgatctttggtgctttaacttctggcggtgtttgatttgcagcacaaaaaggtgattttttttttgtttctttgacttctgcaaatttaattctgttcaatttgggatctaaacacatagtctatgttttaattcatgggcttctataatatcatgcgagtagagtgaataaaatttgagcatgagtctttgttttcgttgtgtgctctaaagatcatatttactgatgataactttaaatttgtttgtgcagttactactactactgtgattaccttgtactgttagttggat

SEQ ID NO: 12816 - DNA, 3000 bp, Unknown
  misc_feature (1)..( 3000): cDNA_ID_3026564_gDNA_ID_2214573_Annot_ID_186262 3000 nt of promoter + ATG
gaaaaacaagtgaagagaaaccgtgccatttcaacgttcactaaaagagggagagggaccattaaacaaaactggtttgagttcctgaatttttctattatccataatttgtataggtttcaagtgttcaaccaacttttgacttatattaattttaattaagtttaaatagattctttcaacgttttaaaaagaatatttctattataaaaatgtataagtattgtccatgcaaaacgtggataaacttctctagattttatgaataatttttaagattatgatatttcttgagacaaaagattttacatcatattataaaaataaataaaataaatttacatcaataaatatcacttatagcattattatagcaccgaaactgagctcatgagttaaataaattttgcagatttattaatatcatgagcccactgcagctagagccaaacaactttaaatttgactcaccaaaaaaaaaacaactttaaatttgatatacgtcttatatcgtgaatattcataccttccaagtgcagaataatgaatcaaaaacgttctattgatagagaaccgatgctcctttttctataacaaaattatatggaagaaaataatgaaagtgattccaccagaaactaagtggcacaatggaaacagtacaaaggacccaaaatattggcgattatacgcacttacatcaataaatattccatgaactaaaataaattacaaaataacctaattaaaaaggaaaaaaagcaaatctaaccaatgatcactctacccaacagtgtcggtatatcgtgactcattaatcattagttcatttttatactttatagattggaaagaactcgattcatcaacacctctcctggagttaggcgaagatacatatatggaacattagtgaatgggcttggaataatttacaaattatttttcttatataaatgatgaaaaacaaattatacaactcttattctgagtaacagctcttgtatttcacaaaaaacggcacaatatcatatatactgttttacacacacacacacacagaaaaaaatcatgaaacaccacttaaaattttctctaatttccaatacagacaagctcttggattagaggcctaatttgtgttgtaattggtatttatcaaatcattcttaaactatgccctatggttcacaaatcattcagttttctatgttttaataatctaataaataaaattagcatttacgtcaatattttttttttgatatatactctctcggctcattttaaataatatataaagtctttgtacatagattaagaaattatatctctcttatactaaaattttatttttacatatctaaaaaagttcaaccagtgaaaaagtaaatagaagaatagaaagaattaaaaacaataaaaaaagacagtaaaatttacattgaaaaattaaaacatcatacaaaatgaaacaacaaaaaaaaaaaaaaaaccaaacatcaagtaatatgaaacggatgatacatttttaacaatacattttttatgcggaaatacatgatggtagttgacatgatggtaacatatatacaatgttattatcatgaaaatcaatcagatgagagatagtgatactagcgttcgactttgatgaaatttgcgaatccacggcactctgtattttgtttaattagttcggttatgtgacgatcaaatacaaatttctatgtctttttgttgataaggtaaagaaataagtcccatgatttcagggtacggtttggaaagtagcctcaaaatacataacaaaaaggaaaaaaagaaaatttacacgcatatttatttacactaataagtttacgtagagagaagaatgttcacatcacatcacatccttttaactttggctctatataaagagagatagccaagacaatcataacaactcatatcaattttttaaaaaaaactctccatatatctattacttctacgctaactagagagggagattattgctcttaagtgatggaggaagtaaagaagagggattgtatggagaaggcaaggccattcatttcaatggtagtgttgcaagtagggctagcaggaatggatattctctcaaaggctgttctaaacaaaggcatgagcaattacgtccttgttgtttaccgtcacgccgttgcaaccatcgttatggccccgttcgccttctatttcgacaagtacactctactttcccttctttacatatgtaccaactcataaacataagtaaaatgttttgtttaagtaggtagattcaaggccatgacaacagaatatcaacctagctagtttgatatattctgatgaaattagtttgcctagctaggattattattttgtgttttgagttttcagggtgtgcaaacgcaaaataaaataaaaattgtgaccatattctacaaaacagattatatcaaaaacatgaataatcatttaatatattattgagtgttacgttgtctaatttatttttgtgagtgatgcttagtgtttgaagcttgaaaagatgagagtagcaaaaagaaaccatgatgcttttgacgtaatatatgataagaaagggtcactcatatgttaaaagacaaaagacttgtaaccgttttatatttggtttttgtgtggtttctgccaatgtcatgcactgaatgtgagtccttacttttttagtgtctctttacaaaaagaaacactaattcaatttttagtgcgtaatcaaaatgtgtgtatgcttctgcaattaattatgactgtaatccagtaatatttacacagatttgtacgtaactaatttgaaatgattctagttatctatccatggagaatatttgtcctaatcaatttttccttttttattgaaattaatttttagtttagatgattctcaaatattattttcttacaacgattctcatataatccaatgtccctaataaaaataaaataatg

SEQ ID NO: 12817 - DNA, 3000 bp, Unknown
  misc_feature (1)..( 3000): cDNA_ID_2994839_gDNA_ID_2214573_Annot_ID_186257 3000 nt of promoter + ATG
ggcataatccaaagtacttaaagtttcctctagggaatgagcagatggagagattgtagcaatgatacaagtttttgtctttcctcctagagagtcccgtaaaagccttgtcagcttactatccctgcaaccacaagtatgctttcaaaaaacacaaatattaccacagtagacatatatagttgtaggacaaggcaagtacctgtaaggtacatgagaagaatgttccacaagggcattaatcacacggcctagtgtaagcaaactcttgttaatctctcctgcttctcgtgcacggccatctcgagctcctgaccgtaagatattctcagatcctgctagatccacaaggttaagcttcccacatttgattaactcttcatctcccatagactcttcctttatatggacagtgatagtaaacactgaatgagatcgactacttctcttattcaacaaagtatcagctgtacgccttttagatgaacctcgttcaagaagagcatatatatcattagcactgtacacaacttcttcttcaagacctcttaaaaccacagaacccttcccatcctccatcaaagaaatgggcttcctctgcttatcctcagaagatcttgaggaatcatcttgagctaacaaatccgtaacttcctcattgtaaagctccaagaatgttactttcatactgtaatcagcattttgcgcctcaagagtatcgaaaatatgtctaacagctctgggaatcaccccagcctccgcaggtaaatcccctccctttttcctcattccaccttccatagtgtaagtcttcccagttcctgtttgtccataagcaaacacagtacagctaaaaccttccaagacttcatgaacaataggtgcaatagcttgatcatatatagaccgttgttgtgacttaggaccaaaaacctatagaataaacaccatcagagacccttgaatacaaaaccatcaagtagagaaagagaccaaccaaccttgtcgaaattgaaaagacggtctacttgcttattagcaatagtatgaagaacattgacttctcttctcatttcattacaagagatgactctaggaacactagatttctgctcttcttcacttaatggtttgcatcgtagaatcacttgaacattgacttctttattatctctatcgagacggttagagaaagaatcaggtcgtcttctctcgagacgaggagttagaaacggtgcaggtgatggaatcactcctactccacttttccttgataccacctctggcgtaaacgacatcttcgatttctgtgaaatcaaattcaaattccctaatcaattgagaaaggttggatcagaatcccagagattcgaattctaaataagattcacttacaggaaacagagccgaatcctggagatcgaaagagagacttcttttcaagtttgagagagaatttgaagaacaaaaaaagattagggtaagtaaccgttgggagtggaagcagatccaaattcgaattactagagagctcaacactacctttaatttcaaaagtttttttaaaagtcgcaaatatcttcttcttttttgtctcagtattcatatattgctagattatttatttacaggtattatgatattaaatatttcagtcaaaaaattgttccaataatccaacaactttatgatttgtaaacatggaaaaaagggaaaaaaaaaaaaggaattgtaaatctactactttctgattttattcttaaataaacacttttgccaatacaatcatatatatgtgagatggatttactacttctttttttttggggaaagaatttggaatcagcactattggagatggataaattaaaaaaatgatcattagctcattattatcattgatttgacaaaattagagagaaagaaaagaaaacacaaaagaatttgtaattgaatatgagagtatttaattcagtctccaactgttctatgtgtgattaatccaaatgttgtaacttgtgaagaccaatatatattaacaatctgtatacattatacactaacgtaccgttgtaagagagttaatgacattcttgcattataaaggagcttttaagcgtgagttcaagacgggtaaacagacaacaacatcctttaatcttttcttagtctatgggctactccaaacttgggctactccaaacttgggctactccaaattgggcttctctactttaaatcttctactaactatttgggcttttattaataggtttaattactttctctctcaggtctttcttttaactagtttgggcaattgaaaaaacttttggctccttttttaaattttactgaacgaaattatcctaaaacaataaaaaataaagcaaccatattcgaaaagaaaagaaaaatgagcgatgccggcaaaaaagagagggaaattaaaaaaaaaaaaaaaaaacgcaacagtgtcggaaaaataaagctgacaaaaaattaaacgcaaaatagtttggtcgctgtaacttttttgtttatttttttctagccaaccctaataaaccctgacgccgtttcttcttttaccttccttctctcgctcaccgtcgcacctccttcattttttctctctctctcaaactcgtctctaaaactcgtccgtcgattaattcctcgttagtctcaggtatgcttcttcgattctcatctatcatcaacaacagtgctttctcaattctcttagattcatttctatacacaaagtttccacctttttctatggtttgctttcgatcgtaaagtacggatctttgataaaccctaatcttcttcgttcgattgtatatgttcagtatttaattggaattagtcagagatctatttgttgatttcgcagtgacttacaaaaccctaaatttcttactatttgttaatgaatcaatattcatttgattacaggtttgatagaatcattgcctgaggcatctaataatg

SEQ ID NO: 12818 - DNA, 3000 bp, Unknown; identical to SEQ ID NO: 12811
  misc_feature (1)..( 3000): cDNA_ID_3026595_gDNA_ID_2214573_Annot_ID_186252 3000 nt of promoter + ATG

SEQ ID NO: 12819 - DNA, 3000 bp, Unknown
  misc_feature (1)..( 3000): cDNA_ID_2992894_gDNA_ID_2214573_Annot_ID_186250 3000 nt of promoter + ATG
caaccggatcgcaaaagatagcctcaggggatccattaccttaaacggagaagttcttgaatcaagcatgcagaaagtcatatcggcttacgtgatgcaagacgaccttctcttcccgatgcttaccgtggaggaaactctaatgttctctgcagagttcaggctccctcgttcactctccaagaagaagaagaaagcaagggttcaagctctgattgaccaattaggcctaaggagcgctgcaaaaaccgtgattggtgatgaaggccacagaggagtgtctggaggagaaaggagacgggtatcaattggaaacgacataatccatgacccaatcatcctctttctagatgagccaacctcagggctcgactctacaagcgcctacatggttatcaaagtccttcagagaatcgcacaaagtggcagcatagttatcatgtcaatccatcagcctagttacagaatcatgggtcttctagatcagttaatcttcctttctaagggaaacacagtctacagcggctcaccaacacatctccctcagttcttctcagaattcaagcacccaattcctgaaaacgagaacaaaacagagttcgctctcgatctcatccgagagctggaatattctacagaaggaaccaagccacttgtcgagttccacaagcaatggcgagcaaagcaagcaccaagctacaacaacaataacaagagaaacaccaacgtatcttctctcaaagaagcgataaccgcgagtatctcaagagggaaactcgtctctggagcaacgaacaacaactcatcaaacctaacaccatcattccaaacattcgccaatcctttctggattgaaatgatagtaataggcaaacgtgctatattaaactcaagaagacaaccagaactcctcggaatgagactaggagctgtaatggtcaccggaatcatcctagctacaatgttcactaacctagacaattccccaaaaggagcacaagaacgtttaggattcttcgcattcgcaatgtcaacaacattctacacatgtgcagaagcaatcccagtctttctacaagaacgttacatattcatgagagaaacagcttacaacgcttaccggagatcctcctacgtcctctctcaatccataatctcaatcccggccttaatcgtcctctccgcaagcttcgccgccacaacattctgggccgttggtctcgacggaggcgccaatggtttcttcttcttctacttcacaatcctagcctcattttgggcaggaagctccttcgtaacgttcctctccggcgttataccaaacgtaatgctcggattcacagtcgtagtagcgatcctcgcttacttcctcctcttctccggattcttcatctctcgagatcgaattcctgtttactggctctggttccattacatctccttggtgaaatacccttacgaaggagtgttgcagaacgaatttcaaaatccgacgagatgtttcgccagaggagttcagttattcgacaattcgccgttgggggagtttccgaacgatgtgaaagtgaatctgttgaagagtatgagcggtgtattggggacgaatgtgacggcggagacttgtgtgacgacggggattgatattttgaaacagcaagggattacggatattagtaaatggaattgtttgtggattactgttgcttggggttttttctttagggttttgttttatttcactctcttgattggtagcaagaacaaacggaagtgattaaacagttgttctttttttttttttgaaaaaaggtttgttgtaattttgtttcctttttctttcaattatataattgtatgtccttgctatatttaatcgattaattaaagaataataaagtcataatttatgaaatgaaaaataccggtgatatttatatatcttcattctttttattctgtaaaaaatgaaagtgctttaggaaaaaaaaatgctaaatgttaaaaaaaaaacagaaaataaaaatctaagctaattgctattagtatttctttaataacaaaataggattataggcggactttgatttgttcatcaaagaatagtttataacatgaattggtaaacggtaaaatttatcctagaaggtagaagatagatgtcataaactatgcataaatagatagatgtcataacaaatctgatcacttttagatgttgtaagtttttaaagattagaggatccaatttgttataatgaatttgcataactagatatatagtttagtctggataactcattactattagtctttaagcaaatgtgatcagagtgtgcaacatagaagaataccgagacatacaaaacttgcaatttgtaaaccaccattcttattttacaatttacacaaattaaatgggccttattaatataaggcccaacagattgcaaaatggtgaatatggcaacatcgattcttatctctttttaaagatatttaccgttggtttaggacacaacaccaaattattaccgttggatttagtcggttctgtctgaagcccatttttgtttttttctgtcagcgtctgaagcccatttataaacacttgaaaaccatactttagctaccttacgctgttcttcccctttccttccgaaattagggcttccgtgtttcgcagtgctctccttcaatccccaggtatcgaaactctgctcaattcgatgattcatattgaaatttagtgctttcactgctcggaattacgattttatattggttcgatgcatctgcggtgatggtttccttagcttctgtctttccgatttatcgcttccttgtctctgaattaactaaatggcgtcttctttggggcttttttataggtcttgagttagtgaatttttgttacgttcttgttttatagtttctaacaggttatgctcaaaaatctgtggtttctttgtcccttttttttgattttgtagcttgacaatg

SEQ ID NO: 12820 - DNA, 3000 bp, Unknown
  misc_feature (1)..( 3000): cDNA_ID_3026615_gDNA_ID_2214573_Annot_ID_186242 3000 nt of promoter + ATG
tctctcaaaaggtgcgacctttttttttctttcccattttctgttactgtgattctgatggagattctcttctttgttcgattttggatccatatagtctgaaattgaatgtttagctaatcggactttcattattggatctgaaaatttccgtctatctctcgatagatctagtgagctaagtccatttgaaagtgtttctaactacatttgatcagtatcataacagatctattcatatatattaaagtcaatggctttgttttgtttgttatctgtatgcataattgttaaacaatctcttgttacttgatgcagctatcggagattgtaaatcagggaaaattggtttctgatgagatcattgtagacttattgtccaaaagacttgaggctggtgaagctagaggtgaatcagggtttatccttgatggctttcctcgtaccatgagacaagctgtaagtattattcgttttaagcaatttttgataatcaatctccattatcatttctaacagtggattgtcttttggttcaggaaatactgggagatgtaactgacatcgatttggtggtgaatttgaagcttcctgaggaagttttggttgacaaatgccttggaaggagaacatgtagtcaatgtggcaagggttttaatgtagctcacatcaacttaaagggtgagaatggaagacctggaattagtatggatccacttctccctccacatcaatgtatgtcaaagcttgtcactcgagctgatgatactgaagaggtggtgaaagcaaggcttcgtatatacaatgaaacggtaagcccctctattgtccttttccattgctagtttatgaacgatcaggtgttaattagtgcctttttgtatttttctatatgcagagccagcctcttgaagaatactaccgtaccaagggaaagcttatggagtttgacttacctggaggcatcccagagtcatggccaaggctattggaagctttaaggcttgacgattacgaggagaaacagtctgtcgcagcataagttcactatcaaatcccggtatttaaaattctttgcatgtggaatacatatgcgtaatcaattttgtgttggaaataaaagtaaaaagaaaaccttagattgtttttcacctcaatagaaataatcatacacacttgcgcaaactattatttttccaccagccggggattttggctccatgagagaaatatgatgtatcatgattgtttgagattgctagtgacattacaggaatgtatcaatacttctacaccacttgttatgcattgagtttaatcgttatgctcttgtgatatgttttttttggaaaatgtgatgaatgatgatattgcggctggccgagctggctggttaaagaactcaaccagacagtaaagtaaaacagccgcatagattaaacgggaacttataaccagctcttgactgtcctagcattggcggtgcgggatagaatcgttccttacatcatggaattgatgctctcattatcggtcattgtgtattacttgctctgttatttgttgtgatcaaaacctagcttctgttttacgtttgccgtctctgaatttttttttggtttttaactctccctacgtgagtatggatggtaaatacagattcaatttgaaatgctgaacgggacttggctcatagcaatctaaatcacagtgacaaacgtgtacttcgattgcctttgtgatggtcaatcaaagctgtaatgttgttggtttttgacgctaaccggaactaaactcctttcactgagaggtctcgatgagagaaatcattgtcatgaacgaaataatttaaaacatgatttaagattacagaaaatgcctaacgcaaaattattgacgaatcacaaggcaaggaagaagtagagaggagagttgataagaaaagagaaatcttcatagaaactaaaactgtgtacaagtgtttatatacattgattaagcttcaacaatcttcttaattaaccacattgattagcttcaacaatcttcttaactaacctaacatattagttagacaattaataatgtcaactccaatatttgttgaaactccaatattgttataaattgcaagctaacaaagtaacaattgataggtttaataaatattttcgtcaaatgatcattgggtagtggtatttaataatattttattaactcatgtagtgaaaagtattggacaagatgactgaattttcttcgtctcttatctaacagaggtgtaaccgaaataaaccgaattcaatttggttgggttgagttaaaataaaataagttggtacagttcagttcacgtgtttacttcgaacagaacaggctcgtgcgcgtgtcaacaaccaataagttcttttggtcgctgtagtcttcaactaaaaccaaacgacaccgttccttgtggccgcgttttccaactaactttcaacttcaactaacgttcaacgagtgtccatctcctctatctctctttttccttttcattggcttcttcatcactatagagactaaaactgaccttgatccatccaacgttccctatactgacacgtgtatccatcacagtgtcggctaaagctcaaggaactcataccaagaaatacatcatcatctctcaataatcacaaaccggatccggatcaatttggatccatcagattttcttcgttccctaactcctaaaaaggagagattcttcaaatccttatcacaacttcagtttttgcattcaccgtcgtgagtgttctacttttggtaatgattcactagtcaagtttctttctttatgctataacttgcaactagatcttgtactaatggaattgatgtttctccaatcatcttctttgattttgctccatctttcttttcctaatttggaaaaatgagtctttacctatagaatctgataaatatgtctcttacataattgattaaggtcaagta

SEQ ID NO: 12821 - DNA, 3000 bp, Unknown; identical to SEQ ID NO: 12804
  misc_feature (1)..( 3000): cDNA_ID_3409207_gDNA_ID_2214573_Annot_ID_186241 3000 nt of promoter + ATG

SEQ ID NO: 12822 - DNA, 3000 bp, Unknown; identical to SEQ ID NO: 12803
  misc_feature (1)..( 3000): cDNA_ID_2990697_gDNA_ID_2214573_Annot_ID_186240 3000 nt of promoter + ATG

SEQ ID NO: 12823 - DNA, 3000 bp, Unknown
  misc_feature (1)..( 3000): cDNA_ID_2709644_gDNA_ID_2214573_Annot_ID_135125 3000 nt of promoter + ATG
taaatttttcaaagttgaatctgataaattttcatttcatgtctcttgtcataacaggccagtgatcgaccagaacttatactatctcgggatgaaatatacgacagctacatttgcaaccgccatgtacaacgtcctacccgcaatcactttcgtccttgcctatatatttggcctcgaaagagtaaagctacggtgcattaggagcacgggtaaggtggttggaacattggctactgttggaggagccatgatcatgacacttgtcaaaggcccagttctcgatctgttttggaccaaaggagtctctgcacataacacagctgggaccgacattcatagcgccatcaaaggcgcagtattggtcacgattggttgttttagctatgcatgtttcatgattctccaagtaaggcaaacaaaaaatatataaaaaaacacttatggatcaattttgacaatgaatcaatgtttttcaggcgataacattaaggacttaccctgctgagctctctctcacagcatggatatgtcttatggggacaatagaaggaaccgccgtggcattagtgatggagaaaggaaatcccagcgcatgggccattggttgggacactaaacttcttacagccacctatagtgtaagcatacatatctcagtagactagtgatttcatggactacaccatatatgttgataacttaaaattgttggaatataaaatggatgcaggggatagtgtgctcagcattggcttactacgttggaggagtggtgatgaaaaccagaggtcctgtgtttgtgacagctttcagtcctctttgtatgatcatagtagcgattatgtcgaccatcatctttgctgagcaaatgtaccttggaaggtaagcaagacacaaacaacatctaaaacgagttttaaacaccaagattgaaaggaggtaataaaaaaactttttctatggcagggttcttggtgctgtagttatatgtgcaggattataccttgtgatatggggcaaaggaaaagattacaaatataattccacgctgcaattagatgacgaatcagcacaaccaaagctagaactaagcggaaacgggaaggataatgttgatcatgaagtcattactataagcaagcaaggagaacaaagaagaacagctgtagaaacagtctaacttaacggtatcggcacaaatgtttttcatggaggagtaattaacgtatagcagtttcatttgttgtccattatgtttcagagcacaatgtcatagaattgctaactaccatgggagaataataattgtctaattaagaggactaaagatgcaaaaaaaaagatgaaattattggattcattcaaatacagaatgaatatattgcagttgtattggctacacctaaacagagaatatatcgactgtttgggacaatgatttcggtaaaccggtttagttttcggttgactttgagtcaaatgacaatgaacagaaaatagtgattgaaccggtatgtggtctgtctgaggtctgacttctgaggatctcgtctattccctcacgtaccacatttgtttcctcctatcacctttccacaagatttaatttctcacctattagcacttctctgttttgctgctaatttaagtattacgacgccgtttctatatcaagcacttgactttatccaaaaaaaagtctcacaaatacgattgaagagcaaaacagcgaaacacttttcaacaccggttggttgttgacgtacttcattcttgcgctgaatctcctccgattatatttgataaatctctcattggacttcgtctacctttttcttacatgatttcctatttgaatttgtttacacagctcagttttggggtttaattgatcaattaagagtttatcggtctagttttatgggtgtttctgatccatttctagcacttgaaagatctgttatccattcaagtggtaacaaactgaattatctatatttatataataatcatttaaaagatttgttatcaattttttttaatttaattatttggatttactgatttctcaattaatattagatatgcataccctaccacgtacatgtgggcatcagctagagatttaagcaaatcttctgtctaatccttgacgtggcaacataatattattttacgtaactgagagtttctaccgatccgtattaatttaattaatttactgtaattcacaaccacataacaaacgattaagaattgaaaacttcatatgtttaaaaactgttactcaaacatttttcataatttcttactcattgtccattattgtttcgggtcgatcgagaatctttagaaaaacgtgaaaatcttgtcctcttaaatatttctgtcacatctgttttttttttttgtgggtacaaagtcacatctaagtttcttctgacatcgtcgccttttgttctacagacggacaaacgaagtacttgtgctattaagaaccaactgtttacttccataacgttactactagttagatagagaaaatgagagaatattgatacaacgtgcgttcgacttaggtcaagttaaataggtgagtccacagcactagcatttcaggtaggatttggcatcttgcctcaaagtatataacaaacaaataatacaaaattacacacatattgacatattatgtgataataatatatttgggaaattttcaaaatagactgttttcttaaaacttaattaggaatttgggcagtttcaatatttaaattagaaaataggcatgttttactgtgcaacactatgtagaagattttctaactctcaaaatctttgtttatttactatttgtgccattgaattttttttttctaatgtttccacttacttttttttctttctctctcccccttatctcttccatcgattattttcagcctctttcctctatttttttgttgaaatcctctaaatgatcttgcagagatg

SEQ ID NO: 12824 - DNA, 3000 bp, Unknown
  misc_feature (1)..( 3000): cDNA_ID_2709695_gDNA_ID_2214573_Annot_ID_135126 3000 nt of promoter + ATG
ataattgattttgaaaattttgaagttaagaatttggttaagagattgaaattttggcaatatgcaatggtggactcttaacttgagttcttaaaaaaaaaattgaaaaaaaaaattagaaacattataattttaaaaaaaacttaataattattacaactcataaaatttgaaacatacatgacataaaattttaaacaaatatgacaaacagttagatttaatacttaatttatctaagaattaagattaattgaattaaaacattatatttaatacctaatttatttaagaattaacctaaaaaatattagattagatttaatacttaatttatctaagaattaagattaattgaattaaaacattatatttaatacctaatttatttaagaattaacctaagaaatattagatttggctcttatataagagttattcttaacaattaattgaattataacattaaatttaagacctactttatgaaagaactaacctaagaaactatcaataatgatggtcttatactttatgttcaacgagaactcgctagacatagaaaatctggattgtatttgaacttagatgctgattttcgcttgatgaacaactaacttccatcaaaaggtttaatcctgattcataatcctacaacttataaccgccacaacattaaaataatacacacgtatacccatataaccatattaaaggatcaaactaaatcgttgtgtataaactatgatatctacatctattgtttggttctttgggatagtgggatactatacttaactaaattactccatattaaaattttaatatacaggattgtgggatactatacttaactaaattactccagttatcttgaacttaataattagatgataatctattctagtcgtatgtagattactaaaaatatttaaatagtatatttagttaagtatcatctatcttgaaaaacaagtgaagagaaaccgtgccatttcaacgttcactaaaagagggagagggaccattaaacaaaactggtttgagttcctgaatttttctattatccataatttgtataggtttcaagtgttcaaccaacttttgacttatattaattttaattaagtttaaatagattctttcaacgttttaaaaagaatatttctattataaaaatgtataagtattgtccatgcaaaacgtggataaacttctctagattttatgaataatttttaagattatgatatttcttgagacaaaagattttacatcatattataaaaataaataaaataaatttacatcaataaatatcacttatagcattattatagcaccgaaactgagctcatgagttaaataaattttgcagatttattaatatcatgagcccactgcagctagagccaaacaactttaaatttgactcaccaaaaaaaaaacaactttaaatttgatatacgtcttatatcgtgaatattcataccttccaagtgcagaataatgaatcaaaaacgttctattgatagagaaccgatgctcctttttctataacaaaattatatggaagaaaataatgaaagtgattccaccagaaactaagtggcacaatggaaacagtacaaaggacccaaaatattggcgattatacgcacttacatcaataaatattccatgaactaaaataaattacaaaataacctaattaaaaaggaaaaaaagcaaatctaaccaatgatcactctacccaacagtgtcggtatatcgtgactcattaatcattagttcatttttatactttatagattggaaagaactcgattcatcaacacctctcctggagttaggcgaagatacatatatggaacattagtgaatgggcttggaataatttacaaattatttttcttatataaatgatgaaaaacaaattatacaactcttattctgagtaacagctcttgtatttcacaaaaaacggcacaatatcatatatactgttttacacacacacacacacagaaaaaaatcatgaaacaccacttaaaattttctctaatttccaatacagacaagctcttggattagaggcctaatttgtgttgtaattggtatttatcaaatcattcttaaactatgccctatggttcacaaatcattcagttttctatgttttaataatctaataaataaaattagcatttacgtcaatattttttttttgatatatactctctcggctcattttaaataatatataaagtctttgtacatagattaagaaattatatctctcttatactaaaattttatttttacatatctaaaaaagttcaaccagtgaaaaagtaaatagaagaatagaaagaattaaaaacaataaaaaaagacagtaaaatttacattgaaaaattaaaacatcatacaaaatgaaacaacaaaaaaaaaaaaaaaaccaaacatcaagtaatatgaaacggatgatacatttttaacaatacattttttatgcggaaatacatgatggtagttgacatgatggtaacatatatacaatgttattatcatgaaaatcaatcagatgagagatagtgatactagcgttcgactttgatgaaatttgcgaatccacggcactctgtattttgtttaattagttcggttatgtgacgatcaaatacaaatttctatgtctttttgttgataaggtaaagaaataagtcccatgatttcagggtacggtttggaaagtagcctcaaaatacataacaaaaaggaaaaaaagaaaatttacacgcatatttatttacactaataagtttacgtagagagaagaatgttcacatcacatcacatccttttaactttggctctatataaagagagatagccaagacaatcataacaactcatatcaattttttaaaaaaaactctccatatatctattacttctacgctaactagagagggagattattgctcttaagtgatg

SEQ ID NO: 12825 - DNA, 3000 bp, Unknown; identical to SEQ ID NO: 12815
  misc_feature (1)..( 3000): cDNA_ID_2994470_gDNA_ID_2214573_Annot_ID_135129 3000 nt of promoter + ATG

SEQ ID NO: 12826 - DNA, 3000 bp, Unknown
  misc_feature (1)..( 3000): cDNA_ID_2712649_gDNA_ID_2214574_Annot_ID_135141 3000 nt of promoter + ATG
agatcgtgtttttgcagaggcaaaaaaatactttgtgttacggtctccacctgacagccatgttttccggctcttaagtctctagaattcttcttcagcagcataagccttcgacagctgcaatctgagctctcggatgtgttgagttgttgtgccatcagagtgagctctatcaattctgtttttgagaagggctatatcttcttgggcatttgatcgatatcgcctcttccattgagatatttctcttctgcaggcagtgagtcgtgatcgtagattgtcgtcctggtgaaagattctccggttccacccacgtctgacagcatcactgaacccatcacgctcaaccattcttccatcaaaacagaactggttatgcttctgctcaaaatcgctcgtgattgttgtgatcactggtcgatgatctgattctattaactcaaggaattccatgtgggatgcgggaaattgagttaaccattcgttattcaccaaggatcgatccaagcagcaggcaacatcatgagtgtgtcgttttccgacccaagagaaagggtctcctgtaaacttgagatcatggaagtcacaggtttgtatcattttcctgaaatcaaagaaagagctttctggcctcaagttgcctccttttttctcatggttgcctcgtatttcattgaagttccctatagccatccaaggacctgttctttgtgttgctgttcgttctaatctttcccaaaccaagtgtctatggataggatttgggtgaccatatacacaagataaatagaacccaaatccattaatattaacaaaagtatctacaaggtttggggattgataaagaacagaatacagaaatactacttttccacattaaagcaattccaccacttagaccatttggaggaaccattacaaccctatcataacctacatcgctgcaaatatctctgacgatgtcattcctttacttcgtttccatgagaacaatgatgtctggagagaatttcttctttatctcctttagacgtcgaactgcgaggtcattgcccagtcctctgcagttccaagcggctgtcctcatggaggaagagggggttctgggcccaccgcgcctctccccacgtcattcggctgaaccgtctctccggagcaaccactgctttccccagcctcacggatcaccatcttagaaggctcgtgttcttcatcttcttcgatggtgtcctctctcttgcgtttgcccctatccgctgccacatcctcacgaacatagtctctgttcactccattatttgtttccatctctccatggtacgtggagtaacgacatggctcccaatcctggaaatcttccacggcttcatgatgggcattcatcactaatgagagttattttatttattattgtccacgtatttattttgtttttaatgtatttttttttttttttgccttttacagttcctaatccagatttaaatctggatataaccctataaattataagatatactcgtccacataatattatcaagttttttagttttttagaaaataaaaatctattctaaaatttgagaaaatcaagtgagataattttgtgcctcacaagtcacgagattacttagctcggaagggttttgggctctacgtgtgaaaggcataagatattttagttacttttatgctttacaatttacattactagagtacaaacaaaacaacagctatcatggatttttatgacatcatcaatttacgtgtgtcatttgagatttataatctttattttattatcacttctattttgttttaatgagttcaagatcttttcttgaaagacatatgaagactttaacccaaaaagctaagtattgtctttgatgaaactttgaaatcgagaagttttcaaaattttaaacgatgtcaaccagtattttttatttataaaacagtatttttctctaaatatttgacaagatttttttacccccgcattagctaaaacccattttcgtacatatgtttacaaacagtgtccgctcaacaatttcatgggtgtaggataatttttttttatattttgttataaaattttttgtatgataatttagttaacaaaaaaaaaaaaaatgcattaaaaaaattataggtccattctaaattttatttttgtgttatatctaatttttaaaaatattttttaaaaaatatatgtcccttaattgttaaaacatgggtttggattcttggctgtcgcaccgcttgcccctctatttaaaccggcactgtttacaaattaaacattatagaaaataattcttaaaaaccggactaagtaatgaaaattttaaattacaaaaacgaagaatactaggaagctagaactagggaagaaaacttgaagcaccacattagtcaaagagatcgaagaaagaagccattctctaagaaaatttaccattaagattgactatgcactttatttaaaacacttgccaatatatctttttcaaaagtttttttttcataactcatattaagactttcatcttcaaattaaagggggatgagctttccggatgatacttagacctgagttgagtcaaaatcgcatctccctacaaacaagttcatcataaaccagtcgtagggtccaaagactttcacgatccattaaactgacatcttagtgttcaaagatatttttcttggtgttctaaaacatatatcttctgaacatggctcaattgtgactcctctcaagaaaatttaaaggacttgggggaggactatattattatttttagttccccttaaatatccacataataattactgtttgttgttttctttttaattcaaacatacaccattccaaagagacctttgatagttttctttactaaaatattattgaaaattacttataagatttattattaacatgttttagattgaaaattgctcatacaggcacataaacagattgag

SEQ ID NO: 12827 - DNA, 3000 bp, Unknown
  misc_feature (1)..( 3000): cDNA_ID_3026660_gDNA_ID_2214574_Annot_ID_186290 3000 nt of promoter + ATG
atatgattttccaaataaaaaaactgttacagtagttagtattattctattaaaaaaattatgaaaaaagaaaattataaatcagtcaccataaggatttcaaattacaaatctgtcgtaacataaaaaaaatttaaggtcattccagtaatttattttattttttattaaacctggcatcaaaccacagatttatggtaatataaatttatctgtcacaacataaaataactctgtcataacacaaaacattatattttagaaaacaaatatgccatcaaacgatagatattgtgtaaaattacaagaatctgttataacataaaacaagtctatcataacattaaaaaaattggttatcgttagacctcattctagtaattaattttgtgacaacaaatttgttacaatgtgacatatttttttaacaaaattataaatctgccatcacttaatgtgaaaataatatataaaagtaaaatttcatatatctttcctatatatcacatgttatttaaaataaataaattattactgtatataaattccaaaattgtattgtgtatcaaaatatttggaaacaaatcagaatagattttgaattggatcctaaaaaatcaatcctacttaagatagtaataataataataaatactgccttattataaaattaagttatagttgaataacacactctctgatgataaattgtttacacgtaggttaactaaaaaagttttgttacacgaatttagccacacacacgtgtattatataaacacgaatacaaaggaagaagaagcaaagaaaaaacagcaaagagaagtagagaacaaactgaaaatggagatatggttacttatcttgggctctctcttcctctctctccttctcaatttactcctctttcgccgccgtgactcctcctctcttccgttaccacctgaccctaacttcttccctttccttggaaccctccaatggctccggcaaggcttaggtggactcaacaactatctccgctccgtccaccaccgtctcggtcccatcatcacccttcgcatcacttcccgccccgctatcttcgtcgccgatcgttctcttgctcaccaggctctcgttttgaacggtgccgttttcgctgatcgtccaccggctgctccgatcagtaagattatttcgagtaaccaacataacatcagctctagtttatatggagccacgtggcgtcttcttcgccggaatctcacttctgagattcttcacccctcgcgcgtgagatcttactctcacgcgcggcgttgggttcttgagattctttttgatcgatttggtaaaagcagaggtgaagaaccgattgttgttgttgatcatcttcactatgcaatgtttgcgcttcttgttctcatgtgttttggagataagcttgacgagaaacaaatcaaacaggtggaatatgttcagagacgacagcttcttggcttttccagattcaatattctcaatctctggcctaagtttactaaattgattttgcgaaagagatgggaagagtttttccagatgcggagagagcagcatgacgttttgcttccgttgattcgtgctcggagaaagattgttgaagagagaaagaatagatcatcagaggaagaagaagacaacaaagtgtatgtacaatcatacgttgatactctgcttgagctggagcttccagatgagaagaggaagctgaacgaagatgagattgttagtttgtgttcggagtttctcaacggtgggactgatacaacggccaccgcgttgcaatggatcatggcgaacttggtgaaaaacccggagattcagaagaggttatacgaggagatcaaaagcgtagttggggaagaagcaaaggaagtagaggaagaagacgcgcaaaagatgccgtatctaaaggcagtggtgatggagggtctccggagacatcctccgggacattttgtactcccgcacagtgtaactgaggacactgtgttgggaggatacaaagtcccgaagaagggaacaattaatttcatggtggcagagattgggagggatccaatggtgtgggaggaaccaatggcgtttaagccagagaggtttatgggagaagaagaagcggtggacataaccggaagcagagggataaagatgatgccgttcggggcgggtagaaggatttgtccagggattgggctagcgatgctgcatcttgagtactatgtggcgaatatggtgagggagtttgagtggaaagaggtccaaggtcatgaagtggacttgacggagaagtttgagtttaccgtagtcatgaagcattcgcttaaggctcttgctgttcttaggagaagtcactagtcgtctacttcttcaccaaagactaggttatgtttgaggttatgtgcattttgtttggtgaagtcaactatggaactctattttttgtaaaatacattttgtaccttggaataaaataaacgatagaaacaacaaaagaaattttaacgaaagtggcaaaaaaaagatttcatttcagtgtttagcaaagtgagatttcaatctcaatttttggcacttcatttgttttatgacaaatatactcctaatgagatcaaccaaaccgttgggttgcggtttgttttggtttagttcctgcggtttaatttaaaaaaaaaaaaaattgaaacgaagaaatcgaagaagaagaaaaagagaaagcaaaagagagatttgagtagaaataagttcgaattcatcaactccttcgtttttcgacatcacttcaaattgttgggtttatgatttccgtcgaactttccacattcagtgaactctaaaatccggtgaagtcaaagttcaaaattcggcgaagtttcgacaattagtgaactccaaaatccggcgaagcaaaaatcgcactttttccggcgaagaggaattgagaaacctccggcgcgagatagcaacttcgttatg

SEQ ID NO: 12828 - DNA, 3000 bp, Unknown
  misc_feature (1)..( 3000): cDNA_ID_3026623_gDNA_ID_2214574_Annot_ID_186305 3000 nt of promoter + ATG
aaacctattcactactcagacatcataacagaaagcataaacgttgaacaagttgaaaacatgataacaacagtgtaacagcaggatgataacagaatgaacaacagtaaacgaaatctagaacaaaagctgaatactgaatagataaagagaaatccggattacaaaaggtctagaacacaaggtctgcggaaataaaactagataaaaacttcttgtctgcgaaaatgagaagtacatgctacttatagccaaatatcccgaaaccctaatactcaaaacgacgaagtattgggacgggttaagaactgtactcgacccatgtggtcgagtgaatagctggagtcctcttttcttccttgtgctcgagtgtctggttgagtgcagaatgaagaaggctctgaagcttgtcatcgagtatgcagtcgagtggtgtaagaagatactcgacttccaggttgagtgacgaggtcgagtggtggtctgatgatggaggtgaagacactcgacctcatggtcgagtgaagtgatcgagtgatggtctggtgatggagatgagggcactcgaccctgaggtcgagtggtgaagtgcagtggtgatgtcctttactcgcctggtggtcgagtggtctcttgagatcttgaagctcctactcgacctctgggtcgagtggtttgtcatgatcaggtccgcttcttccagatagctcgtcaacagctccaaatcacctgaaatcaacgcaaatatgcaacatgcatgcaaaactatcctaaacatgcaaagtgatgacaaatgatgtgaaatggtataaaacagtgatgatatgatgctaaagtgatgacaaatggatgctcaaaacatgcaaaatacacacttatcaactcccccaaacttagtctttgcttgccctcaagcaaacaatcaagaacaagctggaggtgaggtttgaaagcagtgactcagagcgaaagcaccagatagacgagatgaaatcaatgtccaagttgaaagttctaagctgcaagatcgaattctacttaaaaacgttagccatgcctcatcaatcaatcaatccgactcatacgctcgacctacccaagttttcaaatctaccaattcctttaacattgattagttctggaacgtgaatcaagcaatgcatcatcaaagaactcatttggctaaggtaaaaggtcaagagacaaagatggtcccttacagaataggcttaagtaacaggggatctctaaaaaaaaatgattaagctttagtagaatgctaaaggtaagtcccaatctatgcatacagagataagatcccatctacccagagtatatcaaatgaagctctaatggtaatcccatctccaatcccaatacaagaactaaactctaccctttgcattcatgaatcttttaagccctttttctaatcattcttttcttttctcttaactctaggagaagctttctcaacactttgatacatctagcggatttggatttctttaacaactaaggttcctgtttttaacattttaaaaccaagggcttttgcccatcttcaatagctaacaggaactctttcttttttttacaaatcccaaaacctttactagactttttctgcttctttagcttacttcacttagagtcttttactttttcttatcaatgaatcaacccccttttttttttctttaaaacacatcccaacccaaagtataagcacccagctagtcctatctagtccgaaaaatgcgaactagaactacatgagacactatctctgtcgttacgaacctaacactttctaccaagcttaatcggaataagacctcacaaacactcacaagtgatatagggcttgaaagaaagtctaggtttgggtttgggtgatcaatctaaaactagcaataagaataatcaagatgaagaactctaagattaatcctaaggggttttcgatctactaatccatctaaatccctatagagactcactaaacccaacaaagtgataactcagacatgacaacagaaacacaaatcataatttgaatagtttgcattgatgaattataaatagagtaaaaggagttcaaaatcctctctgtagggattggattcttctctcaaatgtatatcaatctctaaaacaaaacttaggtctaacaatgaacaaataattaggtatattcgtgactaaaacgtgcaaggactacattgcaaatcaggaaaactctagggcttctcaaagacttggcagaaaacagaaattccctcagccgaaataagggtgtcgatcgacataggtgtcgtgtcgatcgacaccatcgagtgaaaaacgtctttgataatcttcattgctgaaaagcttccaaaagcttccaaaattccttattatgctccatagctcccaaatgtgtaagtgtacctgaaatgactcataacatacgaaaagactagtaacactacaagaaaacaggtaaacgacgactacaatcagcgacaacaaacgtagtcgtaacattatatgactttttggcgacggatttacgactcgcatgcgacaacacgaaaaattgtagttacatagtcgttgttttacgactatcttatgcaatcggcaaagagtcggcaagtaacgactatttgacgattatattattgaagggataatgttgtcgttgcttagtcgctaattaacgactattctaccgtctattttatttagtcgctaatttggcgattacaggacgcctagacgtcttagtcggcctgtagtcgtagaaacgttgcaccgtagtcgtataaggtagatggaaaacgtgtttgcattggtaagtaggtacacctaattatttagttgtagtcgtaaattagttacaaaaattggcctatataataaacgttcacgcaactcttctttcaccaacaaatcaaaacaacaacaacatcaaagagaaaaaaaaaatattagttactttattgtataatg

SEQ ID NO: 12829 - DNA, 3000 bp, Unknown; identical to SEQ ID NO: 12826
  misc_feature (1)..( 3000): cDNA_ID_2712649_gDNA_ID_2214574_Annot_ID_186294 3000 nt of promoter + ATG

SEQ ID NO: 12830 - DNA, 3000 bp, Unknown
  misc_feature (1)..( 3000): cDNA_ID_3026676_gDNA_ID_2214574_Annot_ID_186284 3000 nt of promoter + ATG
ttagcaatcaacctctctctttggcatttcatcgagcatcttgtgggcgctcagcaacatcagacatttgcagccataaaaccatctttagcaaacccaaatcagtcttaacgcattatacgatgaacgtaatagccctaactcgtttttttaacaaaatcttgatgaaattagaatttgaagaaaatcgcgagagagagagcgaaaatatcgggcaaagaaaaatatttaactctccttctttctttctttttttgttaaaaatgcacgaccaatcagatggtgacatttaggcggctctctcaaattctaaaaactctctttagagagctggctctctcatttattttcagtttagatttatttttttgtaactttaacaagggaacccatacaaatgcaccagagaactccccattggagttggcctaaggctactaactttcaagactttaaaagtgatctaaagtcctaacaggatttttttttttgccaattaggctttttttactttatttttttgtaagttctcaaagttttttttatttttccttatgttttaaagcctcatatagaatcataaggaatttttttagtattatttataatgtttgtttattgtttgaaatttgttatgatactcctactaaatatgtctgcattggttagaccggtttaagtatcataagattttttgttacaaaatcaaaaattaatatattaaaacacaggattacaaaagataatattacaattaaaaaaatgtagaatatacttaagcaaaataaaacataaaattcaaaaaaactaaaaaaaatgttctagatagacggagatctacgtcataccggctgtagctgagaaaagatgagaagaaatcgtcagatcgccgtaagagcgaaagagaaaattttgaaagaaacaaaataattttttttttattttttttttattttttttaccaaaacaattaatgcgacaaatcatggcctgccacctaaattgatactgggtatcaaaagtctcaataaactgatacggctcaccctagttttatgtgtttagcatacatggtctcataaacaaggatttcaaagtttttcttttcttttctccaaattaattattaaattttttttttcttctccccaaaataattaacaactttgtaccagtttacatatattttttcacaaaatatttttaataaattaattattatcattttttaatctttcttctaaaatccatttcactaggaattatttcatttttcatcatcaccattaattggatgtaaaagcgttattgaattagttattttttggtgaacaaacaaaaattagtatttttcaaatactatacatttcacatatgtcattcaattagttcattaattgcttcatcattatccccacttattaatgtgtttagatattaaattttggcatgaaacaaaaaatgtaaataaatttgtttacttagaatttgttttctagatatttgtcatttattttaaataaagatttattatttaataatttgatttttaaaaagcaccttcgtaatgcaatgtttggttattaaaaaatgaatgaataatatatatctagtttatttcttcagaatatttatgtatccatttctttatgaatttttgtattttctaactttttatcattataaaattttattgttacataaaattatttctaacattgtttttatttattattaatattaatttataataataataataataataataatataacagtcatagcttctacaactttgttttaccaattaaatttttatatctaaagtttctacagcaaaagtctttacaaccaaattttctatagctcaaattttaaaagtcgaagtctttaaagccaaaactactaatcgctaccaatcgtcctatgtgtttacgtcttttggtttgtatatcttgctgtcatttgaaattttaaccctataatccggatctgaaccggatatcccattttttcaggaaatcctattactacctgtaacggtctcttgaatttaaaacaaaatacgtgtgttgcacgtgaggtcgaatgatcatctctcatgtcccctttgtgacaccacaaacctctaaaatccttttctactacatatccctttttctttaatgaaatgtgtttagaccattttgcccttatcaggattaaaggaaattcaaaaatgaaataaaattaaaaacagaaaataaagaagaaaacaagaaaaaaaaagaattcgtcacctacctcttttttccccgacgctcttccgacgagctcctccaccgtcgacgagctctacattgttgtcatttattttcttcctacgagctgcgtcgagcattgaagtccaagtatgtatttagaacaatctaaaagatttctctttgaatttacaaattttgaggattttgagattcaatccaattagatttgggttattgtgttctagcacctacattagaagtttaagtatagatttaggctcaatttggtctgttaatggataagcaattgatttcacatactgattcatactaaattgaactcaaatcgaatatttgttcttgtcgcgaaaataatactggtcgaactaggtatagttgtacggtacaacttgtaccgtaatttatatagatagtatgttttaatagcaccagtattacttagacacgtagtatttcatatatgtaatagtattactcacacatgtaatatttcggaattagtactagtaaaactgaaaatgtagtagaatcggtattactagtaatattgactgagtatgtgtattgttttggcaggttacaatgaaagagaacgtgatcatatattttaaattcgaaggtcacatgtataatgtgatgatgaagacattaggggagaagataactctttcaatgttagaagataggatattgacgaagcttggattagatgcaaataaggttaattgcatatg

SEQ ID NO: 12831 - DNA, 3000 bp, Unknown
  misc_feature (1)..( 3000): cDNA_ID_2706877_gDNA_ID_2214575_Annot_ID_135151 3000 nt of promoter + ATG
tatcaagttgcggataagggtttgatgccggtcatcggatgacctttagtattttaaagagctacatagaagaattgagaaatagttactgatttttcgtcctagcaaatcttgttgtggacagaaatatattcttaagtaaaaaagtacttttctttctccctttatctatgttttatctatttttgttcttttaccatttccattatatttatgtatctatattttttttgtcccccacatttatgcatatatctaaaatctaccaataacagtactgtttgaattacttggtaccttttcatgcatgatccatcgtctaagtagcaaaaataacaatgaacaactgttatcaattaaagctgttttctttttatgaacaaaaaaaataaaaatctagctctattatatatttggctagaaatagaaatatatgtatgaattgatcaataaatctttaagaaatcaataatgactaatatattagatgattcatgaactacttgtccagaatcagaaactaagtgatggtggttatttcttttcttttttcccttttttcgtgtgtggtatatgtgtttttcgtttgatgttatgatattttatgtagtgtgtacataattttggacctagaattcacatgacgtctacatgatgctctaaactttctatatgtaggcttcgctccaattaaatataaattgtatactaataaacacccaaaaacagcttgggctaaaataaaaaaatatgatatcgttttcttgacatcaaattaaaagttttgtttgatttgtttccgtttacatttgcatatttaatgttttaagaaatacaaaaaaattccgaaagtattatgtatatatagcttagatctacatatatggaacaattaaccaaagatggacctctagccaatattgatcgtcttctatcatttacacgtagtgagagtatatatgtattaatgtatgctgtattagaatgtgttaataattctatgtagttaaaaaaaaaaaagaagttatttcagtaatgtcattggtaacgtctctttcttctatacgaaagatcgatctaagtctgctgtaaattactgttcgactatatagattggactaatcatatttatatttgtgtgtgtataagaacattggagagtcgacaatcgttaagatctttaattagtttaattatgtcgttctcgtaaacgatcagtgcattattagtgttttttttttatatataattcttaattattcgggtatatcctcatttgtgctgagcaaaaaattaatgaaaaatcatttagactgttttggtcaacttttggttacatattagaaaacaattgcaaacatcattactcagccaaatcaaaccggtttgatcggaaatttggatctgtacgttaccgtatcagatgatcaaatcctaaacaactattatgtgcaagaaatcgtggaaattcaagacaatgtattaaaaaaaaattataaagaattttaatatataggttggtctgcgacaaaaaatactgaataatttcatattttaaccggaacaaaatgtgacttatctcacaaggccacaacaatctcatgccttttactaaaagattcagattgttgcgaccacataccacttcaagattaatctagtaccgtaactaagtaatgtcatttgttttttgttatgtcattgtttgcacagaagaaaaaactaaattatgtcatcttctgatagaaaatgactactttatttattctgaaagcttactgagctaagttattttgctagaacctgttctaaaaaagtcgaggcatttcgaattgtttgttgacacggacaaagtcagggaaaaattcaaataaattcaaaattacttcatacataattattttgcaacaaatacataggttataagttagtaggttacattatattgatcacattgcccacattggtacaactggtcatagtatatgatacatattatacaactgacagacataaaaatctctatctaaaccgttcaaatatcatgtagatagaactagaaaacttcagataataaagctgcacactaattataattaacaaattggccgtccaaaaaaattcgaatttgaaaagtattaaatggaatatatattcctttgaaggcgatttccatcccatcgatttcttcctaatgttggccaaacatattttactattaattatatatccaggactgcaagatccatatcggtgattaccaacaaaattcaaaacagatcaaattatatcttttgtttgttcctaaagtcaatagactgattttatataatccaatcctatgagtctacttcgtattctcttatattttttaagctatgtatttataaactaatacgaaaaattttatattgtactgcactatatcacttaagtaaacaacattgtttagaaataattcttttgagatttaataattaatagtggtccataaaaaaatagcatttataaactaattttagaacggactatcaaaatattattacgcctacactacaatcacttagtttttgatgttgttattttgtttatactttagacttagagtgttaattaaagcatttctacaatcaaactcatatattttgtttgttcaagtttatattaaaacatatcttaggactttaattattgattaaacaaaccaaagcaacaaatagaccgaaagacgaccaatcattgttcggctactaatcaaatttttttttttttacatttttaaacacttggtcctaaacgactcttatatatatatatataaagagatcaatacaatatagtcgtgatcagagtaatatccatctctggaatagcatttccccacccaaattcagaaacaaaactacaaaagtgtatcagcccacaagggttcctcagtcacaacaacaaaaagttattctttggttacttgtggtatacgtaagtataattgattagatg

SEQ ID NO: 12832 - DNA, 3000 bp, Unknown
  misc_feature (1)..( 3000): cDNA_ID_2709775_gDNA_ID_2214575_Annot_ID_135153 3000 nt of promoter + ATG
gatagaaaaaacgtacgactctgagctttacaacggctatttggcaatttacaacggatatggcgacttacgctattttactgtaaagattgaaaatgatatttgtgtgtcgttaggtaaaacattagtgaaaacaaaaggtggatagacaagatatggtcatatctatctaaccatacacagagacgtttgctgccatgcatgcatgatgcatatatatatatatatgtggatataaaatatatttaatttatatacacatagtccatagatagatagataaatagacgtagagagggagagagcaggagacaagaagagagtaagcacgcagagctttcgagcatgagcatgctagaaaaagagccatgtgtgctcactctcttctgtcgccttcgttattgctattcccttacctcctttagttgacttgcttcatcttcttgcatgcatatgattttgatgttatattagcctcggtccctaaaattactatatgatatgatgatatgatatgaaacagtttgtctgattttagggtctatatataaggattgctagggtctatatatgatgatgcatgcatagatttcatcatcatcatccactgaccactagctacgtttaatttatagaaagattccgccggattaaactcttatttcctgtcaatttgagcaacaagattctctcttttcaattatatatacataacacatgtctataatatacgtacaaaccaataaaattggactcttaacaaaattttgagagtgagagatcccacttaaaacgaaataaactatttgtttggtcattgcatgcgtaaacgaccacttgaacaattaagtatacataacataggtctagatctatgtgaaagattcccaaacttaagatctctagctagaacattcattgatcctccaatcaaaaaccaaaggaataaaaagtaatctttgtaagggcgaatgtaaaaccgaaacgtaagctagaggaattgatattaaaatggaagtaaaagcgaatattactaaaggttttggagttaattaaataaagacaaaagatgcaaggacaacgaattatgaacatcttcgaaatacgtttttaatattgttttggcatttgatttgatttgattctccttccacattcccttgttcatatgtgtttgtgtctcacgcaagcactacataagcggtccccctaaatacgtttctagaaacgtcaacgtttattcaatcataccaaaatttacatgtgtattcatcaatcagccgaccataaactacatggtccattagtcattacctatactgcaatttttctagcttttaacagccattatgtacttcacagtttggaatactggtatgacgaagaaaagtcgaggtaaaaaacgtattagaataaatgtttatcgtccaaagatcgcaccagcaaagaataagaaacctaaaccaacaaaggaacaattaatggaccctgaattttctgatgaagacgtacttaccagcttgggttttgatgatggcggttacataataccactaccgaaaaaatctctcatgttgattaatctaccagattcttttcgagatgagttgcaaacgatgcatgtcagtttttatctccgagaagttggcaaacttatgtttgggtgaggacaaatatgctctagtgaatagtactaagaagttgatgcttacagatggtctaggacggcttcatttgttttggatgaattcaattttttttccgaatcagtatttgcgaatgagatttatgtagccctagatgtgagatttatgaaagctggaagtgccaaaaagaaaggtggagattttaattgtaacaaaaacgcacagagtcttctttatgattttttcttggtagatatagatgaggagatatatgggtcaaaatttgaagagacggaagaccaaaagaagtggaacaaaaaattttgaattgatttgtcttcatcatattgtgctattaacattaaacacgaaatagagcatctgaatcttgaattctatggaatctctaaaacgaatagacagatctccgcggaggaagtgaaattctctactcatactgcattcaaaattaattgagtttttcaattacattggaggtttatcctttgatactttcggtttggtgatttgaatgaaatgttggttttgacagaaaaatgaataacacttgcattaaaatcatcaaaaattgaataacactagaatctaaggaggtgtattcgatcttatattttaagttatttgagtttttatataattttgattttttaaagaatttggatgaatttaaggaggttgttatgatttatggtaaaatcctctcaaattccacctaaaaccatgagatttaaaattatatatttttaactaagaaaatccacttaagtctcttaaagtcactaaaatccaatctttaaaatgttttcaataacagaagatttttaaggagattttaaaatcagtaattcaatagcattagatttcatgatacttttaaaaattcataattgaataacataggatatgttagtttgaataagatatcctaggtgttaatttactatttttaaaaaggtaagattttttttcatgtttttaaaaaatgtgagagtttttttacctatttttctattaaaatgaaatgtataaaattaaaattttgtttttaaataaaattactaaattaaatattacaaaatatgtatatattactatttagaattcaaatattatcgatacaaaattaaatttatttcttcaattcgtctatttaagcaagctagtaatttgatcgacaaaaaaaaaacaagctagtaaaatataattaacagaattactaaatcggccggtttagggattgctttctctcagtcgtcaattgcactaaaccactggtggtaatatcgctggcgtttcgcaagtatcaccgggaattgcaaagaagcagaggacc

SEQ ID NO: 12833 - DNA, 3000 bp, Unknown
  misc_feature (1)..( 3000): cDNA_ID_2709771_gDNA_ID_2214575_Annot_ID_135154 3000 nt of promoter + ATG
ttttaaagttttaagttgtatttgtttattttgttaaatgtttaatattttataattgtattttgattgttgtttctcggatttcacccgtagtacaccatcccatattaatatcgaatcaaacccgtcaattctaagatttcacccgtggtagtatttaattgtataattatattttaattgtcattctaggatttcactcctaattctatcgcaaattattatcaacccaaaccagtcaattctaaaatatcacccgtagtacaccatcccatattgatatcaaatcaagcccgtcaattctaggatttcacccgtgatagtatttagttgtataattatattttaattgtcattctaggatttcactcctaattctatcgcaaattattatcaacccaaaccagtcaattctaaaatatcacccgtagtacactatcccatattaatatcgattcaaactcgtcaattctaggatttcactcgtggtagtatttaattgtataattatattttaattgtcattctaggatttaactcctagttctatcgtaaattcttatcaacctaaacagtcaattctaaaatttcacccgtagtataaagtttaaatatttataatgtttaaatttctaatataagaatcaaaatttttttaaaaaaaattaaagttttaagttttttttttaatattgttaattttgtttagtgtttaagattatataattatattatgattgttattatatgttttttccatagcatactatcccatgttattatccactcaaatccgtcacaccatataaccccgtcccgtgaaattaaacacaaatttgtcattttattataaatttcaaatatttataaaattagaaactttcaaaatgattaatattgatccaaatttcatcattgaattttgagtgttatatctaagatttctctagcagtatatcgtcccgtattaatatcttttatattgtttaaatttcttgtaatatttaatttataattttttaaactttttaacgtttcaattttttaaaataaataaccctagtaaacaaaccattttaattttggacacctcataaatcaagtttcatgctcattcgtaatcgaaatcattttggtcctttttatagtatggctcttgaccattgtccaatttttttaagcgatgtggaacattctaaaatcgtaattattatccacccaaacccgtcctaccatataacccagtcccgtaaaattaaacataattttgtcattttcttataaatttcaatattataaaatttgaaacttaaaaaaatacaatatcgacccaaaattcatcattgaattttgattgttatatttaagatttttcctgtaatatatcgtctcgtattaatatattttttatatatttataatatttaaatttcttgtaaaattcaatttataattttaaaaacttatactttaaaactttataagttttaaaattataaatatttcaagcattttttaaagataaactttataaaaagattttaaaattataatatttaacttttgataaagttataatatttataatttcttgaaatattttaaagtttcaattctttaaaataaaaaatccgagtaaaatcggataactattttaattttggacgcctgataaatcaagctttctgctcattcgtaatcagaatcattttggtccttttataatatgggtctgaaccattgtccaatttttctaagcgatgtgggacattgtacatatattatttcttcataggttgaataatatatgtccgttttaaaaaatttaaattacatcatattcagaaaaatataatattttattaactatatatattttatataaattcaaaataaataaagtataagatcaaataaaaatgaaagaagatttatatatttatgtttaaattaggtagaaatattttaggaaattagttaaggtaaataaaaaatatggttagtttagagatattgtttatattaaatttggtaagtaaatcattaattttcgtttttaattattaggttttaggtaacttttccaaaaattaatgttatccaagatcagaacagaattaaacatgttatccaggatccgaacagagttaaaccgggtaaaacccacccatttgaattaattgttgaattatggttcaaatcttcaacattatcttcaaaaatcccctccaaaaatgtatatatagattaagaaagttgtgcttcatgagtaaaaacatagaatttcatatcttaatattaagatatatttgttagaattagagaatttataataactaaactatttgaataattttttttttgaatagaatttaaaagcttacaacccaataacaatgtattttactaaaactttaaaagaatccatgaattattgacaataaaatctgaaaattagaaaaattcatctaccaataaccactctaaaacatttgtcaaacataaaacacattgggtcattatttactgaccataaaaacaatacaataaaattctaaaagtgcaatgtttacttaaaacttttaatttgggcttttaccaaatacttccaagttccaagaaccaatcacaaagcatattattcaccgtcaagctcaatcagagaaagatcaaagcttaaaactttttttccggaaaagttaaagagagaaaaaagaatcaatctttttgcttgacgattgttactctcagtggaaaggtctagtccccattctcatttttttttgttaaaaatcgtatctttggctttatttttggttatctcgtagattttgcgtgaaaagctttgaactttatgatgttttgattgacctccatttaggaaaatgtaaatatcttcaatttctggggtttaagtgagattttacgagtgttcaagttaagggtttgaatttgggtgaaaacacctggtaagccatttcattgtttctcaggacgatg

SEQ ID NO: 12834 - DNA, 3000 bp, Unknown
  misc_feature (1)..( 3000): cDNA_ID_2709767_gDNA_ID_2214575_Annot_ID_135155 3000 nt of promoter + ATG
tataaatctattacaattagtgacaaccaatcatgatatttggttaaaacaatccatgcatatttgttaatccacaaaaaaagtttaaatatctaactctgaaatctctaaaatctttacacctatgcatctaccaataatgattctgaaagtttcagaaaaatgtctggaaatatataactgtgttgggttttcatttgaaaattatgatctcttactagtaataacgtcatggaaattgcaacacagaaaaagacttataaagttttctgatatttttctaatttaggattttctttttaaaaaatacaaagaaaaaccgactatagaaatgttggtgtaaattaaacaggaggaagagttttatccaataatacagtatacaagtaacaagatgaagaacctcgggaacttgatacgtttgagggttaacagtgaatcatattttttatataaccaagtcataaactagagaaaccatataaattgaacaaacgaaaaaagacaatctcacttccatggttagtaatctttcatttagaaagatcttaagggaaatatataattgtatattctctctctataccacacaattccgatgaacacacaatctggtatattgtacatttgtttataatgcttggcacgacggcttgtgataaggctttatcgtctcataaaaggaaaacgtagtcattcgatcatctcccaaagtttcaatcttctctactgtcttcgtttatttcaaatgattatgagttgattaattattcaaaacacagaagatctctctatacatatatatatatatatatatagaaacctttcaaaccatttcgcaaattggttgtttctcactttctctagcgtaaatctcgatgagcttaagttaaaacttaccttcagggtcatttgttttgttatgtgacaatcttctagattaatattccacttactacttcctgcttaaaatatttagttacatcacatgaccatgtaattgaatttatcctctttataatataaactacgaaaatctgaagaagaaaaaaattatcgaaaagagaatcatattctggtactagcaaaataaatttggtagaagatatatatatatttttctatatgtaaacttcaaaattaatgcctaagatatgctaaaaatttgcgaaggagtcagggggaaagcttgagaggaccaatgcatggcattgcttttactgacagtaaacagtgtcacgctcacgacccattcttcccgttccatttggttttatttatttcaaagtttaatattccttttgtataacattcaaatcttcacatgattgattgtgtgaaaaccccacagattttactacaatagggggagttgacttaaaatagctattgatgtcgaaaaaatgtattttagttataaattatactaaagaaaatttttgatttgtctgttgtttaagcatatgtattgttaaacttaaaaaaatatgtattgttaatcttaaaaatgtaggagtacacatcaaatactcgagcataatcaaaaccgtattcatagaccgatgtgagaatcaaatagaagataatgtgattttttaaaatatcgtatctccaaatcaatcacttagaagataatgtaattctttatgtgctacataaataaatatatatatatatatatatatatatcttgtatatatgtcttgacaaaaaattgccagtcaaaaaccatgactgaatcaaactataagtcggattgaatcaaactataagtcggatgagtattaatttccattatgtttctatactttacaaaccggaaaatagatattatagataccaaaaaagtagatttgtgtatattattagaagatttggaatttcatcattatcaggatctaaagtacttccctaattaaatcatgtcggttgaaaaagctcaatgaatgtttgaaatttggaaagtttattaaattcggatcttttttttttgtttgtcgtcccaaacatttttattttattacaaataatcaacttatccttactactaaatcatttcatatctttgataccaacaaatcatttcatattctattttgatgtttaagaaaacactatttaccagttacaaaatattataaggattgttgtttagaaaaaaaagtacaagttgaattctttttgtcaaatataaaattgactttttaatatataattgacttattgaacatgattacagaattaatcatctacaaaactttccaagtttataataaatacatttcaaagactattagttcttcttaaaatatttctaaaagtgatcaaagactaccacatataattcagaaaaagtagaagttgatttctttttgtcaaataaataattgacttaaaatagtttggaaagccattgaacttgattatagaattgataatgtacataaaaaaattccaagtttataataaatacatttttcaaatgctatatcagttcttcttaaaatatttcactaaaaaaacactcaaatatagaataaatttattgaataacataccaactgtaaaacagaatttgacaaaaaaaaaaaaaaaatgaaatgaagatgaagacaaaaataaatcaccagaggatcttatgcaaaaaaatatatgaatacacaataaaccatattgatatttttaaaataaaataaaaacagaaaaatatcccaacaccgcttttcaattaaaaatcttccgtcaccattgttgtcatcttcctctctcgtgaatcctttttcctttcttcttcttcttctcttcagagaaaactttgcttctctttctataaggaaccagacacgaatcccattcccaccgatttcttagcttcttccttcaatccgctctttccctctccattagattctgtttcctctttcaatttcttctgcatgcttctcgattctctctgacgcctcttttctcccgacgctgtttcgtcaaacgcttttcgaa

SEQ ID NO: 12835 - DNA, 3000 bp, Unknown; identical to SEQ ID NO: 12832
  misc_feature (1)..( 3000): cDNA_ID_1572338_gDNA_ID_2214575_Annot_ID_186311 3000 nt of promoter + ATG

SEQ ID NO: 12836 - DNA, 3000 bp, Unknown
  misc_feature (1)..( 3000): cDNA_ID_2712676_gDNA_ID_2214575_Annot_ID_135157 3000 nt of promoter + ATG
tgctctctcctcaaagaattttgcttccatctcatcatattggttctgcaaaggttaaaatacaaaaggaatcagataaatttgctccaccaaaaactcattagacctgaacagccagctaattcaaaaccaatacaaaatccaagatcatctaaaagctgaaaatttactcacctgaatctctcttagaaactcgacacgcttcctgactggtggagtcaagttttcaaggacatcagagtgttgtccagccaaattctgcaacttgttctgcagcaaacacgtaaatcaaatcaggaaaagtcacaaactttcaaacaaccaaattaagatgcatagacaatcctcaaaaccaaagtcaaattctctaagccataagaatcaaatcaatttctcaaaactagtcaggaagagaaaacaatccctaaaagttacaaagatgaatagcccaatctccagatagtcatacgcaaatcatatcgtgaagaaaaaactcaccttaagagcattaacaagcccggcacgatcctcctcgttaagagctataagcaaaacacaaaacaagagaagcttttttcaataaatcaagagaacaaaagagaatccaggcctcattctataggacaataagattataatatcttaccggtggagagatcggacatgttcatgctgtccttgtcgttgctcatcttcgcaagaaaagaatctggcggaggaagaggaaggataagaaaccttaaaaccctagatttttggggacaaatacgagacagagaatatatatataaataactaaaagggctttgagaaaatgaccagaccgaaataagacacaactaaagcgaaaataacaaatttttacatcaaaatttggcatgaatatttgtttttaacatttaagagcatttctgttgattttttttaaaaaaaggcttttaagagcatttctattggttagaagaaatctaggttgcatggaaactcgccccgaggtctatttcccatttccgaaacgttacgaaaacagaaactctccggaaacatgaaaaacgtaacggaaacgcgttttttaaaaatttatgtttggaaacacgatggaaacttacgttttaaagatagaaactcatgtttcccaaatagacatacgacaaatttttttcaactttgaaaatttaataactaaaattaaaattattaaaattattaatacatataactaattttggaagactttgagttttaagatatttcttttgataaaccagatttgaaaagagctttatattatctttgatgaaactaatgaaaatgaaaatgttggtctaaattaactatttgaacttgaaccttttaatttttatcttttagaattttagtttatttatttaatattgatgttttggacttgtattgtttaaaccattttttctttaatatagttttatgttaatgttatatatatatatatatatatatgtatgtatgtgtatacgtttccaatccctaattttaagaaaaaatcgtttccaatccctaattttaagaaaaaatcgtttctcgtttccgaaacgtttcgtattcgcgttttcgtttccatttcattgcaacataggaagaaactcacgagtcttttgatgatagaagtttatttatttaactaaaaatttatttattacaaaagtttaacctaatcatcaaaaaacaaatgtatataaaaaaaaagtatgtcatgagtttctcaagtgaaaaaagagtctactttcttttagctcgaagacaattctcatattctcatgaatgctagctgatcacatgttaatgcttaatctggattgatgcattgtcatgagtcactcaaatttcatattagcacactatagtaagcaaatctgattggaaaacatctagtgagatgctgctttgttagtttagggaaaaatgcttatttggtcctaaagatttcgacttaagaatagagaaatggtaaaaaaatgtagaacatcatgccaatcaaatgatacaaaagtaacataaccaccaaacgcatttgcatgatctatctaatattatatgtacctattttggtttaaggtcattaataaacttgttgattagtttttaataattttgtaaagtttctcaaacaatttctttatttttatgatatttttcacaactttattttgtaaaaaaaaagggtatgatatttttcacaactttattttataaaaaaaagggtagaaagtcataaaccaataacacaataatttaattcattataataatcatagattctttgttttaaatgaattacacaaaaaatttaataactttataaaaatatgaatccaataactctacatttatgaagattttatattactttttacaaatcttaaactaataacaccaaactttaacaaaaaattgaaaaatctttattgaataacaacaaattcttcataacattttaagtcactgaaacttcgaatacatcacaaaccaataacactccctaaataaatttatatatattactagaagtctggttatttgtttaaatgttaaaagatatatgaatttgtaaacttaagagatttatggaatttaggaaaatataaaaacaaaatccttattcttattataaagtttctaagaaatatactgtatatttttttcaccgaataaagatatttaataaattgagaaaaggaatagaaaagaccaaaagcaacaggctaagcgagacacacacacacgcgcagtcttcttcatcttgcttgcttctggttgcttaaccaaaacaccatggaatctccctaaatttcctcacctactcacttccaatttcaacctgctcgattcttcccctcttcttcgcaaaagccctagttttgatcatcgcacttcactctcctccgcatgagaaatcgagaaatccgctcgacgtagtagatagataaaaccacaaagttagggttttttcaattgggtatg

SEQ ID NO: 12837 - DNA, 3000 bp, Unknown
  misc_feature (1)..( 3000): cDNA_ID_2709749_gDNA_ID_2214575_Annot_ID_135160 3000 nt of promoter + ATG
ttttgtctaataggattctgtgaatggccaccgtcgagtaaaagcctataaaaatcctatatttcaataaaacaagcttcatgtagtgttgccacatatggtcttcattcacacggttaataaaatgcactttaaccaaacgatattttggatctaatgttttttcacttaagtagacatgatgatccttctttatttctattgcacattaatctaattattatttttttattttctaaactaaatcatcatttattagatgtttgaatacaattcaaccaataataaaataatttacatagtataaatagttaaaaccaatactaaaaagttaatcaattatttattgaaagttgaaaacatcatctatttaaaaaccaaatattacaaatgtttagttttgtagtgtacaaaaagcttctaccactaacaacaaattagtgcaatataaaatataaatataattattatattttaaaagtaacaaaaaatgtttcagtatatatttagttacattttattatacatttaagtatattaattacaccatgcaacgcgttggacttttgctagtaacagtataaactaaaaagatagatttgagtgtaaattagttttttggtttgggaaatatggtagatttaaaaaaaaaggatgaaagaagtggtagaatgtgaaaatgtggtatatatcatagttttcatagtatatggacagatggactaatcatccaatcattgaaatcaaactatttctaatcagataagtaattagacaaaaacaaattgacaaaatccattcttatttaataataataataatattttagttacatctaattatctaaagatggcagacgggcctgcccgcaacaattggctgccttggatcgttttttttttctgatccaaaacgtatcacatatggttttgctatgattccaaatcaaaatctaaacaaattcttgaaatcagttcttagtagctcagtatttggtttacatgacacatccactcctcttcgtcattctctcattcagaagcttatccatcatctcaaacagtaacctagtaggagtattcttccaaataagtaccaaacccatgtccattcatctttgttgtcctcctcttgaatctgagtggttctctggcaagttccatctcctcctcgcagctagtgagttcttatcataaatactctaatgaacataactaaaatagcacaaaggattgtaacataagattatgagtgattaaatctatcacccatgaatatacattaaacacaactgatcacaagaaccagaaactaattcgttatcttaaagacgcatccagctccacccgctgcgattaagtcctatacggttctctgaacactcagagcattcctcaaccaatatctgcaacaatgtcagaaagtgattattttaacagaagttatagaacagaaactgcaaacaaatatgacaacagttctgatattcttcaaatctcttcaatagtttaaggtagttatactagtaaagaacaaagaaaaattgcaattatctctatgcaaacaaagatcaagtaatcaactataactaaacaaagaccatttcgccacctgtcatgactttagcgaaacatcatatcattgtgattatcggtgccatatctaccaagatattcccaactttgttccagaattaaaagttctagtggttatttttggtgtccataaataactcgactactatagtgttctactataatcacaattttgtagatttttttctcgttcttcgtttatcaaactatagtgttctactataatcaaaacaattttatttatttcttgcttgttttatcaattgagagagagagaaatcgtatagatataacttgtcagagaaatggtggcatagacttttaaaatattttataaaaaactaatcttcacttcacagtacttagatactcaaactatgtcatatatatagttatgaaaagatcagtcgagagcatgaccgtgaaagaggagaaacataaggttaaaacttaaaacgaatgaattttatcattaagcggaaggaattttccaaataatcctcctaaatttcatatataaacctattagagaggctactctaaaaaaaattcacaattttcgagaacgtaaaattcataacataaaagggttgtttccgtaaatcctcgttctaagtacttacatgagtcagaacacgcctacatccatgtaaaacattccttgtcttactacatctcgatcatcttatctgttatgatgtctttgaatcaaaatcccaaaagttttggttcccgcaaaaataaaccacgacctacgtatatgatctttagtcaagttggcaagaacgtaatgcatgcctctccaatcggcagtttactttcaacggcatattcaccgaatcatttgcaaccaaatcaactccttgaactacccgactctcccctcgaccctcccctctaggcttttatgttatgacatgctggttcatggaaatgcacatacataaacataagttttttttaattcagtttcactctttaatatttttctcaacaaaccttagtgaaagctttactcgattttattccaagaaaattaatgtaaatttttttgttggttaatactaaattcaaattctaaaaagatatttatggatagatatggctaactatagtcaacaagatttattatatatctaaatatgaggatgtgccttgaagtattaattcaacaagttgacaaaacagtaagatttccttttttcatttttaggaattatttgagatttcattttgacttcaatatttattgtctttttttttttggtaggattccatattttatgttatacatacattcctacggtgtctatataagtaacaaattatagcgatatctaattctttcgttgtaattctcttcttcaaaaatcaaatcagagagagagagaaacataaacaaatg

SEQ ID NO: 12838 - DNA, 3000 bp, Unknown
  misc_feature (1)..( 3000): cDNA_ID_2709741_gDNA_ID_2214575_Annot_ID_135162 3000 nt of promoter + ATG
attagtttttttcaagtcaaatgtaatctcaatttacttccaaaacaaaacaaaataaattaatgtgttgaatttttaatgcacatcatatatttggatctctaattaatttctttgactgcattctgcaaacattatctataaatacttatttgatagtgtaatttttattcatccttaaattactcaatcaatttttatttctaaaagaacaaattattgttatggaaccactaggagatcgtcgtccttgctgcgtatgtatcaccaaaaatagaaattgtcctagattctgcgaatatgcggaatactttccatatgagttgtatactttttttaaaaactttttttccttactattatcttctgctaaacattttacttgatattaattaattttaattttcaggcgaagtcattatgaaagtactaatgaattgtttggcacaccaaagatcattaagatgatgaggcatgctcctgaagaaaaaaaacaaatgcttgcaacttccataatcatggaaggtaatgcttggacaaatgatcctgtaagtggtggatttggtatggtgcaaaagatcatgtggaagattatgttacacaaagcctaccttcatgaactcgaggagaagattaaggaagagaaggaaaaaatcgagcttcatctttaagtgatacattgtagcatatattatttatgcatcaaataatgattatttaatataaaatcatatttaagatgaatattaaattaccgtcgagcaagttaataccttatatttcttattcatatttcttgtgattaaattgtttgtgtatttagatgatcataaatgaaactttgaaatctagagaaacatattgtacatataataaagtaaaagtataaaaaattgataattttaaaaatacgagaacttctcgtttcttgttctaagtaaaataacattccaatatagaattagggtttagttgcctttggaaaattgctttgtaaaaagctagatattatgtttcgtttagtatatctttgactcatgatatttgacatttgattaaaaatcatgtttgccttacatgcataatatcttaaatgcttgtatcacatgtctctaactaccacgaaaaactttgtgtataaaaaattcaaatctttaatttttggacgacaaattcattagcgttactaatttcattgtacctatcagttttatgacgataataatacaatttatttcgtcccaaaaaaaataatatttatttattaagttaataggaaaataggtgtaaatatacaaatatgtatatgtaatatgcaattagagaatatatgaaacaccactatactatcaacattaatattagtaagatgagaaacataaattagatgatttgagtcaatatttttccctagtaatcttagtaatagttttttttttcttttatttgcatagttcatatacatatttgtatacatatatgttgtgcagatctaaaatttttgtttaatacctattttgcacctctaccaaataaattgtgttagaattttaaaaaattcataatcacaacaaaatttctaacactatttaatttgttgatcataaaaaatctgaatttttatgcacaaaacgtttcttaatagtcaaaactagtgatataagaagtgcaatgccaagaattatagagatttgaagcgaaattttaaaatgacatgattatacataacttttaagttctaaactataatcataataaaaaaaattaagatattaaatagagcgaacagacgtttaggtttttttcggatttaccatattcatcagattaatccatgctggattgagaaaaagcctcaagcttggaacaactacatgtaaatcataacctcgagatattttaaggctttcaatgtcccaaagaaagttatttggtgtcgaatccatgagtgaaaattgagcttttcacatagaacaaagagggatatgaaatagtacaattttatgttttaaataaagaagataaaatgaaaggtaaattttataggtttagccagcagagaacaaatgaaatgaatgttttaagtttagacaccaagaacaaacttagggttcaagtctaagcttagtcatatacttctgaacaatattggactttattgttcaagtattaaacaaacattgaaatcttcttaaatcacttttcaaaatgcaacgaggatctattctttttttttttttcagaagaagctacaagaaagaacaacaagtttggatatgaattataaagttagtaatccatgtaagagacgcttatattaattaatttatactgttaattatttcatccgtaatttttattattattcaataaagtatttattttactgaattaaaaaataataattatgggtgtttggatattcggtcgggtattttgggtttgagtttttcgggtttagaattttaagatccgttcgagtaattcaagattccgggtcgggtttggttcggtttcgggtttagttatatattgaaatatcaaaattttgtgtccgaatctattaaattatttgaaaatttcaaaaattccctaaacaacccgagtagttttgcttgaatatatttaaaaatacataaaagtaactaaaatatccgaaaaatcataatattgtctatatgtaaatataaatataaatattttagttatatttatatttaagatatgtttgggtaccagttcgggttcgggtttttcaggttttgaagtttagattcagtcggatatttgaaaatttcaggttcgaatttagattgggatttttggattgggatttttggatcgggttcagatcggttttttcggattcaggtattatgtccaaagtaaaaatggtaaacggtggttgttttgtttgtatttgtaaagcagaagagagagagatatagagacactgaaagcaaagaccaaaaaagaaaaattaaaaagagagagaggaaa

SEQ ID NO: 12839 - DNA, 3000 bp, Unknown
  misc_feature (1)..( 3000): cDNA_ID_1807613_gDNA_ID_2214575_Annot_ID_135164 3000 nt of promoter + ATG
agaagtctgatcgtgcagctaaaagccccgctgggctcttcttccagcatgctggtcacaggttcttaaagacttatcttgatttttcttgattgctttctcattttacttgcttctaagttcccttgtttataaaccatattagggacaaagttgttgatttccactggaatgcttcagacccttggactattgtcagtgtttctgatgactgtgagactactggtggaggtggaacattgcaggtaaccttgaaatctttcttggtaccttgataagcaattttattgacataccgttaaatgttgtttatactttcttctatggcagatatggcggatgagtgacttgatttacagaccagaagaagaagtcgtggcagaattggagaagttcaagtcgcatgttatgacttgtgcctccaagccttaagagtaaagaaaacccattgtctatctatctatcgcctatggtaaactaatgcgggttttagcgaggagtcttggtttttgtaaggctggtttgtcttttgagatattggtggtagcttttaggacctttccatatcagttaggggtacatggttctggttcatgatcctgtttcatcagactcttaggtgctgttttgttcaactgagatgttaatcaaatcggaccaactttatgtgttttggtttaaggtttcaatacttggcctgaacctaatgattccttctctgtaactagtcgagaccaacccggctacaaaaaaaatagttgcattgatgttcaaatgcaaagcagaaggggtcattataaaacaatatagtaataagcatcgcaaaatttggaaactgggttcttgatgattcgtcgcatcttaaataatgtttgcattgtcgttttcattagaaaaaaactgttaatcacgcttagcagtaggattaggtgattttcaattcacagatttattcgtaggattttgaagaaattttaagtattaacagtcactaaacaatcagaccattgcaaatcatacatagatcacctggtcatttcataaaactaaactatatgataatgttttactttattgggcttaacgttaatggtcctcccgcttaataggctttatgaagtctcttgatgagctagagactttaaaaatccaatcacaaagcctacatgagaccgtcaagatcagtcagagaagatcaaacgaagaagtttttgttccaaaagatactaaagagagaaacatgaatcaatgtattgcttgaggaataaggtagggaagctaatcaatcacaagtagacgaatcggagtatttcataaaattagggtttttagacctacattttcttttctttttccgacgatacttaaattgctcgagaaactctattagtgagaaatcccccatcggaatctcgatggaatcatctccttctggatccgaacctccgcagaaagtcgtttctaaactgcagaaagtaggctggcgagctacgatgatcttcaatctcggttttgcaggttagagaaatcttcattactttcttagtaaggtttttagttttacgtccgtaatgtgttcgatgtaatgcctagctgagaaagttctttcctttttctttattaatttttgagaatagaaaatacgaattcttctagcggtcgtctgatatatatgatactacaatttatcccttgaactgttgttgttgtccttgctttgattctcgaagaaagctgattgcattactctgagagtgtttgattctccactctattatcagatattagaacatgcttattgaaaggacattttttggatctgtatctctcagtcactgttgatgttttcagcgacattgaattaagcaaatgtagtatctagaaactatctatatctctgtgtgcgtgtgtgtatatatcttggctaagcatttttgcgttgaatagaggattcacacaggttcttgtaaattttctggttcatggacatgattgcacatcttattatcttgtactcaatacttttcaaatgtttcagcatctcgatttttagctggcagaactacaagcttggtctaaatcagaattgagaaaagcatgcttgcttgatttcttatgatatagcattcatgatagacaacttcaatgtttgctgatttgatcatttggttctgcagcttatatatttgcgataaaacgagaaaaggacattgatgcggacgagaagaagaaagttaaaaagggcagcgaggctagacataaaggtgtgaaaaagggtgctgttaacaccgaaatcgagaagaaaggtgcagaagaaactgataaggctaaggaagcagaaactgcaataccggagaaggaagaaaccaaactgatccctgaactggatccactgtttgaatttacagatgcaactgatcaatccatgtttcaaactgtggcaactgaacatgtaaaggtagcaaggaaaccaattccagaagatgagcaaaaggagcttttcaagtggatattggaagagaaaaggaagatagaaccaaaagacagaaaagaaaagaaacaaatcgatgaagagaaagctattctgaaacagttcattcgtgctgagaggattccaaaacttctacctgatgattccgttgattcttcacttcgtgattgggacaaattcttctccaagtagaacgaatacagaaactagtgtgtacttgttttttgttagtacaccaaatgaccattgttggctttttagttttactactctgattgttactctaatcaacgaatagtttaaatgtgatttcttgggggttgagagtggcacttttataaaactttggggtaatgtttctatttcttataatataaaggacttaaaatataaattcaataaaaataagggtgtttctgagaaagagggtataaatagcttaaaccctagagaaactgaagaatcctaaattgatcatcgtcgtcctttgagtaatttagaaaatcaaa

SEQ ID NO: 12840 - DNA, 3000 bp, Unknown
  misc_feature (1)..( 3000): cDNA_ID_2709735_gDNA_ID_2214575_Annot_ID_135168 3000 nt of promoter + ATG
ttcttcataccaaaaaagggtcatattatcatttgatgagtgttatagagctccttgctaaacacaacaccacgcatatccaaatttggtgacaccagaataacacattttacaagtacgccaatgacgcttagatgggtagtttagtgaagttttaaagaaaaaaaaaatcagtgaaaagaaaaacataatacacaattagacatgatggctaggtccatcgaatatgagtagggataagaaaaaaaaaaaaaaaaaaaaaaaactttccttgtgaagaagaaagaaacttcacataaatgatgttacaaggaaacacaatgggagtgacccaaaaccattaagaaattatgaaaaattcaaaaacttgtgatcacatggttgtatggactgaacttggacttttcttcaatcctattgttcattttacatttccaaagcagattcttatacaattttttattcattaaacgtaatgatgcttcaaattcaatgagttaacagaatagtgttgaaagaaactattgtttttgcctccaagtaggcaactatgcctcctaacacacaagagaaacagagatttaattttcacttatgcctataaatactctttctagattgcattcaacaaatctgtgtgtgagaaaaagtaaataaaaaagagatggttttgatcaaagagagagagatggagattccagttattgattttgcagagttggatggagagaagagaagcaagaccatgtcacttcttgatcatgcatgtgataagtggggattcttcatggtatgtataacatctttatgcacaaggcagtgttttctaagatatgtctactgtatatccttaaagagttagtgaattttcaggttgataatcatggaattgataaagagttgatggagaaagtgaagaagatgattaactctcactatgaggagcatttgaaagagaagttttaccagtcagagatggtcaaggctttgagtgaaggcaaaacctcagatgcagattgggaaagcagtttcttcatctcacataaaccaacttcaaatatctgtcagatcccaaacatttcagaggaactcaggtaaagtaattaagaattgaatagtaccaaaggctctaccatttttacctgtttgcttatttaactaaacaatgtgagagggtgaaattgatatttgcagcaagacgatggatgaatatgtttgtcaactgcacaagtttgcagagagactctccaagctcatgtgtgagaatcttggtcttgatcaggaagacataatgaatgccttttctggtccaaaaggtccagcttttggaacaaaagtggctaaatacccagaatgcccacgtcctgagcttatgagagggctgagagaacatacggatgctgggggaatcatattactcctgcaggatgatcaagtgcctggtcttgagttctttaaagatgggaagtgggttcctataccgccatccaagaacaataccatttttgtcaataccggtgatcaactagagatactgagtaatgggaggtacaagagtgttgttcaccgtgtaatgacagtgaagcatggaagtagactgtcgattgctacgttttacaatccggctggtgatgccataatatctccagctccaaagctcttgtatccaagtggctaccgttttcaagactacctaaagctttattcaactaccaagtttggagacaaaggccccagacttgagaccatgaagaaaatgggaaatgcggattcagcctaggatgcatctggaatttgacgcttctgtactcacatcataaaaactttgtcttcttcttgtgtttccttataatttaaataaccagccatgtcagaatcttgctgattcagctatactacttcactcttctttcttcacttccacttgaaaagttccaaagccaaactgaagcagtctcatcaagctctgtgtcgaacttgagattagacaaagagcttgtaatctaagctctaagattgacagtcaatttcatgatttataagatgtaattcaactcttaacgtaatccacaactccgccatcatctctttccatattctctctgatttgactcatttccttcccaattcctagaatcaaacaaatagcatttctatatcagcatctaaaactgaaagctaagtgtgtattgactcaaaattcttctccaatcgcaataaaatcgagatgagaaaaattcatccatatgttttggttcacacattctatcgagcagcttgtgtgcaatcccaatcctctgaaccaaaacaaaagcttatctcttgaccattacccgacatttcactcatcagccaacgacaaatcctgctccgaaacctctaatgcttggaaaagaagaaaattccgatttccgaacaatggaacttactccattttgcattctctgtcgaaagtaacatacgttcaatgcaaatgacccaaagtcgtcggtgccacgtggatagttctcactggttgatgcattcggtaactcgcagaatggaagaatattaacacaaaaggcatctcgcgtatccacgtgtcccgttcaagattccaaattctaaaccaaaagccggtccgaccagattaacaagttctctttattacatcacaacccaaaacttgttcaaaacctaacttttcattgctaaacatattttattctgacattcacatgttaactttaatccaatatctaattcttttttcttaaaaccaccgttgtcgaaaaatccaaatcagcaaaatcagtgattaaccggaccggaccaaaccgaacatcgttttctgtaaatagcagtaactggtttcacacatcccatcatctctaaccaccgacctcataagtcattaagacaaaaacagagacactcctctcactctcattatttcattttctttccataaaaagcacgaatcttcaagaacaaagagagagagagagagaaaatttaatg

SEQ ID NO: 12841 - DNA, 3000 bp, Unknown
  misc_feature (1)..( 3000): cDNA_ID_1835663_gDNA_ID_2214575_Annot_ID_135169 3000 nt of promoter + ATG
cccaacaaaaaaaagtaagttagatacttccaaaatataatcgaacgaagaacttctcttacgaatgctatactcaccttaaatctagctgcagtacagggtacttggattttggattggacattataaaaacgttgtcctggatcaaaatcgcagcaaattcacatcacgagaatgcctttacatatgggtacataacagattatacattcttcagcaatatatagtacaaataatttaggacgatcgaagcttaccttcctatctatcagtcttggagtatcctctacgccattctcgttatccaaattaaagaaggatctagaacaaaatcactcatatgttatagtttgctttaaccagtgaaacaaaagtaaaaaaacagccaaacagggcaaaataagcatcagaaaaactcacttctcctccttggtcttggtttcatttttctttggcttaactcgtgcaacagtctctagaaccgcctaatgagcacaacacatgcctttaattaaaaagaaagaaaacatagagtagttaaaaaaagatctaaacttgcaacaaccaacctgctgatcagcaacactattattgaagcttcctggatcaggaactgcaaaatcgaaacaacacaaaagcattaattgctataatgtgggcacaaagagagagtctaaaccactcagctaatcaatgataaatccctagagaagaaggatcaataataacaaaattgaaatccctagagaaaccctagctcaggtaacaaatagaagaaatgaagatctatctagtgagagaggaggaaccttcgttctggtcattatcaggaaactctttctcaagtgctcgatcgatcatatcagcgaaactatcttccctaggtttcgcactcgtggcattggactcaacgacggttccattgatctcacgtgtaacaactgagtcagtctcgttatctgactcggcggaataagcaaaggagaagaagaagaagaaagtacagatcagaagaagcgttagaagcctcatcgttatcacagagaatttgtcagtgttgtttttacaccgccgcatctcagtgaatgtggcgcggcggagcgatagagagaagaagaagaagtagaagaagcacacaaagatctctctctctctctctttccggtggttggagaacgagaaagcacaaagattgagagagagagggaaattaattttatttttttattattgtttattgtttgcttaagggcaaaatgttaattaaagtctccatcgattctggaaactaaaaagtgtgttaagaacacgcgccaccgttagcgcgtggttcagggagtgagaacaaaaatcatttatacaacaaagtgaacaaagtaaaggtgatagttgctgaatttgcaaattgcgtattacactttaacatttttataatttttgtttagggttcattgtaatgtttggtctcttttggcttgtttagtttggagtttaagtttaccaaattctcatacttaaaagaaaatgtacctaaattggaaagaaaggctcttggtgaagcagaaggtttaatggggttactaaaacaatatatgaagactctaaagaggtcttatgaccctaactaatatcaatagcatgaaatttgaaaacgtttagatatcttgacaaggtattaactttttgaataattaactccaacatgttaaaagttgaaatgttgaatcaattcgttgtaatctcaaatacacgcatgttaatgatatttaaagtccgtgttaacgataaaccatcatttcgaattatgtaacatattacaacaccaaatgaccaaaacaaaagattcaataacattaccatttcttcctcaaacagtcaaactaaacgaaacaaagttatatataactgaaaagtctttgtagattaggtcttggcccgtttacgctctaaggggccgtcatggttgaattttacaccacataaaaaatatatttgtcggtgctgatttatatagactagagctacactaactaacgatatccgaaatattcgaccccaaaaagtaaaatgataacattctttaaacacaatcccaaattctttacaaggtgttataaaatatgacacacaaaaatatatattcaaaaccgagagcgcccataggaggggccaattctttcgcttaattccgcttagacccacattatttctttttctattgcaaatggtgtgtagtactccggtaatctcaaaataaacaattcgatactgtaccttttcacaaatctattctcaagtaacaattcgatactgtagctttaggccaagtagatttcttcataccaaaaaagggtcatattatcatttgatgagtgttatagagctccttgctaaacacaacaccacgcatatccaaatttggtgacaccagaataacacattttacaagtacgccaatgacgcttagatgggtagtttagtgaagttttaaagaaaaaaaaaatcagtgaaaagaaaaacataatacacaattagacatgatggctaggtccatcgaatatgagtagggataagaaaaaaaaaaaaaaaaaaaaaaaactttccttgtgaagaagaaagaaacttcacataaatgatgttacaaggaaacacaatgggagtgacccaaaaccattaagaaattatgaaaaattcaaaaacttgtgatcacatggttgtatggactgaacttggacttttcttcaatcctattgttcattttacatttccaaagcagattcttatacaattttttattcattaaacgtaatgatgcttcaaattcaatgagttaacagaatagtgttgaaagaaactattgtttttgcctccaagtaggcaactatgcctcctaacacacaagagaaacagagatttaattttcacttatgcctataaatactctttctagattgcattcaacaaatctgtgtgtgagaaaaagtaaataaaaaagagatg

SEQ ID NO: 12842 - DNA, 3000 bp, Unknown
  misc_feature (1)..( 3000): cDNA_ID_2709731_gDNA_ID_2214575_Annot_ID_135170 3000 nt of promoter + ATG
ctttaggtagtcttgaaaacggtagccacttggatacaagagctttggagctggagatattatggcatcaccagccggattgtaaaacgtagcaatcgacagtctacttccatgcttcactgtcattacacggtgaacaacactcttgtacctcccattactcagtatctctagttgatcaccggtattgacaaaaatggtattgttcttggatggcggtataggaacccacttcccatctttaaagaactcaagaccaggcacttgatcatcctgcaggagtaatatgattcccccagcatccgtatgttctctcagccctctcataagctcaggacgtgggcattctgggtatttagccacttttgttccaaaagctggaccttttggaccagaaaaggcattcattatgtcttcctgatcaagaccaagattctcacacatgagcttggagagtctctctgcaaacttgtgcagttgacaaacatattcatccatcgtcttgctgcaaatatcaatttcaccctctcacattgtttagttaaataagcaaacaggtaaaaatggtagagcctttggtactattcaattcttaattactttacctgagttcctctgaaatgtttgggatctgacagatatttgaagttggtttatgtgagatgaagaaactgctttcccaatctgcatctgaggttttgccttcactcaaagccttgaccatctctgactggtaaaacttctctttcaaatgctcctcatagtgagagttaatcatcttcttcactttctccatcaactctttatcaattccatgattatcaacctgaaaattcactaactctttaaggatatacagtagacatatcttagaaaacactgccttgtgcataaagatgttatacataccatgaagaatccccacttatcacatgcatgatcaagaagtgacatggtcttgcttctcttctctccatccaactctgcaaaatcaataactggaatctccatctctctctctttgatcaaaaccatctcttttttatttactttttctcacacacagatttgttgaatgcaatctagaaagagtatttataggcataagtgaaaattaaatctctgtttctcttgtgtgttaggaggcatagttgcctacttggaggcaaaaacaatagtttctttcaacactattctgttaactcattgaatttgaagcatcattacgtttaatgaataaaaaattgtataagaatctgctttggaaatgtaaaatgaacaataggattgaagaaaagtccaagttcagtccatacaaccatgtgatcacaagtttttgaatttttcataatttcttaatggttttgggtcactcccattgtgtttccttgtaacatcatttatgtgaagtttctttcttcttcacaaggaaagttttttttttttttttttttttttcttatccctactcatattcgatggacctagccatcatgtctaattgtgtattatgtttttcttttcactgattttttttttctttaaaacttcactaaactacccatctaagcgtcattggcgtacttgtaaaatgtgttattctggtgtcaccaaatttggatatgcgtggtgttgtgtttagcaaggagctctataacactcatcaaatgataatatgacccttttttggtatgaagaaatctacttggcctaaagctacagtatcgaattgttacttgagaatagatttgtgaaaaggtacagtatcgaattgtttattttgagattaccggagtactacacaccatttgcaatagaaaaagaaataatgtgggtctaagcggaattaagcgaaagaattggcccctcctatgggcgctctcggttttgaatatatatttttgtgtgtcatattttataacaccttgtaaagaatttgggattgtgtttaaagaatgttatcattttactttttggggtcgaatatttcggatatcgttagttagtgtagctctagtctatataaatcagcaccgacaaatatattttttatgtggtgtaaaattcaaccatgacggccccttagagcgtaaacgggccaagacctaatctacaaagacttttcagttatatataactttgtttcgtttagtttgactgtttgaggaagaaatggtaatgttattgaatcttttgttttggtcatttggtgttgtaatatgttacataattcgaaatgatggtttatcgttaacacggactttaaatatcattaacatgcgtgtatttgagattacaacgaattgattcaacatttcaacttttaacatgttggagttaattattcaaaaagttaataccttgtcaagatatctaaacgttttcaaatttcatgctattgatattagttagggtcataagacctctttagagtcttcatatattgttttagtaaccccattaaaccttctgcttcaccaagagcctttctttccaatttaggtacattttcttttaagtatgagaatttggtaaacttaaactccaaactaaacaagccaaaagagaccaaacattacaatgaaccctaaacaaaaattataaaaatgttaaagtgtaatacgcaatttgcaaattcagcaactatcacctttactttgttcactttgttgtataaatgatttttgttctcactccctgaaccacgcgctaacggtggcgcgtgttcttaacacactttttagtttccagaatcgatggagactttaattaacattttgcccttaagcaaacaataaacaataataaaaaaataaaattaatttccctctctctctcaatctttgtgctttctcgttctccaaccaccggaaagagagagagagagagatctttgtgtgcttcttctacttcttcttcttctctctatcgctccgccgcgccacattcactgagatgcggcggtgtaaaaacaacactgacaaattctctgtgataacg

SEQ ID NO: 12843 - DNA, 3000 bp, Unknown
  misc_feature (1)..( 3000): cDNA_ID_3026705_gDNA_ID_2214575_Annot_ID_186331 3000 nt of promoter + ATG
gagtgtgatggagacgggaaattgagttgcgatgattgtgaatttggtttgtgcttcaagtgtgctattttaccgcaaaaggtaatgaggcataggtacgacgatcatcctctcttcttatcttatggcgaaatgggcgtggctggcaaatattggtgtgaagcatgcgaaacaactgtgaacccagaaaaatggttctatacatgcaatgagtgtgggatcacattgcatatttcctgcgttatagatacttacgcatattccatgccaggagcgttaacatggataggaacatttgtatccaaccactctatttgtagaccactttgctgcgtgtgcaactctcgatgcaagctccctttcgttcgtacgcttcccgaggacggagctgatctatacttttgttctttagaatgtgagaagaaaatttatcaggaacgtttcgaattttaaaattatgttctttactatgtttagaaaactatttatttatagatgataatgtttgctagcttgaatgactcgcaaatttggtagaatttgtgaggaatctgggtctgttaaattattacaagtccctacaataacatttggttgtgtacttgtgttagtgtaatatatatatatctcattgaaccctagggtgcattagtgtttgccaaataaaaaccagaaaaaatatcaacttatttatggatgtaagattggaaaaggttggatcaatcttgccagtcaatccactaaatgtttaagttcctacaagtcgaaatgtcaatgacaaaaacagagacgtggaagtgagaacagagcagagcaaaacagaacatagcagagtaagtcagtcagagcaggttgtgttgtagaatcacattagttctctgatagagaagccaaaaaactcagtttgtgttgttgaacttggaacagaatgagaacaagttaatcactaaaaaatgtttgtgtcaccgtcatgttgcgaccttaaaacagagccccctaataattttttgttacactggttctattgaatctattttatggaaaaactattacacaatttggtttaccaatacattgatccctatcaaggaagctatggtttcaggcactgagcacactgaagagtaatagagattaacaatgcaaacatcatcaagccatgtaattctgcagttttcaacttaaaaagtcaaaaaaattatgatttttcattcaaccaaagaaaactgatgctccattattacaacaaaactgtttccgtgtaattccacagaccattacaattgattcttcagactatctaggagaaaacaaaaaacctagatatggaattctagagctagaatacttatcgaattttcaaaactgagtaaaaaaaaaaaagtaaacatcaaacaacaaacaacattgattaacgatgtggtccaagacaagtctcttgttgtttgggtctggctgcatcaaacaagcttgagattttcggctgatcaattctttaagctaaccttcctcattgatttacgccaacttcatcctccttaacgcttccacaaacattacattcaagaactctcgaagcatcatgagtcttcgggggaagcggagctagagtgccaaaacaattctccttctcacacatatatctcacaaaaaagtaagcatgaggaaaattagattcatcatccacaccatttccacaaacttcttcttcattctcacctactgaatcttccatctcttcttgttcatcttgatcctccatctcttccataatctcattctcatcttcctcaccttcagaccaactaaattccactttgcaccgatcacagtcacacttaaaaccgtaatcctcaagcaatctcttttgtctactcgaatagttcatgttcacagggaagtagcttaaacaaacttctctaccttcaggaacatcatgaatcatcctaatgatgatatcagtattaccatcagaagcagagtcaacataatcgaatctacaagcattaggaagacaatcatgattgaaaaacgaagtctttggataaatcccataagctcgcacagatcttttctcattcgaaacagagcacggttccatcagaccaaaggcgttaactttatcctttgacagtaaagccgccgtgagatccggcgagatagacaccggaagagatggacacacggaagataaaagagaatgaagaaacccagcagctgcagaatcacccgcagaacaagaaggatctccattgctgctgccactaccttggagagagagcaaaatctggaaatcagaaggagaagcagcggcgagattgtaagcagagaggaggaaacgagcttggacttgacgatcagaaggttgatcggagaatgcagaggaggatgattggtgaagccggcgaagagattcgcagagccaaggagtatgagaggcgaagcaattagggctacaaaaggagacgagagagcaagattgacatttctgatgcgccgatgaagctaacaaacggaaacaatggtcgcagtaaggagaaacagaggaggagagaaatggaaaagcagagtagagaaggagaggagactctctgaggataacttgtccagcacgaagagactgtgccgccaccaaactccttcctcttccaccgatttctgcaaccctaagcagcgtctccggtttagctccgccgtcatttatcataatggccgtcgtcgattagggttttctacaaaactaaaactatttatatggaagaaacatgagaaacgctaaaacggtaacgtttcatcacgtttgaactttaaactcgttaggttatttggttgggccttatacaagcttggaaactttgggctatacgggctttctctcagtccatgtttttaccattgtgattaacttttttttggcttttacttgcctttgttttaccgcattggtttcttcttctacaaggagtctctctctcttagggtttatttatttcggccatg

SEQ ID NO: 12844 - DNA, 3000 bp, Unknown; identical to SEQ ID NO: 12841
  misc_feature (1)..( 3000): cDNA_ID_1835663_gDNA_ID_2214575_Annot_ID_186328 3000 nt of promoter + ATG

SEQ ID NO: 12845 - DNA, 3000 bp, Unknown; identical to SEQ ID NO: 12840
  misc_feature (1)..( 3000): cDNA_ID_2709735_gDNA_ID_2214575_Annot_ID_186326 3000 nt of promoter + ATG

SEQ ID NO: 12846 - DNA, 3000 bp, Unknown; identical to SEQ ID NO: 12839
  misc_feature (1)..( 3000): cDNA_ID_1807613_gDNA_ID_2214575_Annot_ID_186322 3000 nt of promoter + ATG

SEQ ID NO: 12847 - DNA, 3000 bp, Unknown; identical to SEQ ID NO: 12838
  misc_feature (1)..( 3000): cDNA_ID_2709741_gDNA_ID_2214575_Annot_ID_186320 3000 nt of promoter + ATG

SEQ ID NO: 12848 - DNA, 3000 bp, Unknown; identical to SEQ ID NO: 12837
  misc_feature (1)..( 3000): cDNA_ID_2709749_gDNA_ID_2214575_Annot_ID_186318 3000 nt of promoter + ATG

SEQ ID NO: 12849 - DNA, 3000 bp, Unknown; identical to SEQ ID NO: 12836
  misc_feature (1)..( 3000): cDNA_ID_2712676_gDNA_ID_2214575_Annot_ID_186315 3000 nt of promoter + ATG

SEQ ID NO: 12850 - DNA, 3000 bp, Unknown; identical to SEQ ID NO: 12833
  misc_feature (1)..( 3000): cDNA_ID_2709771_gDNA_ID_2214575_Annot_ID_186312 3000 nt of promoter + ATG

SEQ ID NO: 12851 - DNA, 3000 bp, Unknown
  misc_feature (1)..( 3000): cDNA_ID_2709761_gDNA_ID_2214575_Annot_ID_135171 3000 nt of promoter + ATG
tgctctacatggccagataactgtaggaactcttattcttcaggtatctctacctgataactctcaaaactatagcttctctattatcattttcacacgtttttttgtttttcctattattctaaaactgcatatccttttgatccgaaatatgattcaaatccaattccaataggtagtatgttgcatgcagcaagtacttttgttagaactttaatttactgtttcatgaatcaccaggattgtgctgtgggcttgctgtttgctctcctgccagttcttggtggcacatctggtgtccttcaaggagtgttgtccatggcgaaatcgtatgtatttttctcttccacgaatttctatgaaactatcgacaataccctgcttccattgttcacttgttacaataaaacctagtttttggttacactttctttttgactgggttttaatatctttccaggttggctattttgattgcgtttttgggagctttgtttgtattatcccgtacctgggtaccttggtttctaaaacttatgacaagcctttcttctcaggtatagacacatttcttacctgctccagttttggtctttaaattgtttatcaactcaagcgtttttcaatctttgacagactaatgagctctatcagttggccgctgtagcattttgtttacttgtcgcttgggttagtctgatccctttgttcttcttagctattggctgtttgcacatttgtgactctcgaattttcatttcttaaatccagtatcgttttggcttcttcagtgtagtgacaagctcggtctaagtctggagttgggttcctttgcggcaggagtgatgatctcaacaactgatctcgctcagcatactcttgaacaggcaagaagtcaagtttgactgtttcgaactagagggtctctacccatatattttggccactctcttattttgaaagtgtctttcttgcttatatactatcttggtttcctgatgaaatacgtttcctttctttggcacattctaccaaagtttttcatataaacctgttctgatcgcttctgtttccttgcaggtggaacccatccgcaatttttttgcagcactgttccttgctagtatcggcatgttgatacatatgcacttcttgtggaaccatgttgacattctgctagcagctgtgttactggtgatagtgataaagacggtggtagttgctatcgttgttaaagtctttggatacaataacaaaactgcagtacttgtaagaagcgaacccttttttttttccttctttctcatcattcgaaagaagccttaaggttttcttgtctgtaggttggtatgtcccttgcacagattggggaatttgcttttgttctgctaagtcgagcatctaatcttcacctaattgaggtaagctctctatgattattgatgcttagttatattatatgttagcatatatctttgaaaccgtgtgtgaccataatagatttctcataatttgcttttggtggagcgataagtaacaatgaaggggttttgtgtttatttgcagagcaaattgtacctcctgcttctgggaacaactgctttaagcctggtatggtctatttcctcatcatatttataataagttcatattcaaaaacgaataaacgaatattgacacggacgttgctttatcaatgaataacagtagaatttacatactccagtatcaatattgtataattactaaacaaattaaatgatgtaacaggtaacaacaccattgctattcaagttgataccagcagttgtacatttaggagtgctcttacggtggttctctcccgacagctcaaccgaggtaaatacaaatcatcgtcgtgtgtgtctctctcaatgactttggctcaaactcaactatgaactataatcttcatctgtacagattggtttcaaaggagagttgtatcactcagagagtgcaaagcgtatatcactgatgatccaaggttctcttcacgactcttgaagtgttgatggtatgttcacagcataacacgcaacatgaagccacatttggtctcaaggtaggcaaaggcaatgaatgggagcttccgaatgtatagatgctttgagatatcagaagagaacccccagaggaacctgtataaaatctctctacacgaagataattacagagacttgtaacttcacttcaattttttgttttgggattcttttttgagtaaaaaggtaggaagaggttatattttagtttgtttactttcttctcatgtgctctgaaacaaaataagaaacatctccaacgtattgtagtgattaccaaccgataaaaagctaaagaatttttgagttagtcgattacaaagtataaacacaaatttgaattgatacaccaaagatttctttaacatttcgtgggaggccgagtattatttggctttagcttcgaaccaagactctctggagatagaagctctggctaaatacatgacggactgagaggactacgggggctatcttaatttccttttatatgaatttttctatgttaatttaactttttagatattgatttccattgtaattaaaacgctgtttgtcctaattttattttatatatatattgtataggttccattaaccctacgatcaaaacagtttcatacaaactcgcctcatcttgttctctaagatcaacgtgtctgatcaagcttgatctgcttctcttttttttttgtttttgtaattattcttgcttgattcgatcaacgtgtctgagctttgattcaagtgggggtttggaggtatgtgagcgtcaaatcttcaagttttaattctggaattaggtttctcttagtgggttttttttttgtatcatccgagtgttgttgtttgaatataaatataaatccaaccactagaacatgttttacttactttggttttgttttacctccagatatataccgccatcgcc

SEQ ID NO: 12852 - DNA, 3000 bp, Unknown
  misc_feature (1)..( 3000): cDNA_ID_3026705_gDNA_ID_2214575_Annot_ID_135172 3000 nt of promoter + ATG
aaggagacgagagagcaagattgacatttctgatgcgccgatgaagctaacaaacggaaacaatggtcgcagtaaggagaaacagaggaggagagaaatggaaaagcagagtagagaaggagaggagactctctgaggataacttgtccagcacgaagagactgtgccgccaccaaactccttcctcttccaccgatttctgcaaccctaagcagcgtctccggtttagctccgccgtcatttatcataatggccgtcgtcgattagggttttctacaaaactaaaactatttatatggaagaaacatgagaaacgctaaaacggtaacgtttcatcacgtttgaactttaaactcgttaggttatttggttgggccttatacaagcttggaaactttgggctatacgggctttctctcagtccatgtttttaccattgtgattaacttttttttggcttttacttgcctttgttttaccgcattggtttcttcttctacaaggagtctctctctcttagggtttatttatttcggccatgaaaacgtctctgcgcttagaggatggaactaaaaactccttgcagatcccaattgatctcattatcgagatattcttgaggttgtcggtgaattctatagcgagatgtcgttgcgtatcgaagcaatgggcctccacacttagccgtccatatttcaccgagttgttcttgactagatctttggctcgcccgaagctattgttcgcctacagaaaaggtagcgattatttatttttatcgtcacctcagcttcaaaatcctgatgatgatcataagaagtcgtctcctgtagtcgtcaattatcatatgcatcatattttgaccttaggaagtggaaacatgtcatggagaacgatccaatgttgcataccacatcgttctttcgatggagggatatgcattgatggtcttatatattattatgctggggtcaacaacaatgatattgtgatagtttgctttgacgtcaggtctgaggagtttagatttattatcggagcactgcatcatggatctctcataaactacaatgggaaactaagtttgtatctgccgtcaacagtttattcccgttttaatggagtaataagaagtattaaattgtgggttcttgaagatgccaaaaggcaagaatggtctgagcatacatacatattgcctgcaatgcatgatataatgaaaaccacagatttacgttgtgttggaatgactcagacaaaggaatttgtcttctggtcgataaaaggtatgcgtttctacgttttctactacaatatcgaaagaaacacaatcaaaaaggttgaaatgcaaggaatggaagcatttaaagagagtaatgtttacacctttctggatcatgtagaggatgtgaagctaatgcaattcttttaattaggactttttaagttgacacctagctctttgtaatagaactagtttggatcttggttctcatctattcctctctgatcttagaacaatatttataatgctggattgactttcttatgacatttttgttttcagaaactcaaaaaaagaaaactgagtcccaaaataatatcacctcgtcggactgagtttcttatgagtattaaaatgtgggttctagaagatgatgaatctcataagaaaactcagtttggatcatgattcatcatcctcgttggactgagtttttttatgagatttttgttttgtttgaaaaaatatattgagaaactattaaatcgttaaagatttcaagttcaagagaattgtatgaaagaaagaatgtgattgattgatcctaataaaaaacagtatgttctatttttttttagtatgatatcaaaattttcttgattaactattaatgatataatataaaaatcgtcaaaaagcataaaaatggtaaaagttattaatctaacataaaatttacttggaaacaatacaatttgtttcttcttagccataaaattgacaaaacgatataatataccgtaaaatctctataaattaataatattgggactgcaaaatttattaatttagagaggttttaatttatcgataaattaatattcattattttatagagagattttcctaatttaataacttttaaaaaatttctataaattttttttcattatagaaaatattgttctaaaatcaataataagtaaaaatcatatcatatttagaaaacaacatcaaatgtttttgatacagtataatattaaaactaaattttaaataaaaataaatacaaatttatggaaaaaaatattagaaatatatttcaaagaaatttcttacatataaaatatatatataattgatacatttatgtaattattaattaatgatattgatggaaccatatatttacatagaactttcaaaaaaattattatcttattatttatcgatttgtgttaatttttatattggtttggtcccaaatattaatttataaaaattattaatttattaagtattaatttatagaagttatactgtaacttataaaaactacgaagatccgcaagtgaccaatcaaaacttcagctaccaaattagtagagataaaataaaatgaattatagtatgaataaaatgagaaaatgattacagaaacggcgccgtttaaagatcggtgcaaatcaaattgaagaagactcatcggcgtcggtgggaatgatttgattaaccgctggacaattaaacgcaacgcggctttgcttataagactcagacatcgagacagagagagagagagagataagtagtagtggtccattccatcgaagaagaagacaaagtgaaacccaaaagagccgttgaagcgtacaatctaaggcagtacccacaataaagcttaagactttattattgttgctatctctttcaatttcagtttcaagatagaaagagcaagaaaggcgcagtctttgggggtttctcgggtcatg

SEQ ID NO: 12853 - DNA, 3000 bp, Unknown
  misc_feature (1)..( 3000): cDNA_ID_2709783_gDNA_ID_2214576_Annot_ID_135176 3000 nt of promoter + ATG
ctaatatttattagtcaataaaaaaattcaacagtcattatggagaaattttttaaaagtaacttataattgacaaatattgattttttattattttatttttaaaattccttagttttttaatttgagtcattttacaaccaccacttttaaaaataaataagaaacccctatgcttattaaaatttatgtagtctagtactcttatttgtttaaaaatatatatatacaattagcatcaaaaacaattggaaaattatagtaaaaattattggtttaaagtggttaataaaaattttgatatcttatggatatattatctaatcatttgattgacctatatatgattgcatttgatatcttactacattggctatatatcttttcaaaatttgctaaaatctattaggaaaattgtcattggaactgatatttacatggtgtatatatgaaatggttgatttgttaacaagccaaaattaagagttagatttaaaaagtaaacgaattgattggaccaaattaagggacttattctgtgattttttttcattttcttttgttctcacacttggaggttaaactggtaaatactaaaataactaattattttattattattttaaagtaatttaatttataaatggtaattaagtctaacaccttttgtccagttatacaattagtcaataatttactttctttgaaagtaattaattaaagtagttaatgattttgcaaaactgcctaaataacacctaaatttattcttaacccatctatgtatatgtttactatgtatgtatatatatttatatatatatatatatatatatatatggccctctacttcatacttagaagcaagaagctcatagaaatttacttcaaaaattgacctcaaacgacaagctaaaagaggtgaagttctttttcctatcttttattttaaatatggctctgtttatatatctatatttatatattacttactgttgatttgaaagaaattttctattcgaatatgtatgtgagaggaaaggatatggttcaagtgtcattgttatcgggaatggcaaattatattcctttcctcaaaaaatttagcataacaaaactaattatccatcatataaaaacaatcacatcgtatttgttttctattgtcttatgctaaacaagttttatatataactcatgctcacgttaacgaagacccatacaaaaatgggttgattttcttgatctccttcattggagaacatgactgattttcaatagtcactaaagtatatacatagatatatactatatagttgtttttgatattttaaatggataaaaaaaaagatgacgggatctatcatttgggaaattattcatagatttatttaaatagttcctaactaattgcttgaatatgggaagagacgacgaaatatagttaaaaaattggagtatcctttttggtttttactttaccatatacatgaaaaatatatacaatcattcttctttttgtcttcttttatctttggaatatttcttttcacattcaatcttccatgacacacagacagacatatatatatgtgtgtatgtatgatatgataggaactttttaaaaccaaaaaagagagacccatatgagatgatgatgacgattgagacaaataattattttgacaatttaagaaaaacataagatgctttgtggattaacttttgaaaattcaagaaatctgtccctatatatatgaaaacattagctttagaatacaattttatgagatttatttagtttatagtttatagttttaaatttatatttatgtgttattaaaattgtaaaattatatgaaaacatagtcgcttagttttacaaccgctaatttatttcaaactcaaaatattatatttttattccttcttcggttacgtatttttcttatgagatattatatggtcaaacatttaaaattagttaaatgttacatacacacaaattccaacattttcatttctttttaaggaaaaaaccatttcatttctttaagatatataaaaccaaaaaaattatgtttttatatagcttagatcgtgatgctaaacttttcttgtaagagcaatctcgtatagatattttatgttagtgtcaaatatcttcttctacaatttctaaagtcatattacactatggtaattgttttctaaacccttttagatccaaaaaaaaaaaaacttgaaatttattattcacatatgttagcgagagagaggagctgttgagggttgtctcacgcaccatccactgtcgttttgtggcaaatggattgggtccaccgacctctgtagctctcatagtttcttttttttctaaaattaattacatatttagaaaaaatgatatcaaaaataattaatagctctgtatatgtgttagtgtctacaggcgacaccaaaattatataaatattcttatttaaatgcgttacaaacaaaagaaaaattatataaaattttacaaataaatgtatagagtttttagtatcatatgtatcatacatatgaaattagagctataccaaactaaccaagctagatttaaattcagtttgattatcttaccctatttttttaaccgaatatgaacttttaacactctaggctataacattgggtggtgacttatatttcttctttctttttactagcctacactctttttcacctgtcactttcaacttctctcttctattacctcacaagaatttctatgtttttttaataattttatatctatttaaaaaaagtataaccaattaattaaaaatctggaatatcccaattttagggctttattgagataagatatcagtggaagtcaaaaaagaatttaatgttaaagagtttcttctctctaatttcatttcatttctctttttttttttctttttcttctttctctctctcaccatcacatagaacacagaagaatcc

SEQ ID NO: 12854 - DNA, 3000 bp, Unknown
  misc_feature (1)..( 3000): cDNA_ID_2709787_gDNA_ID_2214576_Annot_ID_135177 3000 nt of promoter + ATG
aagactcaatcgacggcgttggattcgtcgccgcgcgagtcttcttcggagtccgtggtcgtttaagaactcgcgaagcgttaaacgagtgttgagaccactcttcctcggagatttcgtcgaaatcgcgtttcatcttccgagaatttacgaatcccagattgaattgaaattgagaagaaggggaaaaaaaattcacatgaagaaaattgaaaaccctagattgagattgaagtgactattattgcatcgaattgaagaagaagaagaagatgaaattaaaacgaatttagcggagaaggaagggaaaggtcaagatttcaaagaaaggttagagactcaacaacgtgttgcttcttacaaaagagcggcatcctccaaaagctatgcgcgcggacttaatctcttaatgggccccaagaaatgggctctaatgagtacttaatggtgaacttaagggatccgaagaaatgggcccaacgacttcactttctcgacaaatctaaaagcttgtggtttgtttgacgcacttgaaaagggtttttaaatccatggggtttgcttgaagatttggttttgaaatgatggttgaggtgagaaattatttggttgacatgtattcataatgtggaagaatctgagagtgtgtttcgttggatggtggatactggataggagtcttataagctggatatgtacattgaggggtatggtaatagagctttggctacgtttggaatgttgcggtaaagataacctcgtcgttctcgatcttaatcctcattctacaggttattatcatttgtatatatatgtttactagctaatccattaactctgaaaattaatattaactctcggaatggcagaaacagagttgttattgagtttctctgaccttgccatcttggtgacggcagtttcaaatactaaatatttccatacaattttggttcatctaaaacaactgggtcttgggctgtttgtggtatatctctccttatataggctcttttgtgtgcgtgactgtgtgctatttcatattactaacttgaaatcatattacaacccaatcagggaggccctgattgaatatggcccggcactgacccattgcagttggtacgatctcagtataacttaaaaagcatcgatggtaatgaagagaggatcaagttgagaagtcacctgttacttaaatatgttgtcgtttgtaaactaaaataaaactaaattgtataagattaaaaagcccaagtgaaaaggagaaaatcaaactttacggtcgaataataatatatcaataatattttctcaaagctcttaaagtgatattggagattttgtgatatatcgttttaaaatctattcagatcggttgagagttggttactcgttcaggattaattaggtttgattcaaaaccaatcggttcgattgttttgcattgaacattctgaaaggttgaagaattgaaccaaagaagaaaagcaatatattaattttcatacaagaatctaacaaattttaaaaaattctctattgattggtgtatcatgtgtattaatatacgatatgttatattataaacgattttattagataaaaacaattaaaaaaaagttagtacaacaaaacctaatcaagttaaatgaagagaaaacgagggttttgtcttaaagctcaccagaaagatacgaatgagaaaaatgtggtacccacaacacacccccgcatgtggacacatttcaccgttttaacagtgacacccaaaccgtaaccatccttcttaattctgtcaaattaaattataagaaagaaaaaaagtagctttattttatattaatcgaaataaaataaaatgatagagacagagaggggaccttagagacatacttttcaagatcatttcatatatggcttatttttaaaagaagaagaacacaaaacagtagagagagaaagagatatagagatagagagagatagggctttgaggtttgtgtttgtattataatacataatatataggaatagtgtcttcttcttcatcatcatcttctatctcatcatcatcatcatgcatcatcttcttcttggttctttctttagctccgatttatagcttttaattttgactattttttttccttcttctacttggtttctttctcttgatctcaggtacaagaaaaatacaacttagaaatctttcctcttaattctttcaaaagtttaggaacaaaaaacaaaagtataaactcttaatttgtttttctttgtttatgtcttctagtgaaatggtttttataaaatttcttcatgtcgtcaatctctatggatttttcctgttcttataattcctcccttcgttttcttcttaacttttttgtcttacgaattatttgtagattattctcttccacgcaaagaagaagatctaaagatgtcgtcatcatcatataacacaagcgttattccttcatcatcatcctctgctcagcctttcttcatcaccagctccggcaccggagataacgactttaaccggaaagatacttttatgtcaatgattcaacaacctaactcctcagctccaccacccaagaaacgaagaaaccaacccggaaacccaagcaagtatctcttacatataaatctctatatatttatcacctttctataagaatcactatatataagctttaagataataccaagaagaaaaagaaccctaatcatttgttctattttgttttgtatatctagctagtatcaagatttcatatatattgacaggccagtatatcttatatgtttatacgtgtatatgtcatttgatttatgtttacatgtgtgtgtatcatttttttcgatatagtctacatagattgacattttgggtctaattggtgacttaatttaaatgattaaattctttaattatatgaaacagatcctgatgcggaagtggtagcattatctccaaagacactaatg

SEQ ID NO: 12855 - DNA, 3000 bp, Unknown
  misc_feature (1)..( 3000): cDNA_ID_2709791_gDNA_ID_2214576_Annot_ID_135178 3000 nt of promoter + ATG
acactttcctcttcacttctttggttgatttttgtttcagcttccatgggagattgtgtcctcttcggtgaagctgtagattttgttctctttgaaaccctttgttacatacatcgcatatgaatctgtttgtagccattagtgtctttggagataatgctaccacttccgcatcaggatctgtttcatataattaaagaatttaatcatttaaattaagtcaccaattagacccaaaatgtcaatctatgtagactatatcgaaaaaaatgatacacacacatgtaaacataaatcaaatgacatatacacgtataaacatataagatatactggcctgtcaatatatatgaaatcttgatactagctagatatacaaaacaaaatagaacaaatgattagggttctttttcttcttggtattatcttaaagcttatatatagtgattcttatagaaaggtgataaatatatagagatttatatgtaagagatacttgcttgggtttccgggttggtttcttcgtttcttgggtggtggagctgaggagttaggttgttgaatcattgacataaaagtatctttccggttaaagtcgttatctccggtgccggagctggtgatgaagaaaggctgagcagaggatgatgatgaaggaataacgcttgtgttatatgatgatgacgacatctttagatcttcttctttgcgtggaagagaataatctacaaataattcgtaagacaaaaaagttaagaagaaaacgaagggaggaattataagaacaggaaaaatccatagagattgacgacatgaagaaattttataaaaaccatttcactagaagacataaacaaagaaaaacaaattaagagtttatacttttgttttttgttcctaaacttttgaaagaattaagaggaaagatttctaagttgtatttttcttgtacctgagatcaagagaaagaaaccaagtagaagaaggaaaaaaaatagtcaaaattaaaagctataaatcggagctaaagaaagaaccaagaagaagatgatgcatgatgatgatgatgagatagaagatgatgatgaagaagaagacactattcctatatattatgtattataatacaaacacaaacctcaaagccctatctctctctatctctatatctctttctctctctactgttttgtgttcttcttcttttaaaaataagccatatatgaaatgatcttgaaaagtatgtctctaaggtcccctctctgtctctatcattttattttatttcgattaatataaaataaagctactttttttctttcttataatttaatttgacagaattaagaaggatggttacggtttgggtgtcactgttaaaacggtgaaatgtgtccacatgcgggggtgtgttgtgggtaccacatttttctcattcgtatctttctggtgagctttaagacaaaaccctcgttttctcttcatttaacttgattaggttttgttgtactaacttttttttaattgtttttatctaataaaatcgtttataatataacatatcgtatattaatacacatgatacaccaatcaatagagaattttttaaaatttgttagattcttgtatgaaaattaatatattgcttttcttctttggttcaattcttcaacctttcagaatgttcaatgcaaaacaatcgaaccgattggttttgaatcaaacctaattaatcctgaacgagtaaccaactctcaaccgatctgaatagattttaaaacgatatatcacaaaatctccaatatcactttaagagctttgagaaaatattattgatatattattattcgaccgtaaagtttgattttctccttttcacttgggctttttaatcttatacaatttagttttattttagtttacaaacgacaacatatttaagtaacaggtgacttctcaacttgatcctctcttcattaccatcgatgctttttaagttatactgagatcgtaccaactgcaatgggtcagtgccgggccatattcaatcagggcctccctgattgggttgtaatatgatttcaagttagtaatatgaaatagcacacagtcacgcacacaaaagagcctatataaggagagatataccacaaacagcccaagacccagttgttttagatgaaccaaaattgtatggaaatatttagtatttgaaactgccgtcaccaagatggcaaggtcagagaaactcaataacaactctgtttctgccattccgagagttaatattaattttcagagttaatggattagctagtaaacatatatatacaaatgataataacctgtagaatgaggattaagatcgagaacgacgaggttatctttaccgcaacattccaaacgtagccaaagctctattaccatacccctcaatgtacatatccagcttataagactcctatccagtatccaccatccaacgaaacacactctcagattcttccacattatgaatacatgtcaaccaaataatttctcacctcaaccatcatttcaaaaccaaatcttcaagcaaaccccatggatttaaaaacccttttcaagtgcgtcaaacaaaccacaagcttttagatttgtcgagaaagtgaagtcgttgggcccatttcttcggatcccttaagttcaccattaagtactcattagagcccatttcttggggcccattaagagattaagtccgcgcgcatagcttttggaggatgccgctcttttgtaagaagcaacacgttgttgagtctctaacctttctttgaaatcttgacctttcccttccttctccgctaaattcgttttaatttcatcttcttcttcttcttcaattcgatgcaataatagtcacttcaatctcaatctagggttttcaattttcttcatgtgaattttttttccccttcttctcaatttcaattcaatctgggattcgtaaattctcggaag

SEQ ID NO: 12856 - DNA, 3000 bp, Unknown
  misc_feature (1)..( 3000): cDNA_ID_1009528_gDNA_ID_2214576_Annot_ID_135179 3000 nt of promoter + ATG
gcacaattaagtacacgatattaatcttctagctgcaaatctcattaatttcccatcaatccaatgcaggttgaatatgtattaatggagagaaagcaggaagatgcatataaagaagccatagaggagtatcgtgctgcttctcaagcacggcttgtgaagctttcatcaaaatccttgaattctttagccaaggcacttccaaagcgtcaaatttcaaactattttactcaattccggaaggtaattctcagctactaatacaaagccccttttgtgccaaatgagtgtgttattcatgtgttattaaattttggttgtacagattgcaaaccatccattgttaattaggcggatatacagcgatgaggatgtcattcgcatcgccaggaaattgcacccaatcggtgcatttggatttgaatgttccttggatagagttatcgaggaagttaagggtttcaacgatttccgtatccaccaggtaaatgtttctctttccaaaagcagttgaatatccattaacaaacatgttatgcaattgaagaagctaactaacttgtttctttccatagcttttgttccaatatggagttaacgataccaaaggaactctctcagacaaacatgtcatgctctcagcaaaatgtcgggtacgtgatattcttcttcatttcataagtcttctttgtgaaactgattaagtataactaaacctgtgagcgatctaaatctccctttatgtatcagacattagctgagcttctcccttcaatgaagaaatccggccatcgtgttctaatatttagtcaatggacatcgatgctcgatatcttagaatggacacttgatgtcatcggcgttacataccgaagacttgacggcaggtaataaaagaaaaaagagtaatttgtcacatttttgacgattctacaaaaaggaagaagcttaagtcattttccttttgttttcaacagtactcaagttacagatagacaaaccatagtcgacacattcaacaacgataagtcgatattcgcatgtctcttgtcaactcgagcaggtggacaaggtcttaatttaaccggagcggatacagtcattattcacgatatggattttaatccacagattgatcggcaagctgaagatcgttgccatcgtattggtcaaacaaaaccagtcactatcttcaggtttgagctttaaatccttgaatcagtttagataactttcagaacaaaattgtggtttggattggtttatgtgtgctctgttttgtattctcacatatatctgtattaactctggcaatgctggtgcagactggtgacgaaatcgacggttgatgagaacatctacgagatagcgaagcggaaactagttcttgatgcggcggttctagagtccggagttcacgtagatgacaacggagacacgcctgagaaaaccatgggagagattcttgcttctcttctcatgggataacattattgttaccttttttgttttgaggtaaaattagtcaagaaacgaagttaatgtgttattctaaacatgtgtaaccactagctattattagacttaaatttaatagatcacgatagttatattttcttctacgcatgtaaattataacccaaaaatttccttctttagacctaaaagtcacaattgttccaaacactaaaatgtggatcagtgatcaaatgaagtgaaccttcaggatagtttagtcttcgatcatcaaagattgtataaaggagtgacttagctgtatttgtaggtatcaaaattgaaaacctcacgcaatgattaaaggtctcaagtatctttattcgtcagagttgtataagacacaaatctcactagattgttttcccattgtctttgccgaaacctaacaatgaacaactagttctattaggattggttcaagaatgtcacatagtataagtttttcttagctgaaaaattctagataacttggaataaattctagatagtcttttttttttgctacatttgaagataaatatctatgaaaatgttcaaattcatgattatattattgcgattaaataattgaatatgactatacaaaataattcactagtaaatcaaagccatactaagtttggattctttgtggtaactgccattgccaagtcacgttttgaaggtgttctcatggtcaatttacacttaaaattgaacctgaaaactaaggccaaccggaaacttgttgaattgtgtgaagtgagaaaatgataatcgtgtataacttataaagtcacatgataaagagaaagcaaccagctttttgtctgccataacagttctttaaaatatagccacaattatactacttaatttagagtaactaatcccaaatattacttatctaagtaataattagaaaagtattcgatatttattatcaattgcgttttaacttgctatataaatacaaagtttaatttttatataacccactaactttttcattttggtatatgataaaaatactctatcccgtgactattccacttgttgttactttttagttttttttttacatagccattatcattgtggactccacaacatccgcaaactcaattatttacttttctatacgtttatttgtttttttctgatacaaaatttggtgcatgaatgacttctcgaaacggtagatggactccacaacatctgcgtgtcttgtcaccttacgttacggaccacaatttacacctatgaaagtgtcggtaaagcaaataaaatcgagaaactcacaccactcttattcaaatccaaagtgaatactccaaaaataaagtaaatgatatttatccaaaaatatctaacaaacgcgtaaaatgtgaattatcttgaacgttttaatacctctttactctctttatatagtgccattttcctcactagcagcaacacacttgaacactactttcgaactctctctttatctctcttgca

SEQ ID NO: 12857 - DNA, 3000 bp, Unknown
  misc_feature (1)..( 3000): cDNA_ID_2712696_gDNA_ID_2214576_Annot_ID_135180 3000 nt of promoter + ATG
tctattagcttttacagaggcctgaaaaaacttagagttcttatccccacgagacatccatttatccctgcttttcaacctccaaaaagattcctcctctctaaaagcaatacccagctgattttgaataacagaaatcttattccaacaaggaaactggtaactcttttcttcatccaaatcaaatcttaactttttaattcgactctttgcgttataatcctttccttttttccagtgactaatagatgacctacagtcaaccagacggcgcatagaagaaggattatgagaagaaaaattacctatccatgctttgtgaatagcagcttggtataaagggtcttcagcataccttttatcaaacctgaaagttcctcggaaaagctcatgatcattaacaaacttcaccaaaaccggtctgtgatctgatccaagtttctccaaaaaccattgatgagaattaggaaacaaagaaaaccactgtgaatttccaaaacagcgatctaatttacattggatccattcttcatttcttttgcctccccaagtaaaactatttccagtgccccccaattcatgcatatcactggttgatatcatattcttgaagtcctgaaaggaagattccactctagatgggccacctattttctccttattagacaaaatatcattaaaatcccctatcaagcaccaaggagctgttctgttcactccaatgttactgattttatccaggagcaagtgtcttagcctctgtcttggattatcataaacacaagagataaaccatctcttacaaccttgagatatctccaaatccagcaagtttttgtcttcaacaaggaaatctgtatgaaggtgatgtttccaaaatattgctaaaccaccactctttccatccggttcaatagtatgaaagtaatcataacccaaccacctaaagactttcaatatgaacatgtcagaattcatggtctccatgaggaacaaaatgtcagggaaatatttctttttcatttccctcaagtgtcgaattgtccaagaattcctcagtccttggcaattccaactaaggatgccttattgatactgcggtggttcttgaggaaccaccgtaatgacagccttttccatacaatccactctttccaagtctgcaatttccttttttcgtttgatagcattagcaaactcaacattaagactaacctctttttcttttgaaccatcacgagctgcttgcttattgtgaactatagaagcctttctttttcttggattcttctgcttaatacttaatcctgatgcccccgattcattaaatccaaaagggaacccttccgaatctattgaagatgcttgatcagcggataaagaaggtaacttggtaggaacaatcttctctcctggattcactaaacaactctttccatcaagaaatcctgaatcagaaaaactaagatctttctttgattctttagagtttccgaggctaacaaaggggcaaacacttttctcatgtgtgagtcgttgacagaggaaacatctttttcgaatcctttcataatcaaaggaaactgaaatcaattcacccgatggaatcaggacttccttaaagttacgcaagggattccgaacatcaaagagcacttgaaccctgatataattttgtgcctgagatttttctaaatctaattccacagtcaatactttcccaacacatcctgcaatttctttgatagtatcttctgtgtagtagttgatcggaatatttcggagtcttatccagactggaagaaacaaaagagaatcatctgaaggtttttccacccaacgctccatcaaaacacaccactcatcctgagtccaaactccagattttaagatttcaattaaatcttcttctgatttgaaaaagaattgaaatctctcttgggataaagcaacacctcttacccttgaatacaacctccaaattctaggcatgtctaatatccaattagacatcctttggagtgacagattcaaaaacctatccactaaactgcaattatttctgtcaatcgagcaaaactgcgcttgattagacaaaataagaggctatcttcgttaattgacatttcctttatcgcttgatccaagtccatgttcatctccactgatagaagaagaaagcactttcctgatacctaaacttggtgaatatatctttgccgacagaaaacggggatatcttcggtacttacctcctctcaaatatcaaaaaactgatgtagagggagaagttcttatggtcaaatcgattgggacggctttattaacggcgaaggagaaattttccagaaaagctactatgaaagagaacagagagtttttttttttttttttaagtactattggagactaattattcatagtagttaccatttaaacacgtaatgttttcatttagatacgataaaaaaagttaacaaaactctagtgtccttgactacacttttcttacttttgacgtggtcactattattgtggactccccaatatctgactaactcaaattttacctttcttcatacgttttttttatctgtttgttaattaattccagaatgagttgtcaaaccagtaggatttctctgcatgtcgtgtcacttgcattttaaggacagattaacggttatgactagggtcggtaaagcaaataaatcgacaaaattagaaaacaaagaaaatgtggaaaaagcagtcaaaagaagaaaaatgttgacaaatgttacgaatttggtttaaatcaaaagtgaattatccgagaaagatgatatttacccccaaaatatctaaacaaatacttaaaaatgcaattctctaatagactatcaaatatcccgatacctctttatatagtgccatcttcatccttagtaatgtacacacacacacataacacttatttccaactctgtctctctcaattttctttctctttctccaaac

SEQ ID NO: 12858 - DNA, 3000 bp, Unknown
  misc_feature (1)..( 3000): cDNA_ID_4262185_gDNA_ID_2214576_Annot_ID_135182 3000 nt of promoter + ATG
atagaaggtagttttggtaagctactggtaatagttttcgtattaatttatactatatatctcgtgtttgtgtaattagaaaacaaacgtatatactgaaacctagacttatccatcacacatatagaaagtcaaatattctatgatgattcttgtgaatgcatgtatgcaacatacacaaatacactcatataaacatgtcttgtttttttgccttgtacgatattctatatggtttatataattctttagggggttcggtcacggtggaggcaaggatttgcaaatcgaggagccaaaagttcaagggaccgtgcgtgagtgaagacaactgtgccaacgtttgccacaccgaaggttttcccgatggtgattgcgacggactcctccggcgttgctactgcaacacacattgctgattctcattacatatatcaaattaaatcaactatatagtaaactaactctatatatttacatgtttattttcttcgatcttattgacgtacactttactttaaattcggttcatgcaacttatgtgaggaaaaaaatcctactatattatttgggaagtacattttaaatataaccttaatttttgtaagaaattacataggtatgccattagaaataaaattttaaagagtaaattaatttatctctttaaggattaaaaaatcaattactaatttaattaattaaatttaattaaaaaacgaaatacattattaattttcaaaaataataaccaatcaaaataaacatataagatttgatatctaaatttttattaatttaatttaattagaaaaacgaaatacattattaatttccaaaagagtaacctattaaaatcaacaaattagatttgatatctaaattatcatattaattttttattaatcattatagttcacttcttatctttatatgattctatttttgcaaaaaataatatcatcattataaaaaataattagagttttttcgcatatctcataatttaaatttttgaaaattgtgaatataaactgttcaatacatgaaaaatattataacgggtgaaaaatagatttaagaaaactttctactgagtaaggggtcatatttgaaatatttatattcaatttcatacatattatattgaaaatttataatcttatatactacaataattaataacatattagattattttatgtgtatgatatgattcaatttttaatacaagatagaaaatcctagaattgacgggtttagatcgatattaatacaagatggtatactacaggtgaaactcttaaattaacaatcaaactacaagtgtataatcttaaacactaaacaatatagataatatcaacaaaacatatacaactcacagtttacttttaatattttatatacaaaatcaattaaatcttaattaaatcttaatcacataaaaattagcacaaaaaaaaaaattcaacaattaaattttttatcaaatctctgtgttatataagttttgatactatattcgaataaagtgtaatataccttttcaatttgtattctttaactaattcaagctaactaatatatttgctaatcttatacctatcaaaaccgactatcgtttcttatctctatagtatttttgcaagacttttttggtggattggggtaaaaatgcattcgggtcatatggtatattcccctattaaataaaaatggtatactcctatgttattagctaaaatgtttagattataattcagagtcatatcattaataaaattaatattaataaaataaatggctttttggcaagacggatttggagtgacgggtttttgaatcaacattaataaaaaagtaaaatataattaatacaccgtttcaatacgggttaaatctttaatttattattttttaagaccactaatattaaacatatcaaatcatcctaatttagaaaagattatataaaaccaaaaatgttatgtggtatgtataatgttactatatataaaatataaatgtattagagaatgatataatttgcaaaacttttatctataaaaaataattcttaaattttaaaaattactactttaaaaaaagaaatcacgggaggggtaaagaaattatagaacgggttttattttggaattgggttatatggtggatgtatttgaatcaatatttataaaattttaaaatattattaatatgctgttttaatagaggttacaacttcgttttttaacaattgtctcatagattcgtggtatagccttacttaataacaattataaagtgtaaaatataaatattttataaaaataaaatttgcaaattttaatatatattacttttaaaaaataaatcgtcctgcggtataccgcgggttaaaatctagttatcatatatagtcgtaatttgtaaacaaattaacaaccaagaaaaagtttattaaagcaaattaacaattactaaacaaagtagtaattaaacacatcctgatttttttaaaaagtatttggagggtcgaatttaataattaatcaggatttcattatgtagcttaattaagatttaagggtgcaaatttaccataaacgtgtaaaatttattattcatctcttgtcattaagtaagatgtataaagaagagaaaaattagaaaagttttattcgttgatcaagacgattatgcattcttctttgttataagttttttccttgttctttaggattaaatactaatttgattatttaattgattggtcagcctttaattacgactgcatctatatgggtaaaggttttaactggttcacgttttgtttctattttttgtaaggccataaattatttatattaatttgtaaaaacaaaaccaaacattttaccaacaaaagaattcatcccctttatatagtgtcatcttcttgatcttcttaactaccattagctttctctaaacatttgtatcttaatctctttaaaa

SEQ ID NO: 12859 - DNA, 3000 bp, Unknown
  misc_feature (1)..( 3000): cDNA_ID_3026758_gDNA_ID_2214576_Annot_ID_186355 3000 nt of promoter + ATG
aaaacgttaggaataaattggctgctgacatcttcaccgaattagggtcagtcactttgtagaagtagcagacttctaatcaaaaagtagtggagtataagatagatttatcagcttttgtttcttatttcataaaactttgtcatttgaatattttatgaacatctgtatggaacaagatttatgaagtttatttagttcaactcctgttttacaaaattactgtataatggttgtttgggttaacaggtgctttgatttgaatagaaaacgactttaaacatgcttttaaacagggtttttaaaaacatgcttttaaacagggtttttaaacacgatttacaagctgctttataaggattttaaaagtgttgaaaaagctgcaatagcggttattatgaaaaaaaattacaatcgtttttaaaataatttacaaccgtttttaaaagggagaaaatgtcaaataattgccgaactttcaaaaagtggccgtttaatacgtcaacttcgtctaaggccatattaaacatcaacttatcgttgaccaaacttttaaaacatggaatatcgttgaccaggcccattaagacatctcgtaaactctgttaacagacccactaacagacgtttagatccgttaatacttctctgttagtggcgaaacgaccacgttttggtcctaatcgaaaatcccatatctgataaatccccaaaatcgaacttgaaatccctaaacttgaaattcaattccaattcccagattttgtttattcttcttcttctacattgtttatacgggattggagcttcaaatcttcttatcttcggaattctccatcctgagctcaagaaatgagttcaaattccgcgaattcgaattcgagtattgaagacggaggtcgttggggacgtgggttaccttccaagtgtatttgttggttagacgtcgttgtctacacatcgggttcacagacaaaccctggaagacccttcttccgctgtccaacgaagaaagatgtaagtttaattgattttgtgttttgaatttggtttggttgataatttgttttggattgaaatgtaggatcatctgtttaaatgggtcgaaaatggtgtgtacgaagaggttgttgatgctttaccgaagttgtccaacattgacaatgagattaacattgccaaatctgaagttgcagccgaaattgatgagttataggctatgatcgtagtactgaaggaagaaggaatgtggagctcaagggaaatcaagaaatgcaaattgatgatcaaagtgtgtttggtgagtcttggtttgattgtcattgtctttggtttcataatgttcggtaaaaccaaaaatcagaaacttgttctaggttactagtggtgttggtatccaaatgtttttttttctatctttgatgttgttgtctacatggtactttattaatcaaaatgctgttcatgttattgtcttgatggctctttattaatcaaaatgttgttttatgttgttgtcttgaaagacaaatttttagtgcaaatcaaaaaatgtcatacaagaggcaaacatgtcatgctctttatcaaagtcaaagctgaaacaagcttaagttgatacaaccaaaaaagccgtgataatgccttagttttgacaccaaaaaaaacgatagtgttaacaacattaagaggaacactcaagccgtgataatgccttagttttgacaccaaaaaaaacgatagtgttaacaacattaagaggaacactcaagccgtgataatgccttagttttgacacaaaaaaaacccgatagtgttaacaacattaagaagaacactcaaaccatgatgctaatccagcaagtccttgtggttgtgctgggttgcctaaacccgatagtgttcaatcatcgtttttaaaatgatttacaaccgtttttaaaagagatttacaaacgatttataagctgttttaaaagcgttttaaaagtgttgaaaaagctgtagtaactgttattatgaaaagatttacaaccatttttaaaatgatttacaaccgtttttaaaagagaatatcaaccgttgaaaaagttacagtaatgttaaacactgtatctgttactaattgggcctaggcctgttatttagaaaaacaaactgttttagtaaaaaaacactaaaagcccaaaaaacactaaagcccaaaaattcactataacccaaaaacaaaaaaggaagggaaccgtgaaaagacaacaaaaaagtaaccaaaaaaaaaaaaaaaaaaagaataaatgtcgtcttcgtcttcttcctttcaacaatctgaagaaaatctgattatccagcaaaaaggaagcaattgaaggtaactaatttacgaaactgaagtttaacatttgggtttgtttgatttttgccgaatctcttttttgttctagcatttctaggtttttcggttgaaaacgaaacaagtaaaataaattgatatttgggattttgagggagtgttgaaaattgttatataattttgacagatttatgttttaaagtttgatatttgggtttcaaaaaccttcaaagaagatttcaaatgccgattaacttctctgttgtagcaatttcaaagttttttcgttttgaaactttaacagtaaatagattgatgtttgggtttgtattttaatttatagatcctcacttaatatatgggttaccagttgattggagttggtttggaaaagggctttttgtttctattttcagcggttgtgttctttgaaaatgattaaaattttgtttttggaatggtttcaaaacggtctttaaaaaggattatggggtaatgactgtgttttacaagggtttttaaagtcttaaaacgacttctaatgactttgaaaaatggttttacaagggtttttaaagttctttaaacgacttgtaatgactatgtttatgtttcgaaaacaacaaatgcataatagatttacaaaaatg

SEQ ID NO: 12860 - DNA, 3000 bp, Unknown
  misc_feature (1)..( 3000): cDNA_ID_3026770_gDNA_ID_2214576_Annot_ID_186352 3000 nt of promoter + ATG
tggtgaagaaagcaagacttggaatatcaagcaagatatgttgcagaatctacaaagataacactgcaaatttagaaggttgacacaataaacaagtcaataagattaaaattacaatgatggtgaatgatcctaaacctctggttgcataaactgaacatttcgcctgaagacaaacaccacagcacgaactaccagatacaagatgagccaaatcaatcaatcaatcaacatgaacacacgaaatcaaaatccgcagcaacactaacctccattaacaacgaaattgagaaagtgaaagaccttttgcgtcgtccaaccatattcaggaactctcaattgtattctcacaagttgaatctaaaccaaaatcaaacataagatgttacaccaatttcatcgaagaatcatcaatcaaatccagaaacgaaacgtaccacagcaacgagggaaacgattccgtagagaacagcgagaacatggaagatacgatcctgccaaatcggagattcgtttacgtctgaccaccaattcgaagcttctttgagattcaacatctccaccgccgacgaagacgacgacgacatcatctccgacgcaaatttcgtaacctcgacgccgccgattctcatctacacgagtcagattccttctcgattcagattttgaatatacataatgagaactctctggatttgaatcacctctttttatttctttctttttttgttattttcccgaaataaaaaaatttggaaaaaaaacgacaaaaatgaaaaagaaacggccgacgtcggaaacgagaaccggagatagccggtaattatcgtcgggagagtcaagtagttgttgaaagttgactgacacgctgctccacgtggcacatgtggataaagagcaaaccaaagctggcttgatccacacaaagagaattcaaatattatgcctaatcaagtgaagcaaagtaagctattatgattagagaatgacagttatggtaatttttacttttttaattgatctttcttacaatagatatcttcagggccaggcccaacatacaagagtcctcatatgagatcattttgtttttgcataaaaaatttttttggtttttatttttaaagtgagagaaataaaaaaacgtatacctacaaaaagcttcgacgatagaaatttattagctgatttgcagattaatggaagtaagtatgtaagagatttccaacgatgtacaattataactgcttgttaggattctacgcaaaaaaaattgttgaaaaaatgtccatcaaaagcatgaaaaaagaaaaggtggtggcggctgtcgtagatctaataacggttggaaggaattgttcgtagtataatcgactatataacagtttatataatttgtaataaataataaatcgacgataaaaaaaatataattaattcgagattaagaatttttggaggtttgggttttgctagtaatcccaaaaaattatatctacgaaacgtagaaattttccaaaaattctaaacatcagctatattcgcactcgatttaagtacaatccgtgattctcactttggagctgcaggcttgaatctttgaaaaatgagaattgttagaagataatactaattatgtaggaattaatcttcatgatgaatcaccgactaggcattcgtgtgttgctgtgttggattggggagtacaatagctgtcataatactatatgatcatcttcttggtcaaatggaaccatttttgtctttgaccgtcaaataggcatggccttacttatgggccttcaaagacagcatgagcatcctatggaggccaggccaccacttttttttcttcgtaatgataatatacttttttttgtgtgcctaattgtaaaatacttctatagtcctaattagaggtgtcgaaatgatatgttagctcatgagatgagtcaactcagcttggttttttatcagtatgaatgaaattcatttaatagatgagttatataatcaagtataatttagagtacaaattatatgaacgagttttaacgaacatgagttaatttatgaattagacattttaaaaaattaaaagaatatatatacatatataacatatataactaaatacactaatatatatttttttgttgccaaattgtaatatacttctatagttctaatcaagaaataatgtttagtgaaaaatatatataacctaaaatctagtaagtttctcaaaaaaaattgcatttttgatatcgaatttttatcactttaggtatcaacaaaaaaaattaatttgttgtaaaataatttaagtacaaattaagaagtgcaaaagcaaaacagaattaaattaagtaattaactaaaataagatgtgtttttttgggggtcaaaagttaagattttaatattttgaattaatacttttttggggggtcaagaattacaacaaactctagtctatatagagaactgaccaaataatataactatagtattatttgggtaaaatttcgattcaaatagcaagtcctgcgttataatcaacaacgaatttggatgtgaagaattatgtaagatttatgaactatagatcaagattattgaatgtcccttaacttcttctttttttggcagatggtacaacagttgcttaacttaaaggctccatcactgtgaatgtcccttattttgatgtcagcttaagaccaaaaaaaaaaaaaaccaaaaaaaagaaaagaaaagagagaagctttgagaaagaaagaaagaaagacacagtgtgtatcaatctctgtactttcacaagcttccaagctctcttatcattcactgtactcttcctttcaaataatgcttctgagttctgataacaccaacaatctactactactattatattttcttacacattttgcatcactctttttcaggatttttggttctcgagaaaaaagtgaagatttttgagattctctttcgatg

SEQ ID NO: 12861 - DNA, 3000 bp, Unknown; identical to SEQ ID NO: 12858
  misc_feature (1)..( 3000): cDNA_ID_4262185_gDNA_ID_2214576_Annot_ID_186350 3000 nt of promoter + ATG

SEQ ID NO: 12862 - DNA, 3000 bp, Unknown; identical to SEQ ID NO: 12857
  misc_feature (1)..( 3000): cDNA_ID_2712696_gDNA_ID_2214576_Annot_ID_186348 3000 nt of promoter + ATG

SEQ ID NO: 12863 - DNA, 3000 bp, Unknown; identical to SEQ ID NO: 12855
  misc_feature (1)..( 3000): cDNA_ID_2709791_gDNA_ID_2214576_Annot_ID_186344 3000 nt of promoter + ATG

SEQ ID NO: 12864 - DNA, 3000 bp, Unknown; identical to SEQ ID NO: 12853
  misc_feature (1)..( 3000): cDNA_ID_2709783_gDNA_ID_2214576_Annot_ID_186342 3000 nt of promoter + ATG

SEQ ID NO: 12865 - DNA, 3000 bp, Unknown
  misc_feature (1)..( 3000): cDNA_ID_1835727_gDNA_ID_2214576_Annot_ID_135184 3000 nt of promoter + ATG
gtcagcttaagaccaaaaaaaaaaaaaaccaaaaaaaagaaaagaaaagagagaagctttgagaaagaaagaaagaaagacacagtgtgtatcaatctctgtactttcacaagcttccaagctctcttatcattcactgtactcttcctttcaaataatgcttctgagttctgataacaccaacaatctactactactattatattttcttacacattttgcatcactctttttcaggatttttggttctcgagaaaaaagtgaagatttttgagattctctttcgatggattacgaacgaatcggaaagacccaggtgagaaaatgcttcggtttcacgtttaccgaaactgggttttgcgtaaaattagggatatcaaaagccagatttgtcaattttctgatttcttacttcaaagtacaaactttccttttgcaaatcacttcatcatcatctctgtttttgatttgataaactctgtttcctccgatgaataggttactagtagcggcggcggattttctccggggaagttaaggagtatgcttcttctaggtgttgatagaaagaagaatgaagaagaagaatcaactcctacaatgagatctgggtctaatcaaattgatgaccctagggtttatggtggagccccttaatcatttcttaatactctttttaataacgccttttgtctctatttgaatctaaagtttgcatctttttttctttgcttttgttgttttcaaatgttgtagttgctagtggattagatgattgcaaagatgttgatgttgtgagtgagattactgattgttctacttcagggatagctagatcgattagtttgggtcttcaagagtattctgattatgataatgtgaatgagatcaagagtgtttctgcatcatctgtctttgagtttcaaaagactgagaaggaaaaagttaatcaaagaatgcctattagatcattctctaaaccagctccatctaaatgggatgatgctcagaaatggattgctagtcctacggctaaccgaccgaagactggacaggttcaggttccgggttcgaagaaagggcctagctttggtcgtcagtcttctatgaagattgttgaagttgctgaacatagagtggttgaagagcctgatacaaagagaatagatgtaagccaagtgaaaaaggatatgggaaacaagtttggtagctgggaagttgattcgtacactaccgtggattcatatgtcaaaccggttcttatggttgagaactctattgtagaatcagcaactgaaggtggtgttagctagctctttgagttattcagtttgtatgctctatttatcttctaaagccaattttacttgctttcttgcagttaatctcagccgtcatgactcgtcagtcgcaactgcgtttgctcaaccgccttcaacggcaaggtctgtgtcaatgagagacatgggaactgaaatgactcctatagcgagccaagaaccttctagaaacgggacaccgattagggcaacaacgccaatacgaagtcctatatcttctgaaccttcaagtccaggcagacaagcatcagcttctcctatgagtaacaaggaactgtcagagaaagagcttcaaatgaaaactaggagagagataatggtgttgggtactcaacttggtaaatttaacattgctgcttgggctagcaaggaggatgaagataaagacgcatccacatcattaaagaccaaagcttctctacaaacttctaaaagtgtttctgaagctcgtgctacagcgtgggaggaagcggaaaaagctaagcacatggctaggtagtccaaagttgaattgtttgtcatagtcctctagttattctcgaaactttaagcttatgatgagttctgtaatctccaggttcagacgcgaagagatgaagattcaagcatgggagaatcatcagaaggcgaaatctgaagccgagatgaagaaaaccgaggtaaactacactaacatagctacgtaagttcaagtcatgattgtgaacaaacttggaaaaacatgaatgatgatggtggagttcttgatattgtaggttaaagttgagaggattaagggacgagcacaagaccggttgatgaagaaactcgctacaatcgagcgcaaagcagaggaaaagcgagcagcggctgaagcaaagaaggatcatcaggcagctaaaacagagaaacaagctgaacaaatccgaagaacaggcaaagtaccttcattgttgttctcttgctttagcttttgttcttaaatccaatcctattgtgaatgtgatgttgttaattctcaagaacacatctttctatcatcatttgtataataaaagctttgaaaaacttatttcttgtgatcttttagttgctttgtacatcttcaaattttggttttgagagatcttcgaattactcggttcaagatgtccttaccaaagtgaaaaccaaagttttgattttggtttggatttaattttggttagatttccttaccaatgtttgattgtaaaagatctaccaatcggtttacaattttggttcaagttcggtttaaatcaccttatcattgtctatttcacaacattccaaagtcgctggttccatcagaagttataatatcaaggcaaacaatatggctaacaaataaaccaataataaatccccacgtgtcagtatttgattgattacaaataaaccgaacttgatctattgatatttcccatcacataagaaaaaaaaagagccaaaaaaaaaaacttttaggcttagctttaaagggcacacacacacagtcgcgagtttctctctggtgcgctctttgtggcggctcgtcttcttcttcttcttccacgggactctctctgaatcggtgattttcgatcttcctagggtttcgatctgaaaccttgcgatctacttgaaagagagattcagaaatttccaagtaataataatg

SEQ ID NO: 12866 - DNA, 3000 bp, Unknown; identical to SEQ ID NO: 12860
  misc_feature (1)..( 3000): cDNA_ID_1807045_gDNA_ID_2214576_Annot_ID_135185 3000 nt of promoter + ATG

SEQ ID NO: 12867 - DNA, 3000 bp, Unknown
  misc_feature (1)..( 3000): cDNA_ID_2712716_gDNA_ID_2214577_Annot_ID_135195 3000 nt of promoter + ATG
gacgaaacaatggccacggtcaaaagactaagtgacgttgaaaacgattccatagtcgaggttctcgccggcacgagagcgagctgggtttgctcatcgacaaggagagaggttaaagtgttgttgggcgggtttgaaggtaaggagttaaggaagctttggtaagcaccgctccatggagcaggactcataattccatagttcctcaaacctttgatttcatgaatatcaaccttaaaatcgttgggtaacacatgctcagattcagtattcagcggaaatggagaaaaatgattgaagaaatttcggtaatcatctccacgtagagagaaaatcataatgcctctatgatccaaaatggagaatacttgtactaagcataagcatttgtttattctctacttgcattttttaaatgacctctaaaaaaagcaccaacgattgacattgagtttggcttttggttgtctcttcccttttcacaacctcttacaaaactgacaaaaaaacatatagtggagctagcacaaactttaggcttctctacttgcttctttttaaatgatcctctaatatgttaccaacgattgatcttgataaaagcgacgattgttccctgaataacaaaaccaaaagtaaagattggcagttatttatatatacaaacacagaacacataatgatgatacacgaagaaccatttttcactaaatttgaatcaaagtataccaaacaacattaggaaaccaaacacggttaagatataaagtaagaaaacagcagacctggtcaattgcacaaggaatcaagcaacgaagcttgtccattccagagaacaaattaaatgtgaaaatgagctaggaaaagatggagcttcctgcaaatatatggaatccaatttagaattcaggtacctgctccgcatggagaatgatttttccaatatgatcttcactggaaaagccaaatattgccttagcctagcaagataaaagatataaaaatgaaaacacatgcattagcgacattgtgcaattgaaggagatatatatagagagagcaaagtcaccttattatatcgaatattgtttgaaacctcgctcatattttcttatagaaaccactacacacaaagttaacgttggttgtatatcttccctcttcaaaactttttacataaataatacactcaaaattttataaattatgtggaacttgatgaaatatgatgtttagcgaagagtatattttactattttctagaaaattatattatttactaagagattatatattaattatgttgttgttaagtaataatagaatatttacgttttactggtcttaatgccatttatgaatttgaatgtaagctaatatgatcataattatcggttacattgtaaagaattcattgttataatgacatgcaatttaatgtggttttttttggctaaaaagttcttattggtcttgattctggtcaaacaatatgaactttgtaaatgtaccaattttcttttagagatagttatgtatacttatatttagaaccaataaattaaagaaatttttttgatatgtagataacacatgtcgaatcaatagagcgccacttgtcagtttttttagagcataagtttgaggaaatcttattttattatataataaaatatttttattataactaaaatatattatcctccttgatgacttaacccatctggttttttttttgtagtggcgattgccagatggcttaccggtttccgtcctcgtggacatactgaagctgttattgctattgcatttagtcctagacctggatccccgtaccagcttctctcgtaagaattgttctttttggcatcttatacgctgttttgtgtcagttctattcattggttgatatcatgctatttatgtgtttggaaaagatggtttatttcaactggtaagctccatgagccctttataaaatctttgcagatcgtcagatgatgacacatgtctgatatgggatgctcggggtgtccagcttgctccgcggatataagtccctaagcctcatagtcctattggtgattggctgattgctttatattcctggttgatttatatatcgatttgatctattggaagctataggactgacttcggaatcatattccaggagaaaaccgtggcggttcttctagtaatggtaattttttttgttgtgcattcaatgctaatggatctatctttgtcaatagcagctctgataatcgtgctagagtttactcggtcttgataaatgtttcttgactagattatatatataatgatgattcagttaattagagtagatacttccttggttacaggtttggggtgctagtaagaccaataagaatgatttagaccagctaaatcatgagatggatgttctggctggacatgagaatgttgttaaattacatttcttatcatatatgttatatttggtacctgctcatatttttaaattacatttcttatgagatcctaattttcttaacttagtcattttctgtggttctttctagtgcttgtgctggaagatctggacgaaaatgttccaaattttaagaattcttggtgtgctttctgctgcaattattcgtaaaagtttccttataatgtttttgacactcaataacatatgtatttgtctaggttctcttatgataacatagttacatgctctagtgatggtagtgcaatcatttggatcccaagatcacggagttcgcctgtaacatccgatttcgataagataaccatgacattcaatatgttttcataggagtagaaaccatatctttatttatgtctttcaggtaaaatgctgccaagccttagaagaagatccgagaggttgaaagataaaacaaaagtgagtattttgtaatattgctttgatcttgtggctaaatatgctacttatctgtttttttacgtctttagcaggctaggatc

SEQ ID NO: 12868 - DNA, 3000 bp, Unknown
  misc_feature (1)..( 3000): cDNA_ID_2709806_gDNA_ID_2214577_Annot_ID_135196 3000 nt of promoter + ATG
tgttgggatatcaaatcctcacatcagtgattctctctcaagtggtagtgtgttcctatgtcatggaagcataagaagaaaccaaacagggttgctactgactcaagaactcagttcttgtagtcaggatcagagtagtggcgctaagtcccatgacgttggtccttttgaaatattgaagcctcaacagttaaaagaaaagttatcttggttgacattatcgatacatgaagaggattgtcgttatattctacaaaaggaggatgaagttgcgaatttgcgacaagtaagtgtttgtggtgatcttatttgttgtttcatttagttcaacctttggtatgagtattcttacatgtagctgttactctttatctttcagggacatcaagaatacttaaactttagctccttgaggggaagtagctccttggactttaataaagagtagaaatatgaaggctgtggaaatctgtaaagtgaaaagtctgaaatatgcaactcttcctagttctggagatagctgctgcaaaatgatacttaaagtcattgatccgaactccgaagtgtacagcaaactttcaagcttacattacctgatttagtgacctttccagattttcttgtgaaaagaagccggtatgaaggagcgatacagaggaaatggacttgcagggacaagtgtaaggtttggtggagaaacaaaggcgaagaagatggtcgttggtgggaaggaggaattctagctgtgaaacccaaatcaactcattttcttgatagtccatgggagaggtacaaagttaaatacaagactagcccgaccgagacacatcttcatagtccttgggagctttttgatgctgatactaagtgggagcagcctcatattgataatgagaaatgaaacagtatgctcttagccttaacaaacttacagacttcagaaaaaagaatccaggtatgtgtgtttaggcttatgtttaaatttgcttaggtggtttagaagtagaaaataacataacactatcacaagaacatgacaatatgatataaacttgacagattcgtttgaggattcttatggactccaaaaactgaaccagatcatgggaaactcaagctacaccaataggtaatattctacaagactagaagaggttttgatatggagccgaatttgacatggttttgttctatggattatctacaggttcccagttcctttgtctcttgaggtaataagatcaaggattgagaacaactattaccggagtatggaagcgttaaggcacgatgtatcagttatgctatccaatgcagagactttctttgatctaaacaaatgtgtaggtgtagcagtcaaaatttcagatctttctcaatggttcgaccgcacgttgtcttctttgtagcttatctgcctatgtatagagtacgtgaattagggtcgcttgcgttgttgtatctgaaaggcttcttcgatctaacgagtaagcacatttttcattgatctaatttttgtttgtctcttgtgatgtaatgtaccctaatgtcctaaagttggagctaatttttgtcattttatgtgcatcagtacaatgatgttattacagcattttagtgtatattcgggtatccaagttttaagctatacacgaaaatcaactcttacttgacccacaactacccaactttggcgtggtattagtcgtaataataattttatgggttttggaaagttaagcaccaactattatttttcttttttttttgtagagttttggtcgatgtgagacatcttatcaaagttagtttagggccattgttttcaggtccgatccgtaccgtccggtccgatcggttaacccatgacccggacatttttccggtttagattaagtgctaatatccgataatttagggctaagcgattgtcccacaacctcctgtaaacgctacgtatgccggttgctaacatttaacaacaaacacacaaatttctttatactgttacagattgctagatatcgcttgcaatcgttagattttaaaacttcatttccgccagtgtttgcgacagcaggcggttgcgggtggttcaaatgattttttttttcttttttatctacattagtattttgcatcttttgctatgtattttgagatagtgaagtaatataacttcatttttcaggacttgtagtttttatgaaagaaaaaacaaaaactagaggctgattttaatgatagatcctaaagaaatcaaaccaaatgaaatcaccagaaccttaagatactttaacctattgggtctataaaacggattttattgctttggatctataaagtcacgttgtagacccaaagcaataaaagatttgggatagttaaaccatatgatggttagtgtgtggttttaaaaccttaagatatttgtgtaggagactaggaattgtgtgttttgaaaagaagcagccactaaaatcatatgataagtcaataaaggaagcagctactgaaatttacttgaaaatgatttttcagtaccaaaatcaattaatctcttccatgtctcgtttaatgtatataaagaccgttgagaaaagtcgtatttggatcaccacaagttagtagaaagacttgttagtcagtcaacccatgtgatatatatgagaatgaaaccatgttatcacattacaatttccactttcttgctttttcattgttgatactcaaaaaggtaaaaaaacttaaaagaaagatgaaagactcttggaacacaatcagtcattcttattactcttttctttcccttctttctcacttctaattatggagacgtgttagcagctcctaatagaaacttgtgtcatccagaacaaagagacgcaattctcgagttcaagaacgagtttgagattcaaaagccttgtgtgttgatgggcctcttaagacggagtcgtgggcgaataacagcgattgttgttcttgggatggtatcaa

SEQ ID NO: 12869 - DNA, 3000 bp, Unknown
  misc_feature (1)..( 3000): cDNA_ID_3026834_gDNA_ID_2214577_Annot_ID_186366 3000 nt of promoter + ATG
ttcactaaaaatgtattatatattttttaaaatatgaaatcccgcacgtatgtgcaggtcagaatctagttctatttaaattccgtcgcctcgttaacaaataatcaattatttgatattgtttctttagttgaccttattggattaatgcagactttgattataggcaaccaaactgaaagaaacattaaaactgaatctgagggaagtttctgttatatttcgtttgcatgtgcaatatataaaaaaataattaaatgttttaagtacaacgtaaaagattattgaatgttcagaaaatatgaccaatgacgcgaaaagaattttgtacgaaggagtttccgtactcttctaagtttacgtacaaccaggcatcgtaatatttaagaaaaagaatactatatgattcaattaaatatttttacgaaattattgggttgattagttattacacctcccctaatcattcaaagctgttttatgttctttgaccaattgcaactagattggaattttttttatttgttttcgttacaatcaaaatatatgttccctccattattttttatttgatgttttatgataatgcacacatattaaaaaaaaaacatttaatttttgtttatttttaacctaaaacatcattttttatgtacttagatataattcaaccaataaaaaaataatatgcagaatataaaaatcatcgaaccgattaaaaaattaattaattttgattgaaagttgaaaatattatctaattttgacaaaatttcttcctaaaatatcaaatgaaaaagaacagaaagagttgtttcaaattcaaatatattaaacaaaatattttttttcatgtaagcaatactctaaaatttaaatgcaaaatatattagttttgataaaaaaaaatatagcagactgatgatataggtattttgtaacttttcttaatttgtgagtagtatgtctagatatcatttaaaatgaagagatgaagtataaattttgatttcctttagttatgtgaagaaaatattattgcttttatcttctcaatatattgtcggaaaaaacttgatacaataaaccatataactttacttgtattcaaaattataaatgctgattttcgttcttgatttgtttttgttttttttaacaagatgattataatagtacgagccacggtcatgcactcatgcttggagtaaaaaaaaaaaaaaaaaggaggaatattaagataatgatctagaaagataaaacatttcttaagagctaatgaaagtcatccaaatttgtaaagaagactagttattcaaaagacgatgatgccatctacagtttgtagattttcgatcatatcaaaactttcactcagagtctgggaataagccaatgtggcttcaaaaactcctttgtacagattcaagttcattaatataattcagtttgcagaaaaaaaaaaattcatcctctaaaatgaggaagaaaaagagtcttgtggagatttgtaagaccacctcgaacggcgggactatgagagttcctaaaaaaccaaaaaataatattcctaatgtttcttatattttagaaacacaaattctttcaaaaattcaaaaaacttaattttttaggttttttatacactatttattagttattattgatgaattttaaatttcaagaaaaataattgaatattattggtttagaattatagaaaaatctaaatcacaaaaactaatacatttatgataagttttaatatgtttttaatttgtgtatttttttctagaaaatcaattaaaaatgaacatatggagtaatagtttaatcttataattatattctaattttttttaatatagattgactactaaactttgctaaaaaaaaaaaacaaaaaaacaaaaaaaagatggactactaataaaagtttttgagaccgtctcttaaataagagtttttacacctggggcgagtttgatctccttcaagattaactgtcttatgatctcctgtgaattcatcttgtttccttcgcttggctggtccatttagagcattatagacgcaccacttctgatcaaacctaacctccctttaagcatgctcaagagtgaacttactcttgtaagtggtggttatatgttaagtcaaagcattgattacatagagcaatcaatgactagcattagactttaacctaatggtaaaccaaccaaacattcaataaaaagagacttaagtatgatgtagacatcatattttttttacataatctaaacaagttgaaatagttctacttaacatgcatttatcacacttcttgtttatagttagcattcaataaaaatactaactatttacctaatgtacttcaaaacttgtggtgtcttcttgtacaagtgatgtctcaaatcttctagattctataactcaaaactcatttcataaaaccaaacacaagttagaaaacttaaacacaagaacacaacataatacttaaagcataaaacacaacttaaacacttaaattatataaaacacaaactcattaattagcctaaaaacaactgaaacacaacttatcataaaaaccaaactcttttcataaagaccaaactcattagctcaacacacaaagtaataactaaagtacaaactcattagccaaaacacaaagaaataactaaagtctagactcatttcagaaaggccaaactcatgagccgaaacacaaagtaattactaaagtccaaacttatttcataaagaccaaactaattagccgatccacaaagtaataagtaaagtccaaactcatttcataaaaccatactcatttcattcaagaacacaactgaaatagttaaatccaagtattgcactaatcccagcctaagctaatcgaatgaatcatatctttagaagagattggagatgagtatcaataaattctccgatttcgaacttcaaactctccgatttggatcgatg

SEQ ID NO: 12870 - DNA, 3000 bp, Unknown
  misc_feature (1)..( 3000): cDNA_ID_3026800_gDNA_ID_2214577_Annot_ID_186379 3000 nt of promoter + ATG
aaatttaactcttcatcgttttcttctcttcctcttcatttcttccttttcttcttcatattcccagaaaattttagttttgttcttgagaaaatttattttgattacaaacactaaaacctaaggaatgatactaaaaacggaacccaaacaaaataattaaacgaaccgtttgagatataataaacggatgaaccaattacgaaataaaaatttgagatcttatcattgtcttcttcgagctcgtttatcatgagacgtgagtcatgaccatcacttctcaccgccacccataattgctgttatcggagcttatatattgttgttgttctgttgttgtaaatggagatcttgtccgatgtttttcatttcgttaaaaaaatgaattattcgattcaatcaaataaacaatttcagattgattaaaaaaaaaaaaatcaaagaaacaatctcatcaattggaagaacctcaaatcatatctaatcggttacagaaaaaactctaaactcaaatttaatttttaattaatttgaaaagggcaaaatcgtcaataaaggtagtagaagtacccattcacgtaagacatgtataaaatgcttaatcatacaatacccttcactttattgtactattttcataattgatcctagaatttatggctaactagtcaaaagtatcaactaaaactattggggtctcaaaaccgtcatattttgtgactataataacgtcttaatttcaaaccgtcacaaacgataaccaaaaggtagtctcatattcgtaaaaaaaatagcaattttttttttcttgatacccttgtgttttgttactaagacagacctataatgttgaaattgtcatagctaatgacaaagaaaacctcatctccatccgatttgacagctatgtagagagtacaaggccaagtatggtcaatgattataaagtaggatcaattacgagatcttgcctttttttctatgtgctttgtccaaataggtacttttcaatgtgctactacaattaggcatttctctcctagttgcattgacgtttttatcccaatctccagttctccaattcacccgaattacgagattggtgtctgcaattcaccaaccccagttctttcgtctctacaattcaccctaatcgtaaactaatcacaacatgacgtagacaccatccaacatttgtttttgaattacttttcgattattagacatcgatctatcaaatccccatttccgccgttaatgcctttcatcttccgtttctgctattcaaaaatcagtgacaccgccttcagctctttcctcgactcataaaccggtgacaagtctcagtccgaaatcaaaaaatccacctactaatatatgtcgatcaaatctaaaattgatttcatttgtgttttgaaatttttgcgttccctaaacatcatcttcttagggtataatttttttttatatatatacgtatttaattggatatgttgagtaaataggtcagaagaagatctatgaaccatctggaaaaaaaagaaaaaaaaaagaaacagatcgatgtagaagaagaagctgaatcaagggtaaaatcgtctagtgataaaaaagtgctcatttacataagtccacatgaaaatgtccattttcaaatatttgaggtaggtagtacctatttttataaaaaaacctcttataaagcagtatgaaataataatcttaatgaataatttggtcttcaaaattaaatcgaacgtttattaaaaaaaagaagccttttgtagttctctatttgtatattggtatcgtgttgtaagtttcaattggaaaagccgggaagtcatatacattactataaaggttattgacaatatatgtgattttttttttttgttaagcaaataaacgaagtagccatatgattctgatttaaaaacagggcatttcgaaattttaaaataaccggggtctgggtcaataaactaggggcttttatgaatataggtatattttggatcaaaaatttgaaaaaagcatattcacttgggcttataagtttgtccttggatttgttgttggctaatgaaatgataattttgtccttggatttgttgttgataatttcacttcattttttccgctgcgtcacagatttcacgatcatgaaacctcgcttctcaccatcaactcttgcctttttcaacgtcgactcaatattccatcaacatcatcattttcaacttcatcaataccgtttctctcgtctttttagacttaaaaaatgttgcttcccctaacctcttccgattaacccaattgctcaaatttaacgagacttttgatggaaggaatctaaaccctaaggggatagtatttagggaacccaaaacatctaattttagacatggatcgaatcaattaaactccaattaatcaatatttgtaaaccaaattcgatcagtgttgtcaaagatgaacgattatagcgtcgttctctggacgaatatgatcacaagtgttcttattcattgctttgtgtgtctttaaaattctacaaaagagggttttgggattgagcttatatccaaaatgggcattttaagaaagtttctttcaaaagaggtatcttctacagtagaattcaacagtagcaacttattgactcgattctgacaattttgactttggtgtcaaagcgtgaaatatatattatatctaaaacttctcaattatcagtatggaaatggtacacagtctaaacattagtaaaaactatatactagtttgggatttagaaacccaaacaattcaatttacagtatgtaaatgttagataggtgagatgagaaaatttgtgaacaaagagaattgcagtttcagtggagaagaggacgccagtaaatcacgaaattctgattgtggattccgacatccacaatttggcgctagaaggaggggaattaagtcttttacttcagaacaacgatcaaaatcacc

SEQ ID NO: 12871 - DNA, 3000 bp, Unknown; identical to SEQ ID NO: 12868
  misc_feature (1)..( 3000): cDNA_ID_3026821_gDNA_ID_2214577_Annot_ID_186372 3000 nt of promoter + ATG

SEQ ID NO: 12872 - DNA, 3000 bp, Unknown; identical to SEQ ID NO: 12870
  misc_feature (1)..( 3000): cDNA_ID_2709817_gDNA_ID_2214577_Annot_ID_135202 3000 nt of promoter + ATG

SEQ ID NO: 12873 - DNA, 3000 bp, Unknown
  misc_feature (1)..( 3000): cDNA_ID_2712700_gDNA_ID_2214577_Annot_ID_135203 3000 nt of promoter + ATG
aaatatcaatctcaccggataacaatctcaaccatactttttgtagctatataagtgttacatctatcgattataatccgtgactgcttagcaaccaatttggccacatattagtaatatgatattaccattgacaaaatttgtggccacccatgactaaacattctgttctcttgaaatgactcgtatgtaaagaaaatcagtatcacccatcacttcttacttaaacaagtaccaaaacaaagctaccaaacagacaataacaaatattcaatgcaaaactctttaaaacaaacataggataaaatgtcaacaaaaataaataagataagatagattggactctttaaccataaaattaaatatcaatctcaaccggatatctatccatacagtcttcccatggactgttagctgaaggcttaacgtctcgcagagccacccacactgaactgttacacttaaaacctgaccccaaagcaatctgccatatcctatctccttccttcatccttcctttagcttctgtatacacccgcgagatatcccacgttgaaatgtatctcgtttccagagttgtacgctactccgtcaccgttctccatgaacagtgtgatctttgtaactgactttctgtctgaagggttggtttgttggaacaaacgccacacaaagtctgtcgcagatcttagtgtctgtgtgccgtagcttatgccaccgatctctccccggaatctccttcctccggtagagtcaccggaattgtcgacgaccgagtagtcaacagcattaactaatgagacaacgagcatcagagagattacaaaaaagattttgtgaaacgtcatctttgtattttgcatgtattttcataacatgcatcggtgttctgttcttctaaagacatattgacgttaatttggcttaccttacacctcacatattaattacatataaaatatttgtggatgtcggaatccacaatcagaatttcgtggtcgtgtttcgaagatcttaagacttgttaaacgaacaaagatcaatcggaaaagtgtttgtttatttctgtatagtttcagtgtcaattcattcgtctctctacaattgcaatcggactacatttatacaaatatttcgaatcaaatgaattaatcactacgctgattctacgccgggaatctcgcttcgtttacttcaaacgttacgaactctccagctcgagcaattaatgagcgtctttaattcgagatccttccgttactcgaattaaagcataatctgacttttgaaccgatgggcttctttaaacaggcccacttctctcgatgggccctccgctgggctcagaccgcgtattgggccggatacgaaatccaacatccacaatttgccccccaagtcctcgaagtgaacacttcggggacttaagttcaactcgtggcgccattctcggagatctcagaacgccatttcgggataacaagaatctcccgaggtaaaaaaggaaactgaatcgcgtgattttcgaggatttcctttgaaagagtgtgacgcttcgtaatcctagggttttggatttcccgcccattcaatcctctatataaaccgacgaacccttcaccttctgactgacctcttataagctaccagactcattcctcgcctcaggtaacaaccccgactcctcctttccataattcgttttcgttcagtctttgttccgaatttcacctgaatcaatagatagccggaatcttagacctagaatcgcagtaggtttaggccggtagtatttggagtagattctttatcgatttcttagattttaagtttagaaattcgaagaaaactcaacgtcaccgccgttctacacctctttccggtcaaattccgtcgtcaaattcttagattcaccgtctcaccggttcgccgatcgattaaatacagcgcggacctttctctgctcctgggttcttgaagaagatcttcaagtgttcttcagctgcttaagagagcttttcagaaaataaacgaaaaacggccctcagatatgacttttttcttgcaaattacttcgcggtgtttgtcatgcctccgaggaaagtagttcgcgaagtgtttctaatagatggtaagttcgaaaaatacaagacttcgctctcgacttcgagcagactcttgctgctgagaggagcccaccaaattcctcaccagattccacttatttctcccgaaccgacggtctgtcctgagaatcctcccccagggcatccgtgtgcgttcgaaattttattttcgctatgcgttggaatcgcacttccctagttgtgcccgaatgttattcgaactgtcttatgcctcattactctagctgaagaagacagattttctctatcactgaacgatctccttcagctatacgcagttaagaaagggcgaacaaagggaacatttttcttgtcacctcggaaaggtttccgagttttcgatgacttcccagataaagatgaacaatggagaaaatcatacttcttctttccagtgaatgatcttacttatggaaacaagactggcttatttgtatctgaatgggcagctcgcaccggtagatagtgaattcgctttaggaaaacacaacttaatttagttgtaatttctgaatgcaaacacttcgtggcacctgaactgaccatcttcttttatgtttttgttttcatttaaagtcagcatgcctcccgtttcacatactttcgctgctcacttctcgaatttctgttgccaagatctaggttgggagtccttgaccatagatagaattcgagcttcaggtcggagaatcagatcccgaactgaccttgccgtatcttcgcctcctttctgtccacgaataatcgacaaagccgacatgtctctcccttcgtaccgcgcagaaaagaaacttgagagagagagagagccgagcaggaaaaggcgcggattaaatccgacaaaactgtgatg

SEQ ID NO: 12874 - DNA, 3000 bp, Unknown
  misc_feature (1)..( 3000): cDNA_ID_2712752_gDNA_ID_2214578_Annot_ID_135206 3000 nt of promoter + ATG
taatttgggtacttaagcactgaggtttagggatcatataagataaattaatcaacctagcccaccacacaatacaaccacaccttctttgtttatatctaagtgttaattaccatatggatttaaataagttgatgcaacttgtagctccaatatcgaacttttgtctttcgtggtgttgttaatcatcacaatctggtccgtatcgtacgcggacaccgtcataatttatctcatttttgttgagagtgttcctcctattcgtcaacttttatagcaaaaaattgtttttatcatttatgttagccgttgaagtttggctaatgtcttaataatctaatatacatttttgaagtaaaaattaggaaacagatcttagtttatagagtatttacaatggaatgtcattgctttaattttttagatttgtaaaaattagttaaggattttaagatgagaaatacttgatttcaaagatctctagttattctcgattatttattactgtaaaatcttgcttaaatcctatgtttctttacctaaaaatatatttctggttacgttgcagattttggtttgtttggttacacaagaaacaacttacagtcatagcccatcttctctttgcaatagtatcattggaatggtgcagaacttcgtcggcaagaacaatgtcaattttcttgtagtagcaagcggtatatttggcacaagatattcggtaagtgggtttatctaaacttatagttcatctaaacattttgttttgtttttctaagttcgagatcgttagccggaagtagtgtaagatccaatctcgagatttggtggaaatgtgataagagataattctttctaactgagagctgagggagctctttatcgtttgatgcatagtgccatatagttaaaagatttatgagcttacctatcctagataggagcgactcaatctcatagaataagtcgatcttattttggggtgccagatgatatatgtggatcaagagttcaagaccttttttagaaccaatcatatgaccttgccaattcttactgtatgtccataaagtgggtcttttgatagtgtttgtctctagagtatgcttttgaccatttcaacccgtgggtttgacctattaaggtcttgtcccgttacaactctcgtgtaacaatataattcgaattattcctcttggcgctggtggtttacgtagttggtgatggcatattggcatgttgcagttaatcctcgagtgctaaaaggttagccgtcatggtcaacatgtagaaacgagctctcgagcaactagtcatgtactaaattcgtctatagtgttttcatcgccatcattaacaagtatatgttcgcttgcaaatttcatccgaacattatatctacttgtttacggtttacatctctaaaccgagtctaattaacttaacgcttttttttgttttacaacgagccataattcaaatcatatatatgaaagttagccaactcttctctccatatgattgacacatcatcactttagcatttgacatgtgtctattaaataattaatgtaagctcttcaacttctaatttataggttaatgatatatttattatttaatttacatatttaattgtagtattactaaatttattttaatattacataatttttcaataaaaccattttaatagttttctcatactggaagattttttttggtaatccaaactcaaagtatgagtatataatagtcgtggattacttaatgatttgagtaagttgttatcttaaattgatatttatacaataaatcattaagaaggaaagatacgtaaggagctccatcatcaaattcttaggtttctagaatccaacactaccctttgttaaattggtttaagacaaacgttgtttatgaattatctgtatgatgcattgttgagaatgttattagaaaaaatatttttaatactaaaaataattgtttattgcatggggaaatttgcaaaactaccctttttttactaccttttgcaacaatacccttttgtgttgtccatttttaaaaatatctcttctcttgaacagaatgatcaaattaccttcatctaataggaacatgtaattggaaactgaaatttttacgcaaaaaaaaaatttccgccaaacttttttcccgcaaaaaaacctatagcagatgtgttgttttttgaaaatttttggcgggaatttttttccgaaatttttttggcgagaaatttattttggaataatttaggcgaaaaatattaatatttcattttgttaacctaatacaattttcaaataggggtaaaatggtcattaaaaatttaaagagagtagaaataaaaatgactaaaaaaaaggtagagttgaaaaagggcatcatgaaaagggcattagaaataaattttctattgcatgaataagtaattagataaataaaaattatatttaaattaaacaatacgaaaaaattcgaaaaaaccgcagcgtagcgcggatgatcatctaatggctaataataattacccaaacaaaataatattccttctgtatttttagttagtgtttaagagttttacacacaaattaaagaatcatttagggagcttattggttcttgcattttttctactgatgataaaacaatcaacatattatatttcgtcaacactaattaatttttacatggtctaaaacatcaactaaaaaatacaaggggatatttaatgttcatattccctatattttgttttttaattaaatgtatttgtttttctgaatattttataaatcattctagaaatacaatggattttctttttttgatatatttggggaaaaaaacaaaagagtagaggttttagagaggtttgttggattgttttgctctcaaaatttctttctcttcttcaaatgttcattggaagaccaataccttatcttctactatcttcaccttccttccatg

SEQ ID NO: 12875 - DNA, 3000 bp, Unknown
  misc_feature (1)..( 3000): cDNA_ID_2712728_gDNA_ID_2214578_Annot_ID_186403 3000 nt of promoter + ATG
gttctgctttcttaattgccgtagagaatgtgcacattctatcgaaagaaccgtgaaagtttgaggcttctaatgtaacattctattgattaaattaaagaccattaattgaccaaattgtgacttgtgagttgtgagtgacacaaaactgtaacattctatcgattaaccgaaaataaaattttatcattttgaaacctataactcggagagtggaaagtgaacacgccaacacaagacgtgtccatttagattgttggatataacttgtaaagctcgatatgcatgtatacgtatttatatgcgtaatatgcaatacacacatgcacatacgtagacatacatgaacgtagatgagcctatatatgtttgtttaatcgttaaatttttgaaagaattctgacttgggaatattatttcaatgaacttattccatggtacgaaccactacatacatatatgcatgaatgtgcattataacatgagaagatacatgcacacagtcacacatatatgatttttataagtatgctttcacgaattttgttgtctataactataattaagaaaatagctatgaattgagataacttttcaaaaagaatattttaacaagaaatcaaaaaatattttatgataatgagacgtaactcccgtaagcatttattatgatttattttattattagaaaactttattgtgaaaaaatgcaattatataaaaaaaatataatgaatagagagattttgtttcattaaaatgtgttcatgttagcaattaatggaaaagaggaaaacaatatttctgactacaaaatacagacctcgaaaccttaaatgtattagttaatgaatccaaatgaagaagtgtcaaacatccggacacaaaaattaagtttgcaaatattttaatgttattatttatcccaaaaagagtatatggtgaatgtggcacaatctaaagaaataccaaattttcagctacatataaaaataaaaaaaaagaagaataataactatctatttataaagaaaaagctccacgtcgtacgtgattagctcaaaagataagttatcatattgatagggaatttcattttaaaaagttattatcatattttgtaattattaatttacgagtatcgtctttgggataggatgtttgtgatcttgggggcatagaaaaaaacagtagaatttcgagagctctagcatcattgatgaatgtacctgctcgagtttataattttagaccattgtcaattatcatcgtgaaaagattattaaaacatgaatgtaatatttcattctcggattgtattaataaatatataatatgtttcattttatgagtaattttgtactatacataattcagttaatgatcaattgcggaaaattctaaatttttatataatgagaaacttatttacaattttaaaacttatttaacattcgtatatatgagttgaacaaatgcaccatgtgtgtgtgaacaaatttgcagtaccatgtaaaactaattagcttaccaagatggactacaagtgtttttggtcgggctagaagtaaatgggttggaaactggtcatagatatgggtaaacgaccagcggctgtgctcttttaaccatctcctaaattactttaatccaaagccaatattttttgatcattctcattaaaatggttggttttccagtgaattttgaagttaaggtatatctgtagatagtcaagtagctagattaatcattgggtaacacttaggtggtccgagaccattttgggtagctccaatgtacatctcttgaattccatcgatccaaagggtcgtttggtttcatcattctccttaaaatgatgtactctctgaaaagaaaaaaaataggttaacgtcgttaggtcgaatggatttttcaatgggtaagtaagtatttttgattttggtatggttcggataaattcacgtttatccggctaaatggctcgaacattttgaattccacccaaatggttaatcaacttcttaggaaaaccttttgagtgaatatccaagcctctatttaatcgatcagatctaggattggacaaggatatcctccttgtatttggtttttggtgggactaattaggtaactccttggtccatgtaaaatttttagaagccacaattgaaacgtaagaaaggcactaataatcacgggcatgccatcatcacccatatacagtataatatttatataagattttttacacatattaacaaaacacaaaaatctcatttaaattatttcctttctataaaaacattattaattacacctaatttaattaataaaaaatatgtaacaaaatataattgatcaaaaatattaaatatatttaatttttgtatagaaaaatgaaaacaacatttattttacaacaacaaaacaaatcattaaactacatgaaaacacaaaaataataaaattgctaaacaataaatgttatctaagaaaactataattgtatacaaaagctagctattacacttagcaccatataaataaacttcttatccatcaatgtttaatatatatttgtatagtaaaataaaactagtttgcatctgaaaaagtataatcaaataaaactctttagatagcaatatgtacattaaaaaaagacttattttcatacgtattaagctgtaaaaaataatgattaagatttggggtaaagagaaaccaaagtttaagacggaaacgaaacaaaagatgataatcatcgattcatcatcacgatataatatgggttgctaaccacaatagaaaaacaaaagttcttttaaggttttaataatatatcaccaaaaatgataattaaaacctaaaattaaaataatatatctacaagactacaacaattctgctttataataaagctataaacctcaacatttttcaacctcttcccaaaaaaaagtgtagaagcagaagaaacccatcatcatcatg

SEQ ID NO: 12876 - DNA, 3000 bp, Unknown
  misc_feature (1)..( 3000): cDNA_ID_2709845_gDNA_ID_2214578_Annot_ID_186398 3000 nt of promoter + ATG
gcgaaccatcatttccttttccaatctcaaactcaagcattttggtttcttcatcatcacactttaaacatcgatttcggttatgattactttgtgtttccatgattgatacgtgtagttactattcttacaaggtctacctcaaattagctagcattgcatcccatgttcttttgtacgtccaatatgtggctaatataatatactaatatggtcatcaggtcatgtataagtataactatgatatatactagacattgattaatttgaggctaaggagaaattaaggtatgtgttttagaatccattctattaattttagaatcttaaatacatagatgggattcacgaacataccaacacacttcgtcagctcaaaaacaaaacaaccacatgccgcatcgcacaaaccaacaacgaggcttttttttttattggcgtctacttctcatatgttttttttcgtctttttacaatgaagtaaacaccaaatccctgaatgcatgtgatcttcaagtcttgatcaattgggtttctaatttatgcaaattttcctttttgatttagacttctctcttctttttttttttttttttgttgtctaaaattttagatttagacttctttttgtcttctaattttcttactctatcaaagggaactgctagttcgaatacacgggtgaagcggcaagacgagaaccaaatgaggtacatgtttgaacgcgattgaggaaccggatgtgcaatacacatgacaaagagcaagccggtaagaaaacacaaacaagtggcaaaccaaatatatatgtctataaccaagttgagtacatgaccactgatataacatggactataagaccgtttaaaatatttccaaatctactaaaatgtaagataaaattctaagtaattcaattataaagtatatttttaattgaattttccaatcaattaaaatctacaactaacatagaaattccttctttaatttaaaatgtatatagtatttgatatatataaatatatagagaattaatggacagtaaataatttttgaaagaaataaatatatgccggtaactcgttgttattcattaaaagcaaaatctatacgtcaatgttttttcttttttctctacgagtaaatgttctttcatttctcatgcaataattcttttcctcggtttgagtgatgtttgagacgaaactaatattacatgctgtggttttggatctagtaaattacgggcttcgcctcagaacctcttaaatttaaagaataaagaaaaaaaaattttttgcctctcacaacgtgagtgatgtaacacgtcacttatacacgccaactcttctcatcgaaaaattactcgtattacgttagtgattcactacaaaataaggattcctcttattgcgagtcaatctcatataataattatcaagttagttttatagcaaaagtattgaatttcatggcaactatgagtctatgactaaccaagcatgacatttgttataataaggaaaagaaacattttatatttgaacaacttgtgttgctatcataccagcggttaccgagatcaaatccatgattacattggattcacaagacatgatcatttagtaaccgagatttttcttttttctttctgttgataatacaatatactaaccgagattaattcatgattacgttggattcacacgacatgaatatgactctagtattttttgtttttttaaaaaacacttacatcattcttttgtagtgagctcatttctaatatagaaaactttttggttgttttctaaacataatattgattataacaaaaaaaaaaactttttttagataaattgttttcaaaaatttataaattagccaaatatctttataaattaatagaatctcacggttctgatatattataaatatatagaagttttactgtatatattttctcaattttgataatggttaaacttttaaaatatttttcataaacgaataatgtagcattactgatgataatggtgtaatattattgatcctatacgtaagaaatcagtgcttgcttactgatgaccaaaaaaaaaaatcagtgcttgcttagaaacatgtagaaaaattctaccgacaatctagaaaaagtaaagttcatactttgcacactctcctttaatggcatgacacatcaatggagatagatttctcagtaaagtacaagatgatatcttttgagaataaaaagaagaataaagaactcttacaaaaaactttcatagacacccgaactttaataatttatttccgaaagtgaaaaagtttaaacctttttctctacagaataagagaaaaaaaaatgtcaaacaggttttatccacacaaaagaaaagaaaaaagaaacgggttttcagtgagaagaatgaatgatttaaatttgttcaactagaaaaagaaaccaatgatactgtttctgaaaaatctgagtgaatgaattctctcatttatgaaaaagcttcaacttctttctgctaccaactgtctacattacctcttctctctctctctttctctttggtatttcagaattcccaattaaaaaaagatactcttgtcataatcagaggtaggggaagcttaatattatatattaatctatgacaaaaatcctcctttttcttgtttttatgtcctttggtctctcgtgttcttgagaagcaccacagagttaaacaaacactttttctatcttcagatctctccttaatatttgtcttcaactgtttcttgcatgagtaccctaaagtagcttcagtgagattttcttttttctggaggcagattttgttgtttagctccaagctttcttcaatgggtcttggtcttggtttttggggttatgcattgtttctttctctgttcttgaagcaatctcattgccaagaaccaaacacagatggtttctttgtctctgaattctataagcaaatg

SEQ ID NO: 12877 - DNA, 3000 bp, Unknown
  misc_feature (1)..( 3000): cDNA_ID_3026877_gDNA_ID_2214578_Annot_ID_186397 3000 nt of promoter + ATG
acatgagtgaaactggagcatcagaggataaggcgcgttcgcatgttcgacagatgatcaatgacttgtgggatgaaatgaattatgagaaaatggcacatagctcttcgatactccatcatgattttatggaaacagtgataaatttggcacgcatgtctcaatgcatgtatcaatatggcgatggccatggctctcccgaaaaagccaaaatcgttgatcgtgtcatgtccttactcttcaatccgattcctttagattgaacttcatattgattacattaaatatcatatggttttttgaattctaggacatagggttccatgaaactatatatatttggtgtaattttataacaaaataatatatattatatgtttatgaaacatcaacattacaactttaacaagagctggtatatatgcatgaacaaataatttcaggtaataacttttaatagatcttacgagattggggacccaaagccatagttccactatatatgttgttatacatgtgtcgaccacagataaacatgttaatcacttgaccatcgtaaatcggttggccttgtaaacctctaaaataattaaaacatgttaaccactttacacttcaaagaaaaaaaactggaatgacacctaaacaatttttgtttcaaataatatgtaagatggttataacctatgatatctttttgtctttttctatttttggtgacgcatgacttcacggatcattggcgtcttcttcgacaacatgtgatatctttcactatcgttcatcatgtccacatgaagtacgtcattagtagattctttttatctagagacaaattaattgtaaccaattataataatacaattaagaaacgttttttgcggacaacgtaagaagcttgtacaatattatatatagagacaattacatctagggtaagtggtgtaatacttttgttcaatggccactttactgcagataggttcagctctaatttacaataatgcacttgcgaagactcttccaggtcctcaacctttcacatgcaccataatggccaaaatgacacctggtgagtctcccgttgttcctcgtcgttccacaaactatcagccttctctttgggaccaccgcccatctcctttttatagaaaataaatatgtggtatatatatgtaagtaattaatacctgtataatattaatctataatgaggtcatatatatattgagtactatattgttgatagctatatatgttcaatacacagcgttcaaaaagatgaaagtgtgtgagatcagagagagagagatttgttgaaggaaagggtgagaaagatgctataagaagaagaattatctcgaccaattggagctaattgacgatctacgtacataaacttggggttcccaaaaataagacaatactaataatacgatgtggccattggttttaacttttaatagaaaagtatctttattcgaatgcacatctcaaagcttggaacgtttcatatttttcattcgacttgtgggagccatatattgctggccacatgacagcatgatacgacatgtgataacactaagatcacacaaacatttgagacttaacctttacacagataaacacatgcataaccaaatcattggcctaaggtggggtcaaaactcaaaaggtttcacaagccatcgatcgtagtatctgagaaatcttccccattaaattttttgaactgagggatctgcaacgtaaaaaaaaaccagcttaaaattatgttcttattttataactctaaattatattgtgtctaaacgttgttaggagtgggtttctttaatgttttcacatgtaatacgtctaaagtcatttggatgcaaacatgaaagttgaagatcaaataatatggagaaatatcctagcatggtacgtattcaatgagaagatgccaaccgttggatcaaattaaaagttggaaaattatagggaaacaagtgaggtttaatttagctctggtttgagttctgtcagaccaatgaactaaatgctaatgctatagtgttattgaagaagttgatgcgaaattgagatttgttttgcaaaagctcgagttcaattgttgaatgagcatataaataactcctgagaaggcagcatcgatcagtccacctattggattgatcgtttcacctattggctttaacattccaactattggatatatcatccagcaagagcatcatcaatcgatcccttgtagaattgattgatcatttttcctaagggtcgattaattgatatgattgttgtgtttataagtattcgtaaatttcaattcagatttatcaacaacatgaaatgagatgacaagaaaagtaaaataataatcaacgattttactcctttaattcacctattatacaaaaagtgatttttagataacatgcttttattttatgtgactttctaatttatcaaatgaaagtaacaagtggtgtcacttgtgtcacataattttcacgaaatgtatggttttcctctctaccatatttatttacgtgaagtcgtgaacatctaatttgtcaaaatagattaaaattttcgtcatatgaactgattacatgttattaattagtacgtactctaaacattagtacatctcttcagaaaaaataccatattttatgtttttaagtacattaaataaaatagaatataccgtcacatttcatttaaagggtaaagtaaaaattagtgtcagacattattaacaatatggcaaatagaccaaaaacgtgccaaaaaaacaggtaagtgggtcattgtcaatttgtcatggcaataagtaacgaatgaaagatctcagccgttaatagccagttagcgaatccgacggctatggatccgtacattcctaaagctcatgaggcctaatcgcatgctctgtttcttcaccggaaaaattgcaacttaaagaaaaaaagaaaagggatttaaaaa

SEQ ID NO: 12878 - DNA, 3000 bp, Unknown
  misc_feature (1)..( 3000): cDNA_ID_2709849_gDNA_ID_2214578_Annot_ID_186396 3000 nt of promoter + ATG
attttcatcacccagttacaaacttgaaaaagaatcacacatcagaatattttaatttttcttttgttttgccataagaatatatatcatgacgataaagaatgtactttttgttctagtaaccatttgtgtagcagtttctgtaaatgctcaactacagcaatatccgattattttctcaaacccgcttccatttctgcgctcgactggtatactaaacctaccagacgtaaaaaaatgtttctcgtccgtgaggaatgttccaggatgcttattagagatctctcaagcttttggagagaaattcggtcacatgatgcccgcttgttgtaaggctttcatggatagcataaaatgcatgccaaatattctatacagtgtacttttccctcctaatttgaaagaacaatgtaatcaggcagggatccactaatttgaaagaacaatgttctgagggatccacgcctagtaaagaggtggtagttgccaccacttaaaaaacagtttttaatataactttactaaatataaataattgccaccgtaacaatttaactctttccatgatcccatttttttaaaaataaaaatatttaagatggccaaaagctcactttactagtattttataaataaaagcgtaatttgtaaactaaatctaacttaactaattaaaactaggcttgggcgtttaatctgaaaccgataatccaaaccggaaaatcggattaaaatccgaatcgcattcaatatccataggtaccagattatacttgatccgatgcaatattcgatatgtatccgaatttgtgtcttttgttgtaccagggacatgtccaagtttgaaaatgtagctaataagaagcttgaggctggcttgttttcactatcttccaaaatttttttactactttcgattgaattctgctacttttttaatttttaggatgttatggtttaccttcgctttaaaactttgatatattggcatcgttttatgtctcactttggtttcccaactctatggtttgctaaggtttcatgttagttcaactagtcatttcagttttgttttgcggttttcggattgtttggattatgtttagattttttgtttaaatcagatattgaatatcacatgcataccgattcaaaatccgaaatatccaaaccgaagtcgaaccacattctataattatttttatagatattaattagaatctatttccaaaaactcgaaatccgaaaacaccaaaccgaattcgattcgataatcaaacgcccagacctaagtaaaaccctacaacttttgaatccaattttttttgtcgttctttctttttcctcctagtttttctccagacgagaactccctggtaagtttttgttctttgttcaattataactgtttatttcaaattttaatcattgttttttcattaatcattctaactgtagaaatctaaggacaagtttgtttcttcttattgtagaggtttagttctcgtgtgatttgatgatactttacacatgtgctaataatgattttgtgtttagttttccaaaataacgttgttgcttcatttcgtttgaatttgtgttggatccgacccaagctcgactcttttactatttaagagatgttatgccacattttaacctaagatttaagataggtttatttcgctgaattgtctaagagtttagaaaggcaatatagacctaagtttttactatttaagcaacgtttgctacattgtcggtgaagatatccccccctctagcaagtagcaacattagtgaaattgttttatgaatccatgtatctttacgcagtcactacgtatgttgtctcatatcgatcgaagtgcatgctttcaatatattcattagtaagtagtcccgatgggaacagtgaatttggtagattagggagattgtgatctatgatgcttagggtagaaatatatgtttctaatttgaatgcacttaaaactagatttgaatttgctaaagatattaaaaattgttatttttgtgtgtcgaaggtgtttgatgcacagtttaggccaatcctaatagtgttcatgatacttggtcaatgagaattgatgattaaggtgagattagtggactaaaatggacctgttgttttcattgccaattgatttcctaatttgcaaatggaagttcagataaattgggtgtttaatagagcaattaaaaccatggaagtaatctaccttatttaattgtttcacccatgatccatagcttatcttatttgctaatctggtttcattattttgtttaatcttattgtttagtagtttcccacttttcctttcgaattgaatgtctctttatttacttgtttacgccatctatccacctagtttaattagtataacatacacttaagtgtgttatagtctaattctttgtggattcgatcacaatattgtgctacaagtgacttaactgtactcttcccgttttacaattcatatttaaaatttgacggacctatagtccactcaatttagctggtattgtaaatgtctacaaaatgaaagtcatgaatacattttcacttcaaagtacgttttttatttgtttgagatgtcaagcacatgtttatttcgttgttttccaaataatatctaggagaggaaggttatcaactatgatctctatctttctagtttgtggtcacgcatgagtgacttcaccggtcatttcataccttcgactttaacatatgacactgtacacgtaccatgttaaaaatgtgtggatagtaaccttttctagaaacccccttatttgatttttgtatatcgaatgacaaatccatgtgatgtgacctaaccataataatacaatgcaaaactaaaacgtgattcggccaaaactatgacaacctaaaaagctagagagtaatatatatagacatacacctgaagagttacgtatagcataataatacatttattcaat

SEQ ID NO: 12879 - DNA, 3000 bp, Unknown
  misc_feature (1)..( 3000): cDNA_ID_1807330_gDNA_ID_2214578_Annot_ID_186395 3000 nt of promoter + ATG
taaacaaaaaatctaaacataatccaaacaatccgaaaaccgcaaaacaaaactgaaatgactagttgaactaacatgaaaccttagcaaaccatagagttgggaaaccaaagtgagacataaaacgatgccaatatatcaaagttttaaagcgaaggtaaaccataacatcctaaaaattaaaaaagtagcagaattcaatcgaaagtagtaaaaaaattttggaagatagtgaaaacaagccagcctcaagcttcttattagctacattttcaaacttggacatgtccctggtacaacaaaagacacaaattcggatacatatcgaatattgcatcggatcaagtataatctggtacctatggatattgaatgcgattcggattttaatccgattttccggtttggattatcggtttcagattaaacgcccaagcctagttttaattagttaagttagatttagtttacaaattacgcttttatttataaaatactagtaaagtgagcttttggccatcttaaatatttttatttttaaaaaaatgggatcatggaaagagttaaattgttacggtggcaattatttatatttagtaaagttatattaaaaactgttttttaagtggtggcaactaccacctctttactaggcgtggatccctcagaacattgttctttcaaattagtggatccctgcctgattacattgttctttcaaattaggagggaaaagtacactgtatagaatatttggcatgcattttatgctatccatgaaagccttacaacaagcgggcatcatgtgaccgaatttctctccaaaagcttgagagatctctaataagcatcctggaacattcctcacggacgagaaacatttttttacgtctggtaggtttagtataccagtcgagcgcagaaatggaagcgggtttgagaaaataatcggatattgctgtagttgagcatttacagaaactgctacacaaatggttactagaacaaaaagtacattctttatcgtcatgatatatattcttatggcaaaacaaaagaaaaattaaaatattctgatgtgtgattctttttcaagtttgtaactgggtgatgaaaataacatgggattattgtctgatttatatgaaagaaatgaagaactggctttaattatctttaatgaaactcgttcgagtatttatttgcctatttggtaattaatttgcggtttccaacattgaaaaagagttgaaaatgtaacgattgtctttcaaaaaacgcattatgaaaatggaaccatgtccatgttaatatcactctcaccattcttagtgttattaactaatatatattatggaagagttttctgttctcttaatgtgtacatatcatcatggtaaacatccaatcaaacaaagccatgtcaccattttttttttttaacactaaattataattacaatgttcatttaataaatatttatttctattaatattaattattaacaaaaaactaataaaataaaaaatgattttaaaatagtaaaagtcataatgtgaaattttattagtaacaataatattattaaaattttaacataaacacaattaaaaatgatcatacttcaaaatacaaaagaaaaaaagaagacaaaattcagaaaaagaatcaaaagatacatatgacatgtgaacaaatgggtagattagtatatattacatgttatacacataatcatgtagtcaactttttttaagttagttattgaattattaaatttttatggtcatacagcctaatttctcatgtatcaattagaccattgtcgacaaaacaaaatagaaaaaatagttgaattgattaggctccatgtttgactggtacgccgtgtacttgtcaatgttccggacggcgaatagtatttttgatattaggaaatggggtttaccttcaaaatattggtgtggacggatttgtggatacttgatcagatatcaaaggcggcacaaaatgaccaacgatcgacgaaacagtgcccaaaatcagagtcagaagtgactagctcgatagcatgatcgatgccctttcacccatttaaaccattccacctagaacacttcaacacgactgaagctaaaacttttgcatatctcatagagatatgtttgataaggttgctgaaaataacaacttctactataattttgtcttttattatttcgaccttctcttaagaaattcgcccaaaaaaatttccaaatcaaaaagttgttattatcctaacagatcttaaattatatgtttcgattttcggttatatactggtaaaatctgaaatccgaacattaaaaaaaaattgaaacccaaacggatactcaaaaacacctacaacccaaccattataccaaaaaataaaatccaaacgtaaacccaaaaaacacaaaacaatatatacacatatttttggattttaaggatcatttggagcgtttttctatatacatcgtttaggtttttggagtttttcgattcaaaaatcgaatcagaacatatttcgattctatggtcgcattttttttttttcgagaaccattccgaacccgtataaatccaaaacgaaccgatcgaaacatattcagtaccttccgaaatctccctatctaaaaaatccaaaaccatgtcttaccctacaaatccaaaacccgaattaccctaataaaatccgattcaaagtccgaatgtctaaaaaatccaaaaccctattttaccctacaaatccaaaacccgaattatcgtaataaaatccaatccgaagtccgaatgttcaagcctaattgagctactcactaacacacatcacacatgtgtaaatcacacctaacttctccttctatatatacgcctttgaaagaccaatcctaacttttcattgtttactctttcgtcttccttttcagagttcaatcacacaacacctctcttcaatagcaataaccatg

SEQ ID NO: 12880 - DNA, 3000 bp, Unknown
  misc_feature (1)..( 3000): cDNA_ID_3026889_gDNA_ID_2214578_Annot_ID_186389 3000 nt of promoter + ATG
ggtcaagttccatcttcaattggaaacttgaccaaactaatgtaccttcgcctttccataaaccacttaagtggcaaatcttctgtttcatttgccaatttaacgaaattgatccaactcgacatcagagaaaatgactttgaacccgagcttataccggacatgagccgattccacaacttggagggatttgggggtgggaactttttcgggccttttcctacatccttgttcacgattccttcgttacgatgggttaatttgagggacagtaacaacaacttcacgggacatatagattttgggaattcgtctttatcttctaggctttcttatcttagtcttgctgataacaatttcgatggcccaatccctgaatccatatctaaatttctcaatctcgtattattagatcttcgtaacaactcattttccgggcctttcccaacatccttgttcaagattccttcgttacaatgggttactttggcgcgaaacaatttcaagggacctatagattttgggaatacatggccatcatcgtctagtcttagtagtctataccttgctgataacaatttcgatggccaaatcccagaatccatatctcaatttctcaaactcgaaaggttagatatttccaacaataagttgcaaggcaatgtcccaggttgcttattgagattgtcatcgctagaactttctcacaactctttgagtggttttggaaaatcatcacaagttctagatcaagcacaaatgcgagtttgcgtcttgattctaattcattccaaggaccatttccacattggatctgccagtttagattgctggagattttagatttgtccaacaatagcttcagtggctcaattcctctatgtttaaggaatatcacttattctttggaagtgcttaatctacgaaacaacaatttcagtgggattcttccagatgtgtttctcaatgctactcgtttatacacacttgatgttacccgcaaccggttggaaggtaaactcccaaaaaccttgatcaattgcacatccatgcgacttttgaatgtggaaggaaacaaattcaaggagacgtttccatcttggttgggttctatgccatatttagatatcctcatcctccgagccaaccaattctatgggccgttatatcacctccacgaatctacttggtttcaacatttaaaggttattgatgtctcacataatgacttcactggatccttcccagctttctatttttccaactggcttcaaatgactacattacacctagaaattgatgttgtatacttcgaatatcctaccatccaagatgattatgatgacccttattttggtacttacactagttcaatggaaatagtgaacaaaggtgtggatagagagtttgataagatcaggcaagacttcacatccattgatttttcaagcaacaagttttatggaaagatccctgaatccattggcttgttgaagggattacgttttctcaacttgtcgggtaatgctttcacaagcgatatacctcaatcattggcaaatttgacgaatctcgaggcattagatttgtctcataatcagctgtcaggtcagattccccgagatcttggtgagctctcctttctgtcaaccatgaacttcgcccacaacaatctcgaaggtccaataccacgcggaacacaatttcaacgccaaaactgttcttcattcatggacaaccccaagctttatggtctcgatgatatctgcagaaaaactcatgtcccaaatcctagaccacaagaattagagaaagtatcagagccggaagaagagcaagtgattaactggacatcagcagcaatagcgtatggacctggtgtgttttgcggattagtgattggacatatcttcatttcgcataagcaggagtggttaatggaaaagtgtcgtagaaacaagcccagagttgtcatcagaagcgctcgttgaacacgtgtcctctctctaagcattgtcaagcatatgtatgtgtttgtaataacgttctccaaaaactctttcgtgcgttgtaatgttctaatatatggttttgtaataaacgtctttggtggcggtacgtatttgatacatattggtttgaaaatgcattcaaatactcttttagttcctaaatttcaacatgtgatagctatgtatgtgtaaatgagcttgttgtattatgtatcagttttattccgctttaatttgtataaaacagtaattttttctttgtgttatcaaggattcaagacaaaaagaatgactgtaactatctcaggaactgaaacgtttcttgacttattttccagttgtaagaaattcttggatgtaatttggccatgcaaccaatcacacaaagacacatgaaatgaatgacttggggacttaatctagattaatctaaattttatgagttttgtccaggtgttgtagtttggttggtgactatagttgagattaagttatgcatatgtaatctcaaatctaaagtagattagtgtaggccatttttacgcaccacactttatgcattttctcatcttcccacttgtcgctatgattcaaaaaacctggcacatcgggaaaaaacaattaatcacgtgtactcaacctcacaccaagcaaaatctcttcatccactaataaaaatccacgtcagagatatcttacacgtggacggtcacgatccctcaatgacattcaaagaggattcgtctccatatataaacacagagagatagcgagggacacagattcgccgcagctagagagaaaacgaaactaaccggagcatgaagagacgaagatcggcgaagaaatctccggcgatggtgacggttaccgattggaaagggttagattgcggcgaagagacgagaatcgtaaggagattgatgaagttcgaagacttgcctgagtatttgaaggacaacgagtttatacacaaccattatcgatg

SEQ ID NO: 12881 - DNA, 3000 bp, Unknown
  misc_feature (1)..( 3000): cDNA_ID_2712748_gDNA_ID_2214578_Annot_ID_186387 3000 nt of promoter + ATG
catttttatttctactctctttaaatttttaatgaccattttacccctatttgaaaattgtattaggttaacaaaatgaaatattaatatttttcgcctaaattattccaaaataaatttctcgccaaaaaaatttcggaaaaaaattcccgccaaaaattttcaaaaaacaacacatctgctataggtttttttgcgggaaaaaagtttggcggaaattttttttttgcgtaaaaatttcagtttccaattacatgttcctattagatgaaggtaatttgatcattctgttcaagagaagagatatttttaaaaatggacaacacaaaagggtattgttgcaaaaggtagtaaaaaaagggtagttttgcaaatttccccatgcaataaacaattatttttagtattaaaaatattttttctaataacattctcaacaatgcatcatacagataattcataaacaacgtttgtcttaaaccaatttaacaaagggtagtgttggattctagaaacctaagaatttgatgatggagctccttacgtatctttccttcttaatgatttattgtataaatatcaatttaagataacaacttactcaaatcattaagtaatccacgactattatatactcatactttgagtttggattaccaaaaaaaatcttccagtatgagaaaactattaaaatggttttattgaaaaattatgtaatattaaaataaatttagtaatactacaattaaatatgtaaattaaataataaatatatcattaacctataaattagaagttgaagagcttacattaattatttaatagacacatgtcaaatgctaaagtgatgatgtgtcaatcatatggagagaagagttggctaactttcatatatatgatttgaattatggctcgttgtaaaacaaaaaaaagcgttaagttaattagactcggtttagagatgtaaaccgtaaacaagtagatataatgttcggatgaaatttgcaagcgaacatatacttgttaatgatggcgatgaaaacactatagacgaatttagtacatgactagttgctcgagagctcgtttctacatgttgaccatgacggctaaccttttagcactcgaggattaactgcaacatgccaatatgccatcaccaactacgtaaaccaccagcgccaagaggaataattcgaattatattgttacacgagagttgtaacgggacaagaccttaataggtcaaacccacgggttgaaatggtcaaaagcatactctagagacaaacactatcaaaagacccactttatggacatacagtaagaattggcaaggtcatatgattggttctaaaaaaggtcttgaactcttgatccacatatatcatctggcaccccaaaataagatcgacttattctatgagattgagtcgctcctatctaggataggtaagctcataaatcttttaactatatggcactatgcatcaaacgataaagagctccctcagctctcagttagaaagaattatctcttatcacatttccaccaaatctcgagattggatcttacactacttccggctaacgatctcgaacttagaaaaacaaaacaaaatgtttagatgaactataagtttagataaacccacttaccgaatatcttgtgccaaatataccgcttgctactacaagaaaattgacattgttcttgccgacgaagttctgcaccattccaatgatactattgcaaagagaagatgggctatgactgtaagttgtttcttgtgtaaccaaacaaaccaaaatctgcaacgtaaccagaaatatatttttaggtaaagaaacataggatttaagcaagattttacagtaataaataatcgagaataactagagatctttgaaatcaagtatttctcatcttaaaatccttaactaatttttacaaatctaaaaaattaaagcaatgacattccattgtaaatactctataaactaagatctgtttcctaatttttacttcaaaaatgtatattagattattaagacattagccaaacttcaacggctaacataaatgataaaaacaattttttgctataaaagttgacgaataggaggaacactctcaacaaaaatgagataaattatgacggtgtccgcgtacgatacggaccagattgtgatgattaacaacaccacgaaagacaaaagttcgatattggagctacaagttgcatcaacttatttaaatccatatggtaattaacacttagatataaacaaagaaggtgtggttgtattgtgtggtgggctaggttgattaatttatcttatatgatccctaaacctcagtgcttaagtacccaaattatcgaaccaaccaagtcatcttcgtatttcttaatcttaatttattctaataatcatcatgtatataccaatttgatgtatatattatcgtcgacatggatgccacatcggacattgttgaggatacaccacccctgtagattgttatgatatttcctcattattttaacgtatcgttccactaatctcactctcaaaatccaattacaaacgtgactatttagtctaatctactctagtaaacatataatattaattaaaacccaaaacacatgatggagttaggccttaagctagttattttagatgacatgtaaaccaccatacaaaaattaacacaccttcacgaaaaaaagttaaccacacggcaattataaacgaataaatgacgtggcggagtcaagttacacacgcgttcacacaacattggttgactttataagtcaaacatcataggcgctaaacgtttcattttcttcaaacgttagttaggcacaaactataaaagagatactgtctctcttcgattgtataatatatgatttatatatatgtgtatagtcaaacaccatttctgattctttgttgtctcaaataaacacacacacaaaaaaaaaaaaa

SEQ ID NO: 12882 - DNA, 3000 bp, Unknown; identical to SEQ ID NO: 12881
  misc_feature (1)..( 3000): cDNA_ID_2712748_gDNA_ID_2214578_Annot_ID_135207 3000 nt of promoter + ATG

SEQ ID NO: 12883 - DNA, 3000 bp, Unknown
  misc_feature (1)..( 3000): cDNA_ID_2712740_gDNA_ID_2214578_Annot_ID_135209 3000 nt of promoter + ATG
gtcttttcaaactccaatatctccaaaacctaacccttcgttattgcaatctctatggagagattcctttttcattaggaaccctttctcatctcacctttctcgacctttcggaaaataaattagttggtcaagttccatcttcaattggaaacttgaccaaactaatgtaccttcgcctttccataaaccacttaagtggcaaatcttctgtttcatttgccaatttaacgaaattgatccaactcgacatcagagaaaatgactttgaacccgagcttataccggacatgagccgattccacaacttggagggatttgggggtgggaactttttcgggccttttcctacatccttgttcacgattccttcgttacgatgggttaatttgagggacagtaacaacaacttcacgggacatatagattttgggaattcgtctttatcttctaggctttcttatcttagtcttgctgataacaatttcgatggcccaatccctgaatccatatctaaatttctcaatctcgtattattagatcttcgtaacaactcattttccgggcctttcccaacatccttgttcaagattccttcgttacaatgggttactttggcgcgaaacaatttcaagggacctatagattttgggaatacatggccatcatcgtctagtcttagtagtctataccttgctgataacaatttcgatggccaaatcccagaatccatatctcaatttctcaaactcgaaaggttagatatttccaacaataagttgcaaggcaatgtcccaggttgcttattgagattgtcatcgctagaactttctcacaactctttgagtggttttggaaaatcatcacaagttctagatcaagcacaaatgcgagtttgcgtcttgattctaattcattccaaggaccatttccacattggatctgccagtttagattgctggagattttagatttgtccaacaatagcttcagtggctcaattcctctatgtttaaggaatatcacttattctttggaagtgcttaatctacgaaacaacaatttcagtgggattcttccagatgtgtttctcaatgctactcgtttatacacacttgatgttacccgcaaccggttggaaggtaaactcccaaaaaccttgatcaattgcacatccatgcgacttttgaatgtggaaggaaacaaattcaaggagacgtttccatcttggttgggttctatgccatatttagatatcctcatcctccgagccaaccaattctatgggccgttatatcacctccacgaatctacttggtttcaacatttaaaggttattgatgtctcacataatgacttcactggatccttcccagctttctatttttccaactggcttcaaatgactacattacacctagaaattgatgttgtatacttcgaatatcctaccatccaagatgattatgatgacccttattttggtacttacactagttcaatggaaatagtgaacaaaggtgtggatagagagtttgataagatcaggcaagacttcacatccattgatttttcaagcaacaagttttatggaaagatccctgaatccattggcttgttgaagggattacgttttctcaacttgtcgggtaatgctttcacaagcgatatacctcaatcattggcaaatttgacgaatctcgaggcattagatttgtctcataatcagctgtcaggtcagattccccgagatcttggtgagctctcctttctgtcaaccatgaacttcgcccacaacaatctcgaaggtccaataccacgcggaacacaatttcaacgccaaaactgttcttcattcatggacaaccccaagctttatggtctcgatgatatctgcagaaaaactcatgtcccaaatcctagaccacaagaattagagaaagtatcagagccggaagaagagcaagtgattaactggacatcagcagcaatagcgtatggacctggtgtgttttgcggattagtgattggacatatcttcatttcgcataagcaggagtggttaatggaaaagtgtcgtagaaacaagcccagagttgtcatcagaagcgctcgttgaacacgtgtcctctctctaagcattgtcaagcatatgtatgtgtttgtaataacgttctccaaaaactctttcgtgcgttgtaatgttctaatatatggttttgtaataaacgtctttggtggcggtacgtatttgatacatattggtttgaaaatgcattcaaatactcttttagttcctaaatttcaacatgtgatagctatgtatgtgtaaatgagcttgttgtattatgtatcagttttattccgctttaatttgtataaaacagtaattttttctttgtgttatcaaggattcaagacaaaaagaatgactgtaactatctcaggaactgaaacgtttcttgacttattttccagttgtaagaaattcttggatgtaatttggccatgcaaccaatcacacaaagacacatgaaatgaatgacttggggacttaatctagattaatctaaattttatgagttttgtccaggtgttgtagtttggttggtgactatagttgagattaagttatgcatatgtaatctcaaatctaaagtagattagtgtaggccatttttacgcaccacactttatgcattttctcatcttcccacttgtcgctatgattcaaaaaacctggcacatcgggaaaaaacaattaatcacgtgtactcaacctcacaccaagcaaaatctcttcatccactaataaaaatccacgtcagagatatcttacacgtggacggtcacgatccctcaatgacattcaaagaggattcgtctccatatataaacacagagagatagcgagggacacagattcgccgcagctagagagaaaacgaaactaaccggagcatgaagagacgaagatcggcgaagaaatctccggcgatg

SEQ ID NO: 12884 - DNA, 3000 bp, Unknown
  misc_feature (1)..( 3000): cDNA_ID_2709833_gDNA_ID_2214578_Annot_ID_135211 3000 nt of promoter + ATG
tacaatgttttatatatagtagataatacgagatatgattgaaccctatcaacttgcttcgctacgattttcaacaatttatctcacaaaaccaataaaatgtccacccgttatcaacgtgacacaaacacatcaaagaagggaacagttctactggccacctcatgagtcatgactcaaccattattgtgtcctggacttctttctagaatgtaaattgatgaacgaaaatttcagctctgcccttggctaaagcggctgaagtccatgctttaggcacacaaatttatagatagttgtaaaaggtaacaaatttcgaaaatgtttcgtaatctagtggttatttcatagattaatgtcttattagtgaacggttagaattttagctttgttttttgtgacttttaattagaaatagatttaaaaatgcttaacaattttaaataaacttaaatatgttttaggcattaaaatctgttgggttagttctgtcgaggcggattggacgttggtttttttgtatataaattagtgggcttcatggatagatccatcgtagatcacaaattcatgtggataaactcgtcgcagattgtgggttgcccgtaaaagaaaaatcaactcttttaaaacataatgttttttcatagaggatttcaatccttttgtctctgttagaattttttgtgcagttcaaaaaccctaatcaaagtatttcacgatcacttaacaagaaatctgaagaatcattctctatttcttcaagtttctttttatgaccacatcaaaaaaaattaaatcgtcgaaacttttgattttaagtcaaaacagagcatttgtaaactacacacttgtaatggtaagttatttgtgaatacacatccatgattagatgttttatttttgtttgattgattcgcaagtagtgactagttttgtattttgttactgatatgattcgtttgactccgagtattttagatctaataatctggaatatcagaaagtcattaagttgaaaaatgctaaatctaaacgacaacaagctaacaatgaaccaaaaggacctaaaaaactggaaagaaaactaagagatgaaataggagcacctaagccacatagaaaaaaggtgaatgaaccagaaacatttaaaacccaaagaaaaaagggtgatgaagcagaagcatataaaacagaaagaaaaaaaaagtttgatgaaattgaagaaaaaaagtctgtcttcatgttcgttgcactcgtcgtgaaccccgaacctcaaatgatttaaagattaaaaaagtattagactgctttcgataattccttcttagttctatgaaacactataatctatttagactacctcagcgtatcaatatttttttcttgtatagaatatccaatcacgaccaatcgaatttcatcaatctataagaatgccattctcatgcaatttttctcttatagccaacatgctcatgcaattttgattatttacttaaataaataaataaatagaagtttatataagtgtcaataataagcttaaccttgagattctttgagaaacgttgcatttatagaagaatttgtcagtaattctagtaagatacgagcaatcaattggtatttttgattgttacttctctcatctcacaagtttgaatggttacggcagttaagatggataaatccgtcaatggtttaatccgaactatttttaaagtagacaacaaaccgtcgcaaccaactctatttatatgtaaaaacggtatgtggttgatccgcatcagttttcttttttaaatccacacagaagtaatttgtgaaatggtaaataaaacgtggtcaaatacacaaacgaatttgtccaccttaaccacaacaatcatttagaccctaaaattgataataaatggacaagtgaacatagaaaatatggcaatttatgttattttagacaatcgaagcgattatttaggcgttacctgagagtctagtgcctagatagagtgtaaacgaccgcctagaccattttttataatactgaacttttgtaatcatttatttcggaggtggtgcacacgacaatgcctacattactcgtgaaaactatattatacctcagaataccaaagtccatgttcccgatcccaatatcatcaaagagttggcccatatcaaatgctatgttaatttttcttatcttttcaaattattctaatgttgtgttgccaacgactgcttttactttataatagaatagaaataatagaagttagtttccgcgattactattatatgcttacatttataccggactagttatctccagaagaaaaccgtccgttttcaatttgaaaacagtctgtaaaagaaagacttacatttatctaatgcggatttgtattgtgtgtgtgtgtgcttttttcttacatgtatttattggtaatgtacatttaattatatgtcaaggtggttgctggtgtgtgtaaggtttcataatctgctagaatagttaagaggtcaccttcatttaccaaatggattttgtcttctaattgatttaaatccatttttttcttttattctttgaatactttttcataattatttcgtatcctccacactaactcatttctactttgctacatttacaagtttcatctaatctacttaaattaacaaaaaaaaaaaaaaattgtttccttatttaaaaattagatttctcgtaaattggactttgattttaattattgtctattcaaagttttatttttttaccttaaaaagtgttgactttgatatttcattaccttaagaagaagaatcaccgacagctccaacttaggaaatctcaaccgttgattaaatcaaacgagatactaaaatatccaacggccataaatcgtccaattgccatgtttcttcccactctcttctccttcatttaagaaatttcactctccgaagaagaagacgaaatcgagcaaatccatg

SEQ ID NO: 12885 - DNA, 3000 bp, Unknown
  misc_feature (1)..( 3000): cDNA_ID_2709853_gDNA_ID_2214578_Annot_ID_135212 3000 nt of promoter + ATG
tgatattccagattattagatctaaaatactcggagtcaaacgaatcatatcagtaacaaaatacaaaactagtcactacttgcgaatcaatcaaacaaaaataaaacatctaatcatggatgtgtattcacaaataacttaccattacaagtgtgtagtttacaaatgctctgttttgacttaaaatcaaaagtttcgacgatttaattttttttgatgtggtcataaaaagaaacttgaagaaatagagaatgattcttcagatttcttgttaagtgatcgtgaaatactttgattagggtttttgaactgcacaaaaaattctaacagagacaaaaggattgaaatcctctatgaaaaaacattatgttttaaaagagttgatttttcttttacgggcaacccacaatctgcgacgagtttatccacatgaatttgtgatctacgatggatctatccatgaagcccactaatttatatacaaaaaaaccaacgtccaatccgcctcgacagaactaacccaacagattttaatgcctaaaacatatttaagtttatttaaaattgttaagcatttttaaatctatttctaattaaaagtcacaaaaaacaaagctaaaattctaaccgttcactaataagacattaatctatgaaataaccactagattacgaaacattttcgaaatttgttaccttttacaactatctataaatttgtgtgcctaaagcatggacttcagccgctttagccaagggcagagctgaaattttcgttcatcaatttacattctagaaagaagtccaggacacaataatggttgagtcatgactcatgaggtggccagtagaactgttcccttctttgatgtgtttgtgtcacgttgataacgggtggacattttattggttttgtgagataaattgttgaaaatcgtagcgaagcaagttgatagggttcaatcatatctcgtattatctactatatataaaacattgtagaaaagtaaaatattttcatttaaaatattataaaacagagaagaaaacttatactatttgaccaaggaaaaaaactacctactcacgacacgaccatcacgtttataatgttaatacacagttacaccatacattttttcattgtagttctatacaataatatatcatcgtttgatctaacaagtattcgatagatagtgggaacttttttttcccttttggccttatatttaagaacatggagcctgtgtttctaaaattctatctaaaaaagtatattttgtattgatcatatctgaaattgcatatattgtaaaatattgtgtacaaaaggatccggtccaagattaaacacacaatacttactgagactaaaaggggctaaaccacaagaacaaatccttgaaattgcaatggttaaacttacaaaaaatatgtctcttattaccagatcttaatattgtttaccgaatttctgaactaaactacattttttgcccaaacaaacaaagaactaaactatatttattcaagtcaagtcaaataattgcatgcaggagacaacgcaaaaagatgaaaaaactaaaaattcagagatgaacatcgagaacacaaataacattatccaaatctcattaggatcctattaaccaaccacaaaaacgtccacttcataatggtctaatagtacaatttgtttttatgtagaagtaaaagtgaagttcgaatattcttacattgatttcaatcatattttgctactatagattaacatgtatacatcagcatacacatggtccaacgattgagtctatactgcacaaaactctggagatgaatctaaactttggttcgaaattccggcaatgtatggaaaagaatattcaaaaaaataagaagaagcatattgaccgtttcttgttcaatatactagaaggtaaacgtcaaaaatgtcagcatgttttctttcaaaaacaaaaaaaaaaatgtcagcatgtggtcagaactcagaagttcttaccaagaaaacttaactaacagttaccatttagaccctaaattacttatgttgtatttttgtccgaaaactttgattaaaaaaataaaggtgtaagacgatgaaaaagaacaaaaaattatattgtcactgtatctttcaaaatcattctaaaatgatagacatgtatcttagcgcctccaaacttttccactctatgaaaagttgttcttcgttttttttttttttttttttttttttgtcaattgttcttcgtttttgaacttctattttgcttcgttttgatatttttatgttttcgtttatatttttgaatttttctttctttcgtttgagttgaagaaaaaacagttgttattatgtaagaatttaaataacaatttcaaaaaggaatattttttttggtcttactaaacgtctgaccggcatgtttgaaatatttcagtttcttgttgcttcttgatttaaccatccgaatctatctaaaccaactaaccaagtgattgaacaagaactaaaccgatttttctttgatttgatctgaatccttaagtagtaaagtccaaaacagcaaatactaaaactgaacacaaactggagccgaactgaatcccgaaggaacaggtgttacctattccgacaacgataaatctcctatttttgggatgttttatctattgaaaagttgttgaatgaggatggtctaatgatttttccggtctctccttacaaattacacttttatggttcaatccactcttaaaaaataattgaagtcaagattttcagcctgtggtcggaaagtccttacacgaaactgaagtatgatataaatttatctttagcatatggtcgaaaagtctttacaataaacttagttaaatagtagtaaacatatacactagctacacgtatttcatctttattatggtcacacatactacacaaccaacaaaaactacaagacgataacaacaaa

SEQ ID NO: 12886 - DNA, 3000 bp, Unknown; identical to SEQ ID NO: 12879
  misc_feature (1)..( 3000): cDNA_ID_1807330_gDNA_ID_2214578_Annot_ID_135214 3000 nt of promoter + ATG

SEQ ID NO: 12887 - DNA, 3000 bp, Unknown; identical to SEQ ID NO: 12878
  misc_feature (1)..( 3000): cDNA_ID_2709849_gDNA_ID_2214578_Annot_ID_135215 3000 nt of promoter + ATG

SEQ ID NO: 12888 - DNA, 3000 bp, Unknown
  misc_feature (1)..( 3000): cDNA_ID_2709845_gDNA_ID_2214578_Annot_ID_135217 3000 nt of promoter + ATG
aatacgaggaagtgaccatgcgtgtgactgtagaaatgattttgccggaaacatgaacaagtgttatgattcatgtagaaaaggcaaacaacatttttgagtcaatcttgttgtcaagcgaaccatcatttccttttccaatctcaaactcaagcattttggtttcttcatcatcacactttaaacatcgatttcggttatgattactttgtgtttccatgattgatacgtgtagttactattcttacaaggtctacctcaaattagctagcattgcatcccatgttcttttgtacgtccaatatgtggctaatataatatactaatatggtcatcaggtcatgtataagtataactatgatatatactagacattgattaatttgaggctaaggagaaattaaggtatgtgttttagaatccattctattaattttagaatcttaaatacatagatgggattcacgaacataccaacacacttcgtcagctcaaaaacaaaacaaccacatgccgcatcgcacaaaccaacaacgaggcttttttttttattggcgtctacttctcatatgttttttttcgtctttttacaatgaagtaaacaccaaatccctgaatgcatgtgatcttcaagtcttgatcaattgggtttctaatttatgcaaattttcctttttgatttagacttctctcttctttttttttttttttttgttgtctaaaattttagatttagacttctttttgtcttctaattttcttactctatcaaagggaactgctagttcgaatacacgggtgaagcggcaagacgagaaccaaatgaggtacatgtttgaacgcgattgaggaaccggatgtgcaatacacatgacaaagagcaagccggtaagaaaacacaaacaagtggcaaaccaaatatatatgtctataaccaagttgagtacatgaccactgatataacatggactataagaccgtttaaaatatttccaaatctactaaaatgtaagataaaattctaagtaattcaattataaagtatatttttaattgaattttccaatcaattaaaatctacaactaacatagaaattccttctttaatttaaaatgtatatagtatttgatatatataaatatatagagaattaatggacagtaaataatttttgaaagaaataaatatatgccggtaactcgttgttattcattaaaagcaaaatctatacgtcaatgttttttcttttttctctacgagtaaatgttctttcatttctcatgcaataattcttttcctcggtttgagtgatgtttgagacgaaactaatattacatgctgtggttttggatctagtaaattacgggcttcgcctcagaacctcttaaatttaaagaataaagaaaaaaaaattttttgcctctcacaacgtgagtgatgtaacacgtcacttatacacgccaactcttctcatcgaaaaattactcgtattacgttagtgattcactacaaaataaggattcctcttattgcgagtcaatctcatataataattatcaagttagttttatagcaaaagtattgaatttcatggcaactatgagtctatgactaaccaagcatgacatttgttataataaggaaaagaaacattttatatttgaacaacttgtgttgctatcataccagcggttaccgagatcaaatccatgattacattggattcacaagacatgatcatttagtaaccgagatttttcttttttctttctgttgataatacaatatactaaccgagattaattcatgattacgttggattcacacgacatgaatatgactctagtattttttgtttttttaaaaaacacttacatcattcttttgtagtgagctcatttctaatatagaaaactttttggttgttttctaaacataatattgattataacaaaaaaaaaaactttttttagataaattgttttcaaaaatttataaattagccaaatatctttataaattaatagaatctcacggttctgatatattataaatatatagaagttttactgtatatattttctcaattttgataatggttaaacttttaaaatatttttcataaacgaataatgtagcattactgatgataatggtgtaatattattgatcctatacgtaagaaatcagtgcttgcttactgatgaccaaaaaaaaaaatcagtgcttgcttagaaacatgtagaaaaattctaccgacaatctagaaaaagtaaagttcatactttgcacactctcctttaatggcatgacacatcaatggagatagatttctcagtaaagtacaagatgatatcttttgagaataaaaagaagaataaagaactcttacaaaaaactttcatagacacccgaactttaataatttatttccgaaagtgaaaaagtttaaacctttttctctacagaataagagaaaaaaaaatgtcaaacaggttttatccacacaaaagaaaagaaaaaagaaacgggttttcagtgagaagaatgaatgatttaaatttgttcaactagaaaaagaaaccaatgatactgtttctgaaaaatctgagtgaatgaattctctcatttatgaaaaagcttcaacttctttctgctaccaactgtctacattacctcttctctctctctctttctctttggtatttcagaattcccaattaaaaaaagatactcttgtcataatcagaggtaggggaagcttaatattatatattaatctatgacaaaaatcctcctttttcttgtttttatgtcctttggtctctcgtgttcttgagaagcaccacagagttaaacaaacactttttctatcttcagatctctccttaatatttgtcttcaactgtttcttgcatgagtaccctaaagtagcttcagtgagattttcttttttctggaggcagattttgttgtttagctccaagctttcttcaatg

SEQ ID NO: 12889 - DNA, 3000 bp, Unknown; identical to SEQ ID NO: 12875
  misc_feature (1)..( 3000): cDNA_ID_2712728_gDNA_ID_2214578_Annot_ID_135220 3000 nt of promoter + ATG

SEQ ID NO: 12890 - DNA, 3000 bp, Unknown; identical to SEQ ID NO: 12874
  misc_feature (1)..( 3000): cDNA_ID_3026897_gDNA_ID_2214578_Annot_ID_186386 3000 nt of promoter + ATG

SEQ ID NO: 12891 - DNA, 2610 bp, Unknown
  misc_feature (1)..( 2610): cDNA_ID_2709841_gDNA_ID_2214578_Annot_ID_135221 3000 nt of promoter + ATG
aactagtgaacttatggtctaatactctaatattactaacatgatttggtttagtttttaacttactatttattttacgagttggaaaaagctttacatgatatgtttttacgacaatgcatcaattctaattcacctaacaacttgtaagccaaacgatatatattttacaatagtcactctcaaaatgaactaaagatttccaaggctatggtttgttcgcaagattaatggaagagtgattgattgataccccaattggtggggatattgatgttatggtatggtttttgtggtcctaaaaattgatcactttgcaagttttttttttcgtcctttatccgaactcttgtggttcctcgatcttcttaactaccaagaattattatgtgatgagatttcgcatctacttttcttcccatctcttcacctactcaattacccatgacttagcttttttggcgaaaattttagttatgatcagtggatgtatttgttgtagatccattacaaattttgtgtagccgttagtttctcaactgaattgaaatgtatttgacaaatattatcacatcttcgaatatcttagtaggatctatatgatgaatactaaatgtctcaaaccatcacagtttataacatgaaattctattatgacactctgaatttgaaatatattttctatgccacctaaataactctttgttgaatataatttttattttcttaataggatatgcaaaaattaatattttatcactttgtaagatctaatcaagagtaattaagagttaatcagcagttaacttatgaattaaatcaagtgttaacatgcatttcaaaagattaaaatcacaaaagagaaaaatgttttcttaaaaaaaaataaaaaaatcttatcgtcttttattgtcccaaagaagataacgaactctgtacaaaagcttctaaccgtcgtttaaattttccataactttgtaaggaacaaatgaggtaaaattttagtttacttaaaatttagttatgttacacgacatcagaataaacttacagagacaaacaaaacgtgtaaggccttgaaccaagataactacgtctagttccaaaaccgcttttggctttattcaatttccttgtttatcatagtatcgtagcatctttgttattcagtttgaatgataatagtattgtggttaagagtatagtaaaacatctacaacaatactccgtaattagtattttgatagattaatatattttggtcttaaattactatttttgaatcaattagtaactttataaattaatcaaatcttatatattttcgacattactaacatagtatattgtttttattgttatatatgtcatcaatcacaaaaagaagaactatttgtattgaaggccaccacttatctcttattgtgtttatatctcaactagttattatgttaaaggtaaaactcttatcatatagagcccaaactgttctaataacaacaattaaagataaatctaaattttgataatttgactaacatctatgttgtatctcatatgcaaaaatatatgtttgtgatttcactatgcaaaattaacatctatgttaaaactttctatatgaaaatattatagttttttaataatacttacacatccaacattcaaacaatgtgatttcactccatagcgttttttgttattttgagatgttaattttgtaatgcaacctaaacatcttcatcttctcaaaaaatcttggtatactttaaatatgttgtttctgcttactttttttttggtttataaacatttgattattcttgtttcagttgatgaaatctctaacttgtttttctttttgatcatgttatagagttgtagttccacttgagaatatgtctgctatgcaaattacatatcatctttttcaatggcttacatataattgttgtaaaattcatgaataatatcacttgattatttaatgttatagaagatggattaaaatgtttaaaacttttcaagattttttttgaaatttcaataatatgaccaaattgtttttttttttgaatttgtttggaatattccataacaaccggaccttggaaaataaatacatgcatgtttgtttgtgtatgatgaatacatagacatgtttgtggttgtggctatcatgagtcccttcgttaataaacaatgatgtaggaccaatagctattcaataaccaacaaaacgatcacacaccaagaaactcttcttcactctctctaattctcattctcatttctcaccatacaatttttcatctccctctctttatccttttctagattttctttttacccttcaatcacttatctctatctatctacctttcatgctctttcaccactccttccataaaaatctatcaataatcacttcctctctctctctctctctcttatacaacactcaagaagcgagacacagaggagagagttagtcttcttctctgtttttgtctctttggctatatatattcaaacattgtgtgaacagaacacaaatcaacacaacacacacaactttgtgttctttaagttttgtttcagagatcaatg

SEQ ID NO: 12892 - DNA, 3000 bp, Unknown
  misc_feature (1)..( 3000): cDNA_ID_2712786_gDNA_ID_2214579_Annot_ID_135224 3000 nt of promoter + ATG
atttgcatctgaagcacggtggacggaacatgagtatgtaagtacactaaatatttttattcaccaacctatgtttaaatttttttattataaaaaaatctaattaattttaaaattatactgatgcaaattaacaaaattaaatttatattttgatcaatttttgtattagtggtttataaatatctgttattgtttatttattaacacaaaaatttaattaactattaatatatatatatatatatatatatataatctgtaatccgccacaagaagtttttttaccaatcaaaccttattctgtaccgcttattttgtactaaccgcacttgtcccacaaatatgtattctccctgcatatacctcagttgaaccgtacatcattgtaataacgctttccccgcacaataaaaaccgcgattaccattcagacctttaatgaaaatatttaaagttgtcacattaccaaattatgcacatgcaattagctagaagattaaaagataattctattaacatattttaatcattaacagtaaaattgataaaaattccggaatagagcggaatgatgctgaaataccgtgacacaggatatacacaccaagaagatcaagggttttgctggatattcacaccaacaagatgatctaatcttaaagagttttagaacagaagatagatgagttctcaaagagaatacaaaagggtttataaagagaaaagagaagagaagagaccaaaacatgatcaaaacacaagcccttctcgaaactaacagaaaattaattataagtttgaattagaaaatccgttttaaatacaattgactgccatttaaaataagatggcatagcaaaaaaaaatctccaacaatttcgataattttaccttgtgttctgtttttttttactttttgacagaggagtttcatcatacattcttcttcatctacaatagaaaaagagattattgttaattaacttgatttgatgtttgttttgtgtctcgagaagagttaatggaacaatgagtcaaaaaaggcagaagagagagagatggctatgcgaaatgaaagaggcctagcgaagaaacaaagccctaataaaagcagagaaatgaagcgaaaatgcgatcacatccatgattcatttatttttaaatttatttatgttattaaaaataaattataattaaaaacatatacaaaatatttttagttattgtacctaaacccgcaccagtcccgcttaagtttttcaggtaacagaataaatttaggtgtgtttggttactggttaaatagaataatgaatttctattatgtttggcaattgaaataatgtaattcagaagaaaaaaaggaaaatttgacaacattgtgagtttgtttgttcagaaaaaacctttttctactatagatgattactttctgagctaaaagaaatgcttatttttagtttgacatctaacttctcacttgtcaaattactcttttcattactcataaaaatgcattaaactttttttattggttaccgtgaattaaaaatatataatcacaaggatatgtagttgaaaagacttcgttggcccttttcgaatgattttaaaaccatctcatacgtgtgctaaaagttttgtctaccaactgtttgtcgaaatgcttccgaaacgttttttgtttgttgataaactaataataattctgattttctggtattttttatttgttgtgccgactattttgcagacacgagagattaaaggtatcccaaaaatttctgggaatatagttcttattcaccaatcatttgtagcaaacaagatagaaaaaacatgcctaattctccaaagtttgttttcataagtaattttgaataattttcatttctctttatttacttccattattttgatatatagttcatatccatatctcttatgattaattttttaatcataacatgagaaacgataggaatgaaacctatttgtaggcgtttacgatatttcttatgatacattttttttgtaaattagaatttagaagtagtcactttcgttttcattactggttcaattagaatgagatatgataaaactaataatttttttcaattgtctgctctacaatctacacaggattccaaggaaaaaaatactttaggacttcacatcaccacatcagatattgtcaaagacaattttgttttgtgaaatcgaatactctgaatccggctttgatatcgaggaaaaaacgcttgacaaagcattgaaagaaaaaaaaaatattagttaaaggaaccttatacattttatgaagtttttttttttgtaagcacccgaaataaaattgatgaagtttgagtatatcactatgccttatggtttttgccgaccaaaatatgtcgaaattatgaatacatatattttatttatttatttatattctattaaaattattttgggtgtaataataaaattaaacttctatcaattttaaagggaggattattaatttaaataacattaaatcatatatgatatataatcaaataatattttagtaatcttaaaattaaattaaaatttaaaaactgatatttagataatcataaagtattaacccacaacaataagtgattacaatttaaagaactactattagtttcttaaaatattttaaaagcacatgtgttctaaaaaggttacaggtagataagcagtctgctcctaaagaactataaacaataatcacttttaatttgtttaaaaccagcttgtttcacgccctaaattaactaaaatatatctaccattattccagacaaaacgacgtcggttggtgtgtttcacgccggcttggtgctctaggcatctatctgattctcactatcactactgacacaaatccttttccttttgttcctctttctctaaaccaatctttaaaacaacttattcgtcttcaagatttctccaacaagtcctacc

SEQ ID NO: 12893 - DNA, 3000 bp, Unknown
  misc_feature (1)..( 3000): cDNA_ID_1027604_gDNA_ID_2214579_Annot_ID_135225 3000 nt of promoter + ATG
tctcattgcagactcagctgcagctgcactgatgaaagatggtcgtgttgatggtgtcatcgttggagctgatcgtgtggcttcaaatggtacactcaaacaccttagataaatccgttttctctcacaaatctgattccttatgactgaatcacttcttaaccaattcattgatatactccaggcgatactgctaacaagattgggacttacagtctcgccttgtgcgcaaaacatcacgggatcccattttatgttgctgcacctcttacctcagttgatctgtcactttcatccgggaaagaaatcgtgatagaggaaagatctccaaaggagttgatgcacacacacggaggacttggtgaacgcattgcagcaccagggatctcagtttggaacccagcttttgatatgactccagcagagctgattgcaggaatcataaccgagaaagttcgtttttccagccttgcttgttctggaagatatttatgctcatttatttgaatctctcaacgtgtttgtatatgcagggggtcataacaaagaatggcaatgatacatttgacataagcagctttgccaagaagataacaggaaactcatctcgttgaagttagagtcagcattgcgacttgcggatgttcccctctctctatatacttgcaacaaagcaaattactttgtaatgtttgagctactaagtacactgtggtaaaaattgtcaaaaataagaaataatcgatacgttttagccaattgtaggtagccaaaatgctggtcttgggtttaatgctaatgaagattgggaaacaacttgttttagtgtaaaacaacttgtccatgggcttgcccggtccatcttgacttggttcttatttctctatttttttaagtttaagaaaagaataccgtttctcctacccgtcaatattgaaataatttcagaggttttccttgttctgtgtcaacaaacaattcgaaatgcctcgactttatcaattttttgataattctgaactttagaccaaatgcatatggacgagctatattctggaccaaaaaacaaatggtctaattgggcatatgaccagttttgtccacggataatatgggcttgaccatatggacaacgggctgcccatgggcatgaattgagtcaatagacatgtcttcatttaattgtatttttataattttaattacaattacaactaaataatttttaaataatatattttacatttataagtttttacttttctgaaaattttaaattttaatgaattatttcttattaaattatttacgattttaaaggaaagatagtattccacaattttctggaatacgcaatttttaaattttacggttttgacgggaaaaatacaattctccgattttacgattttgacggaaaaacgtaattctgcaaattttccaccaaaatcgtgattttattatattggcgagaacacaattttacggttttgacgggaaaacgcaattctctgattttacggttttggcgggaaaacacaattttccagccaaaatcgtgattttattatattggcgaaaaacacaattttacagttttagtgagaaaacacaattctccgattttacggttttagcggttaaatcgttatttttttgtatcggtgaaaaaaataattttacgattttaccgttttggcgaaaaaagcaattccataattttttcgtcaaaatcgtgattttattgtattggtaagaaaaacacaattttaccattttgtcgaaaaaagacaagtcttcgatttctacaatttttacggaaaaatgcaatttctcaatttttctttaaatttatgatttttgatttatcaataataacaataataaaataggctaaccatgggcttgccatatggacatggtctttattgggcatggacatttttcggaccaaaccgtccaacttggcccataaaaaaactgtccgtacggacacgcccaatggtctttggacggaccatttgacacatctagaaacaaccgtcagcagtagccattcgttaagagtttcagaattccgatatatacattttgatacaacctacacaaaaacaaagacaaagagagaaaatccaactatgaggaggattatcttgttgatagtgccatcaaaaacaagagttagttattcacctgaaggtttggctaaacaaagtatattatctcttttcatatacctgtcaattacatcttgacgctgcattgtcaacaatagagacctcctatgtcctttgtattcactcttggctttcttaagtactctagtagattcatctacaaatgtaaacatggttgtcttcgccgcgaggtcgtttgcatgttcttcttttacttgtttcgtttcagttcgttcttgatcctgcaagatcgggcgtcttctcattgcggcgttagttaattaaagtattttgtgcaaaaaaaatttccgtccaattttgcaactttatactctatgtccaaaaaaaacaaaataattatatgaaatttaaaataatacgtaatatagtcaatttttacaattttacatattgtaaacgtaaaaacatttgtttttgaaattttttaaaaaataaatagttaaactactcatatcaagaattttgatttgatatattatttatcaaaatttaaaagtttaataatatcaaaaaaaattatattgtgtatttttttaattttatataattattctgcattcttttaacgtgaaatgtaaagttgcagccccagggagtattttagagttttttcgaagataattgtaatcttaacttattatttcaagggtattttgggagattgactatttttttttgggttctgtcttgaagacaaagaaagctttcttctataatacatctttctctacagatcacacagaagcaaaaattccatctccgatttcggaagagagttgttctcttctctgagaagaagaag

SEQ ID NO: 12894 - DNA, 3000 bp, Unknown
  misc_feature (1)..( 3000): cDNA_ID_2712782_gDNA_ID_2214579_Annot_ID_135226 3000 nt of promoter + ATG
attaacacaagacctaagcaaaacaacgtcgatgatttgacgctaacattcaaaataagtgacaatgagtaagtttccttctttgatagtttaattcgaattacctaaattatactattctaataatatttttgattttatgtttagaaaccgtgttttgaaatgtctagctactaagaaggaagctcataattatcgtcgatatggtggtggagttattgtcgttgttcttggttggtggaagattgaccgttattttgatggtccaaagaacgtacgtgtttgcaccgcaggcccgatatcaaccgtctttccggatcctgatattcccgagtctaacgagatccatgagatgtaagttttgatctatcatcaaatattcttacatttcgttattagtaattatataaacggaatatctatactattatttataattgcataccacatttgtttgttttgtaggctccgtgatgaaggtgcaaggaatggcggttgaacatctacttaaaaaatgttcttacatgtaccctattgaactcggtctattattattttaatttctgtatgaacaagtttccatttttatttatgtatgaacaagtttacatatttctaatttagaatacgttctaaatcttgatatcttacaatatcgcatcgctattattgacaaaatttaatatgcttcatcctaaaataaatcttagaaggtatgacaaaatttaatatcaaagattattgctttttttttaaaacatcttaatattgctttatatatctaattctaatatttatttattcgtctgtctctatcagaattgcaaaatttagaaaaatatatttattattgctttggcttatgtctcatataacataattattttatcaacaaatgttagtttcacattctgtaaatataaacatatataaaattagaaattttctgattatgagatactgttaaacttctataacacttacatacacgaaaatgtacaaagctactatgtgtaaacttacatatacaaaatataaaattacgttcccaaacgtacatatcaacttagacattgtttgcatgctacaacccgaggaaactatatatacttaccaaaatattgtttgacgagactaaatatatttattttattccaatgatacatgatatacaactatatgtttacatataatgaaaataaagtagagtttatgtggaatacacagaacttaatatttgatgattgatttaaccaaagataccgtgcgtagcacgaatactgacctagttgtaaattataaatatgtacacacaaaaaatttaatggagggtataattgtaattttgcaatcgtcttcaacctttgtaaccctaattttgcagccgctttttaacagttatctcactaattataactgtcaagctaacagatactaaaagtctaaaatcatcaaactacagtaccaacttccaagtgatttcataaaccttataatagacaataattagtacattcatgagtttattagagtcctaaaacatgatttaaatgatcaatataccgaaagagtgaagcaagatgcatgttcagaaaccaatttagataaaattctaaatctattccaaacttagaaaacgactctaattaaccaccaaagaaaagtacttaattagacttacttcttgattgacttagatattggtgagactaaggtaaacactaagtacaatcatttatacgactttgtaaagtttgcggatgtttcagctacattggagaaaaatgtacattacacggacaagagcattaatcgaccaatttggaagaataaactaaagagtaattaatatgatattcatgttatgattcctcaaattttacaacatttaattttaaagtgattttttttgtttccaaatttcacacacgtgtttccctcttcatttctcataagaagttataaaacaaaaatatccttcattaacaataaaattatatccgagattgattatattttgaaaaattcctaaaaataacactaaaacaatatttttggataataataacacacactcaatcaagttctaaaaatagcactacttgatttactataaagtttttgttctaaagaattatcactaatttattttttcaataataccataattttatataaaatctattcaaccaaaataaattagaaataaatttaattaagggtatatatttcaaccatttaaaagaaattttaattcaatttaatattagtttatggtattatatttgggttctctatttccaatttaggatatatattttcaccatttaaagagagatttttcattttaaaattagtgtttagtattatatttggattctctatttccaatttatgatatatattttcactatttaaaaaaaaattgatttaatttaatattagattagtgtttgctttcatttttattttgggaattgacacaaatagtaccaaaaaactttattatttagttaatttctagaggattaaaaactttgtctgctatatttggaagtttcaaaagaagtgcaatttttataatattaaagttttttagtgtcatttctgtcaatcctccttatatttaaccacaaagataatttgtctttatctaaattaacaagacacaacccagcctttgcgaagaaggatgcagagacatcagaatttacattgcaagttgtttcttgttgccagacgtgaatggccgtgtcttgattttgtttgtttgttttcctacttttggaaaaaccccaaaacccaaaatatagggtttttaaatttaatctcaagagttactgtaaaaggtatattgttttgctaaatataaaaaaagaacacatcgtttaaaaacactatatagtaaaaatagttgtcaacaccaaaaatatatctataaaatgctgccattcatttcttaaacctttcatctctctcgtactcagaaataatagaatg

SEQ ID NO: 12895 - DNA, 3000 bp, Unknown
  misc_feature (1)..( 3000): cDNA_ID_1808374_gDNA_ID_2214579_Annot_ID_135232 3000 nt of promoter + ATG
aaataaatcgtggagttgggacttatttataatggctgccactcacatttattatttagttttacaaaatttaaaaagatattaaccaaacgatatcttgcctaatttgtttctaaaaatctctacacaatcttttcatatatcttcaaaaacaaaattccgtgaatcttactccacaaatatgcataaattcgatttatagcaaatatttatattaacattttgtatagcaaaaaaatactaatttataataataaaaatattcacataaaaaatcatatacacatacagaaaaagaattatatatatcatcatttaagccgttgctttatttaaataaaaaaaaatacaaaaaattgaaatcatatactttctatgataaatttaaaatctatattagtagtagaaatttaaaatcattcaagaaacggtataacacaggtgagatcctaaaattattgtatttataacaaaaataatttattttcttggattttataatactaatatttagctaacgagataatatagacgagtttatatgggatgacgggttttaatcgatatcaataaagaacagtatatcacggatgaattcttaaaatttacaattaaaatacatttctacaaccgtaaacacaaaaaccatataatattaacaaaacgaatataacttgaaacttaaaaaatttagctataaaaaatcgacccacggtatactgcagataaaatattcaaaattttaaaatccaccatacatcattacttaaaaaaatatgtgttttcatatcaataaacctaaacaatagtaatcataaactaaataatacagagattgataactacattgaaaaatacaaattaatatgatatattttcagttaatctttaaaaaaataacattatacttttgtaaacaatatagccccgcggtataccgcgggttaaattctatttagtttacattttaatgattaaatttgttatctttttgcttttgtatttttaaatgattaaatttgttctctcctctaataaatttcaaattttcctgttattgaagtctatgaaaagtcaaattaacaactaacgtagtaaacgtatctttgaacttttatgtttatggtataaaagcgttgacttttatgtgaaccactttttttttttagtgtagaaactgtttacaacccaagaaggaggcttaatattatcagaataaaaactagacttccatattgagcaagattatgtgaaccaattagacataataatagggttttgattcaagtcatattggcatctacattaataaagaaaatattattaagaagtacatacacatacactgtggaagcccccttggcccaatagttgaccaaatgttcattaatgtttctacaccaagaggtctggggttcgagttctagctactacagtttattagcaaatttgcagattaatggaggcaagtgtacatgaggtctacaacgaagtacaattatagccgttcgccaagattttacgcagagaaaatgttgaagatatccatcaaacgcatggagaatgagaagaatgtgtcgtctgtcgtggatctaataaaggtcggaaggaattgtgtgtagtagaatcgtctatgtaacagttttcataatttgtaataaataataaatttagacggcaaaaaaaaagtacatacactcatatataatagcagaatatataaaactttttaagcaattacatttatggataattattttgtggccgaaaaaactgagggatttatattactactataaaagtaatataattatatagaaatgggtaagagagaatcaaaaacgaaaaaaagcaaaagaggattttgacttgcacacaattgtcctccggcttcacaagtaatcaatctcccacacgaatttgcatgttactactaaacttttcacatttgccaaatggatttttttttgtctttttctgctatataccaatgaacttcaaatttttagatttggaagttttgtgtcactctatgatttctgattctcccagacgatttgtttttttactggataataattagaatattaacagatttgcatcatactttgcaaaatattatgatgtgcatattaaccgaaccaaaccaaactgacccgatctaatcaaattcaaaccaacccaaatcaaacctaagcttagactcaaaccatttggttgcattttgtctcaacccaaatgggtcggttcggttcggtttacaatcgaaccgaaccaataatccaatgtatttattaatttaattaattaattatattaataatattctaaataattctaaatatttataggttgaattttctatgtttttctttctagttttgtttgaattatgcatttgtctcaacccaaatgtttgaattttcatactgtatatttaaattgcataattcaatttttttatttatttattaataatattgtaaaccacaaacacatgtcttgggttttttaggtttttcttttcatggttttgtttgaattatgcaatttaaacatagaatttaatacgttaattaattttttgaatcaaactaaaaccgaaccaaattaaaaccaaaccaaatcaaaccgaaccaaattaaaactgacccaaacactaaccaaaacaaactagttacggttgaatatggttagaattttacaaaatccaaataaactgaactgaaccgaacccaaaccgaacctgaagttaaaccgaaatgtccgcccctataataaacaatgttgagacgtggtgcttaaacagttaaaagtcaaaacgtacgtcgccaaacatttgaaaaaagtgaccaactagtggaccaattctcttcttttgctttctttagagtcaagaaacaaaacaaaacaaaaaaagtaacccataccgccataagaatatctatctatatatacaagactaatacaagagtttagtttgttagttgcaagaacatg

SEQ ID NO: 12896 - DNA, 3000 bp, Unknown
  misc_feature (1)..( 3000): cDNA_ID_2709885_gDNA_ID_2214579_Annot_ID_135233 3000 nt of promoter + ATG
gctaacatgtcgattctggatcttttgacactacttgtcccttcatatgctttagcaagtttatcccatgcttctttagctgattcacagttttgaatttgcttgaattgattttgattcacggagttgaatatcaaagacagtgcccttgaattagctgtggcctttgcctcttctgcatcattccattgatcttcagtttttagcacatcttctccatcttctcccttgatgaccggagccttccatccaatgctcgtagcaatccaggcttcttttcctagaccacgtatgagagctctcatcttcactttccagtgtccataatttcctttttccaatatgattgctttaccgacttcaacgaactctttggggtagtccatcctctccgcaggatctgcatctgttgttaagtacatcttggttcagatgcccgctctgataccaaatgaaattccggatgaacctaagaatcgtattccccaaactcagaaccaccgagtatcattttattagaaatctgattaagaagtttacaactaccttaattggttttacacaagatataaactactttaccttgtcacctgagatttccctaaacacacaagagcagatcacaagaacacactctttgatctctctagaattccaatcagactaaaccttagtctctaacaatgaaaagcgttgcactagctttttcactcacaatcacggccaagtctaacaagaactttagcacctctatttataccatcgaggtcttcggtcttctaggttagccttcaagatcttggatcactccaaatcttcgcgtgaatatcttctttccaaactgaactcctcctgttgtggtctccacgtcattcgttcatttggcggcatatccacgtcagcatcaattacttgatcttcactttagtcttctgaaacagcttccagcttgttccagcaatcaacactccttctgattgttctgacagagggtgcactaacatttttatctcccaaaattgtctacttctttgtaggctattattgatggtagaaatcagattttggtcagcgtctgggcttgccattgcctcctctagcttttgcctattctcttcagtggctttttgactattttgatgcttagtcctagttcaggtaatgatttcttgtataaatctactgacattttcctcaacatcctccatggcgtcaaagttccaagctgcttaaattaaaatagagacttcctcattgtctttcaatcttttatcgtacttaaaaactccttttttcttttcctcgaatacattaaagtgagtaagaagtggttgacggtctgagctttcaaaccttaaatactcccaacgactggatgggtaagccttagcccttgttccatttgacatagccctatatagtgtgcaatgaacaatgagctcatgtctctttcctctccaagagaagaagttgctcaagtgtctgagatcgtataagtcacattctgacatgaatgacctaatgttcacaaaagtaccttcatgtatgatttgtcctccttgtttttctgatgcatcaatgatgtcattaaaatctcttgttaagtgccaaggttcttctctattcccatgaataattaagatctcatgttttcaacaagtattactaaaactattatttttattcttcaaactcaaaaagtagagctatatagtgacaaaaaaactgttgcacgtaaatttatcgtcataaaaatgacttttaacataacacgtgaattacacattgtttaatgatacgttactaaaaaagataacgttattttttgaccaccgatttttaagtaataaatacatgaattgttacaagcaaaaaaatgttgagagcttattcaatttcatcatactagtgtgacatcattgctacatatattgaatatattgcacgtttttagttacacatataaacactcgtatgcataactacgtcaggtatcccgacaacaaaattcacctaatttgttttagttagcaaacctgatctaaaaactcaacattatgggtctttcaacttgagttaagtacacaaactctcccataccaagctgtgaagagatccaaaaaacaatatccaatgtctacatttatttttatttctattttaaagaaaatataatcgatttagcttcaataactctaaaatagaaaaaaaaagaaattactatatatagattactcttaaattttcaatcaaaatccaaaaaaaatatttctcaacataacacatcttactactttaaaaacctcacaaaatagttattatattattcttagtcaaattcataacctatattccctattttccggtcagtcatatgcttttgctaataaacttaaatatagatagatctgataaattcttttcggaaccaattattttcttcccttaatttattagttgttaccctttaaatgatcttaattctaaaaaacagaccaacaactttattagctacccttaaatgatctttagttttcaacaaactcatcaacaattttataaattcttaaacccaacatcatccacccaaacacaattattaaaaaaacaatctatatgtttataaacatataataaaataaaataaaaagacacaaaaagaacgttgaaaaaagaaagaaaaagacacaaaagaacgtttgaggaaaccaataaaaagaaaaatgggcctgagagactgaagaacaacccttttatcacgtatcgtgtctccagctgtatatatatttcccacacacactctttttcaaaaccccaccgacgatggcatttccgttattattctaacggtcacacgtcccttacgtgtccaccacttttttttattattattttaatcccatcactctttctctctctctccctatcttcttcttcttcttcttcttattccccacactctcttcttctctacttcaccatcattcacacacactcatg

SEQ ID NO: 12897 - DNA, 3000 bp, Unknown
  misc_feature (1)..( 3000): cDNA_ID_2709857_gDNA_ID_2214579_Annot_ID_135235 3000 nt of promoter + ATG
aaacatttcaacagtcggcggtatcaaaatcatatagaagaaaagtttaatgtattatcttaccaaaggccaaagagacgatagaaatctacgacaacggaaaacggtttagattacattactgaagaagagttttaaaaaaactacaccttcatagaagtactagacgaaagtatattgatcgagatatcaaaaacatcatccctctaaaaaaatcagacgcaattatcgaaaattaatggtattttagctgcgataacatctaccaagatttctcccataacttttttgatctctttgtttttaacttttttttgccaaaggatcatatgaatatgtttaacatatgttgtaaaacctaattttcatataaatgatatttacatgagtagaaaaagtaaagctaggccaaaggctaagtgtgactaacacaattatagattatgatagatcattggatgaaaaaaaaaaatagagtaaagccttgatggaaaaaatgagaagtgggaccgagtaaatgtcaactcaaactgaaacaaagagaatctctcaaaatattaattatagttgagagatgaataagtcgccgtcttcagacaacgcggagagatctttcttcacctttgttctcattatattattttctcttctaattattgatatctaaaaacgatgtgtttctagaagatcgacaaatttgtctatctatctataataatatatatattgcatttctaccaaactctctttctcatctttgttttttgaggtgtttgttgaaatgtaaatttctatgatttttcatttgttttcttagttttgaccaaactattttgttgactatgttgttgcttggagaagaagggaaagagaggagtgttaatcttctagaatcgtaatattttaagttgactctttctaaataatattatcgtttatcaaattatttgtagataggcatgatgacattagaattttagttgttgatctattgttatatatgtttagcttgttagtagttcatccccataaactaaagattgcaaaccttaaaccaaaaaagttcacaaaactcctgataatctcccaaagtctctatttggaagatagtcattgcatagttcgaaaaagtgaggaggactacaacaaaagatagtctctgcattcataggtttgaactatttctttattaaaaaaaaaaaaaaatagttagaagacaaaaagtaaaatataatgggaaaaacaaatcttataattcatggggtttccagaactttagttcataatatttcttagtatccaaagtttgattttaggtactccaatttaaagaataagtgaataatttcgtagatagtatatgtaatccaaaagatactatcactagaccattgttcctttggtaaaattggaaatagtttaaaacaagaagaatttcatagacaatatgtaattttaataacagtttgataggaaacaataattttcaattactatccatctatcctttttagaatcgagatacagtaaaccctcgataaactaataatattggaaccgtgaaattttattaatttatcgatgtattaatttatcaataaattaattatagatattttaggctaattttgtaattttaaatactttatgttttaaaaaaatacttatgtataattattatttttttagaactaattacaactaataaaaaaatattatgtatagaaaacaacaaaaaagattttgaatatagtaaaaatattaaaaatgaactttagaaataatgtaaactaaaaatatatagcagagtcgtatttcaccaaaattttcatttataatatattaaaaaatttatacaattattagtttatcgagtattaatttatagaggttttatgtatgctgtatatttaacgaatacatcttttaaatcatatatatgaaagcacgggattatgcggtttcatcaacacactcaaaacttttacctatgagtaaaaattaacaaacaatatacagtgcttaataagaaatatatagttttcatccttcataatacaaactctcctataaaataatatttgtagaaaagaataataatttttaaatatattaaaaaaaaaaaaaaaataacaaaatccggcgggtagcgcggacactcacctagtaaagcttaaaacttaaaggatattccatgggaattaatatgtgatggttatttaatttgattccatcaaatagttaacagaatttaagctgtatatttaatttcgtaaatgaaaatatgttattatttttttactgaaatcgtgtgattattaccaaaactagtagtcaattttgactggtacaaaccaccaccctatccagcttgtaactactaaaaatgatgaaaacaaaatagaagcacacatacaaaatagctttattattgtttcttttaaattcatactcaaactctcaaattcgaagaaaatactaaacaaaattattattttatcagaaacttctttttggcgtcattgcatcagaatcacatgtttatggtccattgacgtaaaaagataacacgttagagaaagagggcaaaagctgtcatcgtctacaattttggaagcaccccaccactgactaaaaaatcaactcgttaataattttcttagaaactactatcaacaaagaataaaataagcatgtgttataaaattagggtgatttatttcaatgtcaatataaagccaccccaatagaatgagtttttctttgtgttaaaggagtagcaatagtagtagtagtaggtgaatttgaattgaaattagtaatctataaagtcttcttcttcttctatctctcctcgtgaccattaaaaaccgagttattatatttataacataaaactttatattataaagtcttcttctcattttctttaaaaaccattccatctctcattgcaaaccaaacaagaagaagaaaagaaacacaaaatcaacaacaatg

SEQ ID NO: 12898 - DNA, 3000 bp, Unknown
  misc_feature (1)..( 3000): cDNA_ID_2712760_gDNA_ID_2214579_Annot_ID_186437 3000 nt of promoter + ATG
agaaacgaagggtgtactgtacaaaacttttttttcattttttttcgaagagtgccacttgttattgagatgctgacacttgctatattttcttggagatttttatttcatcttatctttttacaatcaattattacatacaaaagtttttttttaaaaatatatacttatataaaaatttatgacttctatatatacatttttgcagccattttaacaaataaatcctataactggacttatttacaacccaatgccattagcattaattttttttccaaaataattaattttactttaaattcttaatttaaattgtcaattacattatcaatcaaatttaatccaaacaaacttcacattaatcccttaaaattagcataaacgtatttgttagcaatattttaaaacaaagttttttgtttaaataaatattattcttactaaacgtttttttgtctaaataaataaaccctgtatttgaacttatttacaatgtcatgctattggcattaattatttagaaattaaaatatttaattaacgatttaaatcttctaaatctttgcttttagagttattatgtcattacctaaaaggcaaaaaatatatatatttttaaatattattatttatatatttaaactttataaaacattattaatatttaaacaaaaagtttaatatatcaaaaaatttaacatcattatataatatatagtttaaaaaatctcaaaaaaaaatccgtcatattttgtgattcaaaattttaaaaatgaacatatattaaccaattagcgaaaaatgtgtgggttcaacatcccgcatcgactaaaatatttagacaatgattcataaataagatcaacattaataaaataaatgttttttttgcaggatgggttttgcgggacgggtttggcaggacgttacttaataacagttgtaaactataaaataaaaatattttatagatagatacaatttacaaatttttatatatatactatctttaaaaaataaattgtccccgcggtgtaccgcgggttaaaatctagtttaaactctataaatggaggcttggttcaatttatttggacacataaaaaaatgtcatttctaccataattttcttattcttctgccataaattctatatattattctaccataatgtcatttttaattaatttaatttagttttaatagatattttaacttaatttgtttaacaactattattatgcatcacgaaatataagatataagaaaataagaataaaagaaatagtggggttgggtgttgaattttattaataaaaaacattggagtgataaaaaattaaagtaaggaagaaagaggaaatgatgtgaaatgttcaaaattgaggtggaggtgctgaatatgtttttgcattgtacatagttttaagcatttaactattgaattaatattttcaataagtcattgtagatagtcatagagaaaacaattaatcaatactatttttgaatgcccaccagcactctaaacttgcacattatcacaaataccaacggtcccaggaattttccaatcttcatcggtctatgtaaacatagatcatttattttggagaacacatttatattattttatttttagcttttcttggattatgtgatacatatggaaagcacaaaatgaaaaacttcacgaaaatatggatcgagatccaagggatattctcaaactagcgaaaaacaaagacaatgcttggacgttagcctgattggaggttgcaaatgaaattcaagcctcagtggcagttaagtcggttaatataaatctttcaggatatcattgtttcattgatgactcttggaaagatagtgacaagtttttgggcatgggatggttctgtattttaccaaatgaaggacatccaaccatgtgtgctggaagcactcgtctgggcaatgaaatgtatgattggccaagaaaagcgaaaagtaacgctttttataaactgtagatctgatgaagatgatgtattttccaacaaaatggccaacattcgctacatacttaaagacgattcaggaagatagtgatgagtttgatttttttgatttatctctaatgcttcgaaatgtaaatgttaaaacagaccactagatacggaatgttcggatataaccacatatgattatctttgtaaacaatactttttagcattgatttattatttgagttaatctaataaagttgtcggaaaaaacggaaaagtgagaagagaaaaagtcgaaaattcagaaacggtttaaagttaaccaggattccggtttttataacagaaccgatcggttttgtaattgagacgaaaacttctgatatcacttaaaaacttcacagaaacaacacctcgatctcatcgaagctcctctctcttacatatcatcacttcacatcaaccaaacctacttctgtctctctctctcgctctctatctctcacgctctcacaggtttttttctctctctgtctctctcttgttctccatttgcgtctctgtttgtttgatgagtttctgaatgttaaatgcagatgtgttttggttttctgtggaagtttttatatctctgttgattgagtttttctctgatgttgttgggctccaaaaaattcgaaacttgtattatctctcgtttaggtttcgtgttctctgcattgatctgcttctttaatttgttaactatactcacgtatgtgaaaaatctgaactttgtttgttaactctaatccaaatcattagaaaaatgcagattgagatttctctaatgcagtgcttgaaattttggaaactagggttcttgttataatgtttcaagtagtgaacttatgtcaacttgtgctttaggtttgatctgattcttaaattttgtttcatatgtggtctttcttacaatgtttctggatttgttgttttagtagaagaaaaaattagaaaggttgtgaga

SEQ ID NO: 12899 - DNA, 3000 bp, Unknown; identical to SEQ ID NO: 12897
  misc_feature (1)..( 3000): cDNA_ID_2709857_gDNA_ID_2214579_Annot_ID_186431 3000 nt of promoter + ATG

SEQ ID NO: 12900 - DNA, 3000 bp, Unknown; identical to SEQ ID NO: 12896
  misc_feature (1)..( 3000): cDNA_ID_2709885_gDNA_ID_2214579_Annot_ID_186429 3000 nt of promoter + ATG

SEQ ID NO: 12901 - DNA, 3000 bp, Unknown; identical to SEQ ID NO: 12895
  misc_feature (1)..( 3000): cDNA_ID_1808374_gDNA_ID_2214579_Annot_ID_186426 3000 nt of promoter + ATG

SEQ ID NO: 12902 - DNA, 3000 bp, Unknown; identical to SEQ ID NO: 12894
  misc_feature (1)..( 3000): cDNA_ID_2712782_gDNA_ID_2214579_Annot_ID_186420 3000 nt of promoter + ATG

SEQ ID NO: 12903 - DNA, 3000 bp, Unknown; identical to SEQ ID NO: 12893
  misc_feature (1)..( 3000): cDNA_ID_1027604_gDNA_ID_2214579_Annot_ID_186417 3000 nt of promoter + ATG

SEQ ID NO: 12904 - DNA, 3000 bp, Unknown
  misc_feature (1)..( 3000): cDNA_ID_2709865_gDNA_ID_2214579_Annot_ID_135239 3000 nt of promoter + ATG
cctccacctcaattttgaacatttcacatcatttcctctttcttccttactttaattttttatcactccaatgttttttattaataaaattcaacacccaaccccactatttcttttattcttattttcttatatcttatatttcgtgatgcataataatagttgttaaacaaattaagttaaaatatctattaaaactaaattaaattaattaaaaatgacattatggtagaataatatatagaatttatggcagaagaataagaaaattatggtagaaatgacatttttttatgtgtccaaataaattgaaccaagcctccatttatagagtttaaactagattttaacccgcggtacaccgcggggacaatttattttttaaagatagtatatatataaaaatttgtaaattgtatctatctataaaatatttttattttatagtttacaactgttattaagtaacgtcctgccaaacccgtcccgcaaaacccatcctgcaaaaaaaacatttattttattaatgttgatcttatttatgaatcattgtctaaatattttagtcgatgcgggatgttgaacccacacatttttcgctaattggttaatatatgttcatttttaaaattttgaatcacaaaatatgacggatttttttttgagattttttaaactatatattatataatgatgttaaattttttgatatattaaactttttgtttaaatattaataatgttttataaagtttaaatatataaataataatatttaaaaatatatatattttttgccttttaggtaatgacataataactctaaaagcaaagatttagaagatttaaatcgttaattaaatattttaatttctaaataattaatgccaatagcatgacattgtaaataagttcaaatacagggtttatttatttagacaaaaaaacgtttagtaagaataatatttatttaaacaaaaaactttgttttaaaatattgctaacaaatacgtttatgctaattttaagggattaatgtgaagtttgtttggattaaatttgattgataatgtaattgacaatttaaattaagaatttaaagtaaaattaattattttggaaaaaaaattaatgctaatggcattgggttgtaaataagtccagttataggatttatttgttaaaatggctgcaaaaatgtatatatagaagtcataaatttttatataagtatatatttttaaaaaaaaacttttgtatgtaataattgattgtaaaaagataagatgaaataaaaatctccaagaaaatatagcaagtgtcagcatctcaataacaagtggcactcttcgaaaaaaaatgaaaaaaaagttttgtacagtacacccttcgtttctgagtttgaagcacacctcccactcacttactaacaagtggcacatgtgggtccaaaatttataaacatgttgaattcacgtaagtttttttaattattcaacaggtgcaatgtggagattcaacagttgaataaataattcaacacgtgcactgtagatagtattatagaagaattaacaggcacacaaccagtaataacatgccaaataaaatgtctcaattttagcgggcattggactttccaagagtgggcttggagaggccgtaaaatttgggccaaaataacaaacttggttttcacctatcgtcatttgctccgtataatatcctgattcgatcgtatatttttcagacttcgtgaagtgccaatccaaaaaatcaggtttgttattttttcttatgggtagtgcaaatacaaaagggatatccttgggatcaagaatattctgaattaaatctatatttcaagtgtttgtctgatcatcaatcaaattcttgacaagaagatatgctaatgaatataaccattgtttatagctggcctcggggattaagctggtatccagggatcattccatactgaatttgatcatccagagcttattcgtttaataagccctttgttaaccagaggttgagcagatccattggatctggtttttgataatagctcccttcaaaaacctttgcaaataaggaatcatgaaccttaataaaccgccatatttatttcgctaataacccagtattatatcatccacatcctgaaaaccaatcccactattagattttctctcgcataacttcttccatgccatccattgcatttcttttgtttctccagttgagctcaaccaaagttttgctactacattcgtaagttttgacgttaccaactttggtaatctaaaataatacattacataagtaggcaacgcagcagctaccgatttaatcattacttctttaccccctctagataagaattttgccgaacgattaattctttcttgttagcgctctctcacaaaagaagatatcttagttttggagcctcctaggcttttcagtaatcctaaataagagcccatgccccctaaattagtgatctctagagttctcataagttcgtctttcagtgaatcttctttcttgtgtccgaattgaaccgatgattttgtaaaatttattcgttggccaaaacctcttcatacctttttaatattcctaaaacgacagcgcactgctcttttttgtcattctgtaaaagaaaaagctatcatccgagaataattagtgagagatctagagacttgcttgtgttactttcattcctgtaaaagttttttttctttttgctttccgaatattggcaacaaaaacttctgtacattataaataaataaggtgataacgatctctttgccttaagcctctttcagagactatcaaactttcgaggctgtccattagttagaatcttatatcgaaccgatgtgacactttacattatccaaaaaaaactatttatcgcaaaaaccaattttctttagtaaatgttcaataaaaagccactctattcgaccataagctttactcatg

SEQ ID NO: 12905 - DNA, 3000 bp, Unknown; identical to SEQ ID NO: 12898
  misc_feature (1)..( 3000): cDNA_ID_2712760_gDNA_ID_2214579_Annot_ID_135240 3000 nt of promoter + ATG

SEQ ID NO: 12906 - DNA, 3000 bp, Unknown
  misc_feature (1)..( 3000): cDNA_ID_2709925_gDNA_ID_2214580_Annot_ID_135245 3000 nt of promoter + ATG
gctctggggaagttagtgaaagtattcacacacaaagtcagagtctgggttcgaatcagggaagaaatgagcagtcatggaagcagagtcctagtttgtctaattctcaagtccaatctcaatatcaaggcaattggtacgggacaaactctgattatcagaatggtgtaggatcgtcttggcattcaggtaagactattgatcgcgaggtatatgacatgattatggaatttgatgaatattgcatacaagagaatgtaagagtggccttaacgactatggaaaaactggagaagaagggttatgttatggattttgttagactcttaaagttaacacagctatgtagggaaggaaatgtttattacgaagtcagtgttttagaagaagccaaggtttctgttctagcgaagatcagagctttagttaacaatttagaagcgaattatttgaagtattatactgacatcatgattgaggaatatgatgcattttgcaaacacggtaaagtgaaaaaagcgttgtatactatagatatattggcaagtatgaattatgttgtggatttgagtagacttttacggttagcgaagatttgtggggaagcagagggtttacaagaggccaagactgttcatgggaagattagtgcttccgttagccatttagatttgagttctaaccatgtattgttagaaatgtactcaaactgtgggttggcgaatgaagcagcgagtgtttttgagaaaatgtctgagaagaatttagagacttggtgcattataataagatgttttgcaaagaatggttttggggaagacgctattgatatgtttagtcgctttaaagaagaaggaaatatacctgatggtcaattatttagaggaatattctatgcttgtggtatgctaggtgatgttgatgagggactattacactttgagtcaatgtccagagactacggcattgccccttccattgaagactatgtaagcctcgttgagatgtatgcgttacccggatttttagatgaggctttggaatttgtggagagaatgccgatggagccaaatgttgatgtttgggaaacattgatgaatctttctcgagttcatgggaatttagaacttggagactactgtgctgaggttgttgaatttttagatcctacacggttgaacaaacaatctcgggaaggatttataccggttaaggcatcagatgttgagaaagagagtctaaagaaaaggtcaggaattcttcacggagtcaaaagtagtatgcaggaatttagggcaggggataccaatcttcctgagaatgatgaactgttccagctattgaggaatttaaagatgcatatggtggaagtgggctatgtcgctgaaacaagaatggctttgcatgatatagaccaagagagtaaagagacattacttcttggtcatagcgagagaatagcttttgctcgtgctgttctcaacagcgccccccgtaaacctttcactgtgatcaaaaaccttcgtgtgtgtgttgattgtcataacgcattgaagatcatgtcagatatagttggtagagaagtgatcacgcgagatataaagagattccaccaaatgaaaaacggggcttgcacctgtaaagattattggtgattaacgacaaaccttgaggtgtgttctatagtagtgtctacgttgagaatgttttggctcttcttttctcataaatcatcatattagttttatgaaactgatttatcttgtctctctaaatctgattctcagtctccgaaacacgttctcataatgtctgtgttgggaactttggcaggatggaaaaacataaagcaaagagtcacaaagacaaatttgtatcataagcagcaacttttcgaccacgtctctttttttccaggcatttataccgtggagctgccatattgttgtcatagatctatctcatttctcttgtccatttgatccagtttttgtttgtgtccaggttatgataaactataccctaaatgctattgtttttctgagtaatattatcaaatgtttgttggtttggatttgtgaggaagataggaataggatgatgtttggaacagtccaactaaggtcttactttgttcttctgatgcatcgtgtaaagtgttctaggcctgtgcatagaaacacttaaaaaaaagtagtgggtcaacttcaaaaagtcttttgagttatataaaccttcaaaaagtaggcatgaatgtgttgtcacacatgattgatgtactcaaacccaagttatttaattaatcgttattccaaattttttttttgtctagttttgaaatgtttaaaaataatgtatgtttaatatttttatgtaattattaaatttcaaaaagtaaaataattttaaaataatttattttttcttgagaatctctctagtctctatgcaaattttttttcaaaaaacataaactatcatctaacaattaaaaaaaaattagtgaaagcccatggactttctggagatgatcttaagactttttgatcacgcactgttaacttaagcctggtgtcaaatatttaatgtaatccaaataaatgaatttgctagcctcttgttacgccaagtttcatattacaaccctaattcccaaattctcttccgataaattgttcacaaatccctagaaaatccagagggaatcttcaaatcttacggtgatcaaacctgcttcaggcctgtacagtgtactaggtaaattcttatccaattgttcttcttttacacccttgatcgccacgaaagtatcttccatcgatattcgttgtgggtttattgatttaacgtttcctcagaactaattttggactagtcttgctcaaattttgactacagttttgtatttgctaattttgagtttattatgtatattgagattgtttctatctctcagattctaaaggtgtgatcttttttgcaggaataaagtaaactatc

SEQ ID NO: 12907 - DNA, 3000 bp, Unknown
  misc_feature (1)..( 3000): cDNA_ID_2709889_gDNA_ID_2214580_Annot_ID_135246 3000 nt of promoter + ATG
gttacttggtgctaaagcagaactcacggttcacaaagtttacctcagggctagacaatcttggcaagatgaaagatgggttatgattggaaaggtaagtttttttacttatttatttaatggtactgtgttttaaagtgatgtttgaacaatgatgctaatgtctaactgtcttataatcatctttcaggtatcttgttctgtgaagtcctccacgctgactggatcagatgaacaccagaatgtgaacccccttctgaactgtgtggccacaggagactagtgttgcttctttaagagtgttgaagagaccttcaccatgtgattgggcggagtctgctgaatcatgcactagaagtcctaagaagatacgatcattggaggaagaaggacaccagcaccggtttgcttcttcttcagcacagaaggtatataatgatagttctgaacgtaggggtgttgaattgtacgtgaaagcttcgtgtaacgagaataaaagtggtttccgtcaaatggtcagggtaagatcaaaaaggtttagtgaatgtgttggtacaggaaactcagtctctaatagttgttatgatactgatgcatcctcagttggtagttgtagccctattagttatgatgagagtgacaaaccaacttcttttctagatggtgccgactcttgtagtagtgatgctgaatcttcaaaagaagcatctggatgcagagatgaagctaggcgaaaacattcattatcaggtaatggatcagtggtgagatcatgtaggcctgaactttacacttaccgtagtacactgacgaagttatttgcttctggctccctaagttgggatcaggaagcatcactaactgatctccgactttctcttaatatatcaaatgatgaacatttgatggagctaagaaatctcaagtctgccggtacccacagttaattttgttagtatctattatatctttttgatccttgacagtcttatcttcaggtgttggccatacttccctgcaatgtggaatcaactgttgtatattgttctgttaccggaggattgttaaaatgattgtatagacagcagaagggaaataactctgactgaaaatttcaaatcctcattgtgatgttttcttcttatagtctaattttctttgttgtactttccggatgattaaacttaaacaaaagttacagtatctgtgttctaagatgagtcatgtcttttcttcatatatatactttagtttattgtgtttaagcttctggataagtcgagtcatttgtcttctcctcatcagtgatggattattgaacttaccttacatttttcaggaaaactgtagccatgttgggtgactgcagatcttgcttgcttctagagatcttactctgatgcatgaggttaactgaatggtgcaaaacacaatgccccttcttcctcaaaattcataatttaaattgtgctgtgttttctttttggctgtacataactgatctgtttcaggtgttcttggatatatataccctctttacacaggctgtgaactgttcctagccgaaggataatcatttacagtctgcaggttggataagtttgccgacgattggtaagtattaggttgaaagttctttatgaactgtgtctatctgagacagtattgaggttgtgtggaatacttttactctttcagcaaatgtgaccagtagattgtggaactgtccatgcttgtttgttggtggtatatgtacagttggcctggtcatcaaaatctacagaaaagtactcaatttttatgaaatcaaggctatgacatttcaagctgaattaccgaggtgcggggattcaaacgttagcataaatattatgatcggtgtgtatagacctctgcataaatcaaacgtgtctagctgctcgcttgtcaaatccaactttttccctatgtctcaagcttaaagaaattgaaaagactcagagaggaagaagaagccttgcgaattgcgatgttcttatgccatcactatcggttttatattcgcttatactctacactaagaaaaataatcgaattgaatatttctgattctttagaactcatgttaattcaaaattttatggttgttacaaaacttatgaacaacattatgatctgcattaacttataatgttttcaatgtgttctatgtaagattgacattatttggaaccacctgttttacttatattattttattcttgacttgaagttgatttgtggcttctacatgtcactagcttgagtttcaccagaacttcataaaatcaaattcctttgcaacttaaaagcatcagagaaaccaaacagaaaagcagtagcagaaaaagttacttgggttgcgttattgattttattcaaagccaacagacgcaaacatgtaactaacacagttaccaaaactgtcacaattaagctttccaagtaccagagtagattgattccaggaaatgattatctaaataccaatttgcgcataaaccaacctcctccttctttctcgatttaccaagcgtttttggattgtagtcctcctatttgaattttgccaattattgaacaacagaaacttgtatgatgtttttaagtattggtaatattagtatgtttgggggacaaacaaaagcctaattaaccaaaaaactatagttaatattcagttcccagagcaaaacggaaaaaaacatgccaatttgttaattttgaaagtttctatgagcactaaaagaccaatgaaccgaaatatacttgctatttttgtggctacaaaagcagaaaaaggagggaaaatagttacctgttggggcccacaacaaaaaagaaagaaacaaacgtaacagaaaaaaggatataaaaggaaattcgaaaccggcgaattcggagaaaaaaaaaaaaaaaccttgcgtgtttatccgcaagggattttgattttggaaaaagaaagagagagggatctgaagc

SEQ ID NO: 12908 - DNA, 3000 bp, Unknown
  misc_feature (1)..( 3000): cDNA_ID_1034119_gDNA_ID_2214580_Annot_ID_135247 3000 nt of promoter + ATG
aaatttcagatttcctttcttgctatttttcaaaatactatgtttacttctcatataaactgtaaatatatcccttttttaataagaaaaaaaatctctcacttcaaaaacaaaaaggaaaaaaaaaagcaaagagaaaaagtaaataatacgccgacgtttcgtgtttatgttaagcttcctttttcctttttcctttttctttttgccttttaaataaccgtcggactcatatttctcgcctccgccggcgaacagttttattatctctctctttctgcgtgttccaatttcttccacaaaaccctaattttctcttaaaccctgaaattcgtgtaacctttcaacaatctcttcaattttgttttcgattctgaatccattgtttacgaatctctcatctaaagctacattcttcgttaaatcgtttttaatcgactcgctcactcgtgagttgactcgtcagctgtttccataattgcttattgaatttttatacgatgatgtttcaatatggaagaaactagaggaatttctgatccagagaatgggagttcgagttacggcggtaaaccgccgaatccactctccttctcttcttcctccgccgctgctgccgtttacaggcaaaccttcgacggcgagcgatcgttggcgccgtgtaataagaggtcactggttcgacactcatctctcgtaagattcgtttctcttcaacttgatttgtggatcagttaggtttattttgtgtattgaatgatcaatttaagttgaggttttgtaattattgctctgcttttggatttgatcattattggtttcctaatgtgtataattaaggtagaaagtttctgtttttaatgtgtcattatgagatgtttgaggttttctgattgattttcattttggtaggtgaagacaatggtgtcagatatatctgttgagaatgagtttactatagagaagaacaagtctgagtttgttcctgctacgcgttctggagcttggtctgatattggctccaggtcaagcatggaagatgcttatctatgcgttgataatttcatggatagctttggccttctgaattctgaggctggtccaagtgccttctatggggtatgttctttcttcagttttcctgattttttgtagatttgtagcataagcaaacaactgtgaatgtagtgaaaatatggggatctcttattgaattttgtttgttattaggtatttgatggacatggtgggaagcatgccgctgagtttgcatgtcaccatataccgaggtacattgttgaagatcaagagtttcctagtgaaatcaataaggtgttatcttcagcatttcttcaaacagacactgccttcttagaggcgtgttcattggatgggagccttgcttcaggaactactgctttggcagctattctttttggaaggtttgttgattcaactcttattatcttttagttttgtctaacctaaactcttacatcttggttatgttaaagaaaaacgtgtttgggaatagatgcttatcctcaactgcgtagtgtgcataatcttgacctttaacacaatcatgtacaactaattcgcctgtagatgtattctctgcccatatgtgctgctgctataatgtagttattgtctcatatggtctttgagtcacgtatatacttgctcatttcatactctattagtattctggtatgaaaccgtttggtaccgtgttaacatatagttttgtggtaacaggtcgttggtggtagcaaacgctggagattgcagagcagtcttatcccgtcagggaaaagccattgaaatgtcaagagaccacaaacccatgagcagtaaggaaaggagacgcattgaagcatcgggtggacatgtattcgatggctatctaaatggacaacttaatgtggctcgagcgctaggtgactttcatatggaaggcatgaagaagaagaaagatggttctgattgtggacctctaattgcagagcctgagctcatgacaacaaaactaacagaagaggatgagttccttataattgggtgtgacggggtttgggatgtgttcatgagccagaatgctgtagattttgccagaaggagactacaggagcacaatgacccggtcatgtgtagtaaggagctggttgaggaagctttgaagaggaagagtgctgataatgtgacggcagtggttgtgtgtcttcagccacagccaccaccgaacttggtagcgccgaggttgagagttcacagaagcttctcggcggagggtttaaaagatttacagagctacttggatggcttgggaaactaattgggggacatgaggatggtgacgaatgattgatttctctgtttttgttttgtcttttcttacaattttatagtttggggtttggaggttttgttctgttaaattctcgcaatttgagtaagttataacatgaggcggcatacaataatttattgtttggtaggatatatttttttgtcacttttgcataataataattctgcttcagtctcatttgttttgtaactagaaagttattccaattcctgcgtttaccgaatatgttgtgttcttgcagaatgacgtatgttagatatgcagtaaactcgagggtcggctttgaccacatcgccacttatcggtttgcggatgctggaaaagtcagtctagtgatgaggctgagtgagccatcgtcagttactattttatcgtgaaactctgaacaacgagattgtcccggatattcaaatgaggaacaaggcccaatagtccgatcaaagtgggctattcgtatcgcttacgaggcctatacgatggtaattgaattcacgcgcattcatcagcgcgtgatttggagttgctcaatttcagatcgcacaggctctgttaatcatctcctcctccgaaagacagagaaagagacaaatcaaattcattcatatcaaagagatagagagaaaatg

SEQ ID NO: 12909 - DNA, 3000 bp, Unknown
  misc_feature (1)..( 3000): cDNA_ID_2709921_gDNA_ID_2214580_Annot_ID_135248 3000 nt of promoter + ATG
atcttaactagttatcgtctttatgatttatgtctcgagagagttatttgaaatatctaagaaatttacaaaaaaaaatgttttctgtaagtttcaaactagttttagaaaatcgtgagtgtggatttgcataagatgatcaagctgtgtccattttcttgttaacgtaggtctcttattgcaaaaccaattttttcttcttcttctcttcatgctacgagtcttttctctctcgctaaggctaatctccctttattctctcaccattcttgtaaaagcaaagaacatgagcatcaagaaattaaattattgaaggtccgacatggaagtgaaatttgtagagttgtagttaaactttgaaatacgaggccgaaatcaaactaatcgttggagtgacatagagttgggcttcactttggatcgataataggccaactcatttcagtaggaagtacttggagtgtttttcttttgtactacacgcatgtactacttttctttcatttcacatccaatagagtactactttaacacacaaagctgaaaactcccaaaatttggtaggatacaagattacaaaacaaagaaaaaaaggacggaccaaaactaatcgtgcacataaagatctcaatgaatttaatgagttaattatttttatacggttcgatttaaaccaaaaatcaaaaatggcatcctcaaagaaaattttgcatgaattaaagaccagtttggttcaatgttttgtcatcagtaactacacaaacaaatacttaaaatttaatatatctacaatagtttttgtgtgtattatttgtttctaattgactttttttacacctgcctaacaatctcccttacacgtaatgaacttccaatttacacggagaaacaaccacccctgttgacacgtgtcatcaccacaccgaccggcggtgcatcacccttagctaatccggctaactccaaacgtcgatgagcagacggacgaggaagattctccggtacgatggtctctagcgagttctcaagccaaggcggacacgtcctcttgtcactccacctccgcggcggcaccacacccgcagccatctcttctaccggcgatttcacaaccgcagcttccactgatgcaacatcattgatctgaatcccgccgattacgacagttgccgccacccccaagacaaaagaacacttgtttttccgtggctctgtctcattttctgttctcctactaaacaataaaagaacaaagatcattgatatgaaaaattatcaggtaaataataacttttcatgaatagaagagataccaagagatctttgacgttgtcttgagcagtgaagctaatgattgtgcagaatttgaatctaggggaggaagatttagacagcagcttattctccctgccattgttattcctctgttttcgtttccttctttttcttaagaatccacctagaacaaattttattttattcctttcacctccaacatatatataactactaacccattcttacttgggtcactcattttttcttactatatatgtatcctcaaattattacatttcatatgcgcatgcaatacaaaccacatctaaatttttcttccaatatgttctttctctatacttaactaaagcccaaagaatgaacttaacctagaaaagatggacttgacccaatagcattggtccgttggagatgttaggtccatactccatacaaagacaaattgaacaaaagtcgtgaatctgtttgctacgtctgaataacaacgtacacgtatcacgccttgcgaacaaattatttgacaatgatggccaattagcatgtgtcatcacttgttaccacgtcaacaaggttcttgtcggtccgtttaattaatagtaaccatcgttttcaggaaaaaaatccacataaaaagtttctaatggcgaaacaatattcaaatatttcctaacaactaccatgagactgattctttttctcttccgaaaaattaatgagactgagtcctaatttttcttatagttaatttggtgaccatcaaagaatgtaaaagtatttaggaaacagcacaaataatctggcaattacggtctacaacatgtttatttacttatttttaaattatagaaaaatttaatattttaatatcttatatttaatgccctaaataacactaaatcacacatataaatagcagagatataaatatagaaaaacattccaagcatttttcagtacttaacatttatacagaaaaacaattaaacatttttcagcacttaataattaacatatgtgagaaattcataaactctattaaatattcatgaaaataatgtatttttaattttataagtaatatctcatgtgtcgactttttttatataaaaaagatgtaaaaaaggtcccaagttactaaaattcaattttgtcaacttaactcaaaatctttttgctattagtctaaaatttcagatttcctttcttgctatttttcaaaatactatgtttacttctcatataaactgtaaatatatcccttttttaataagaaaaaaaatctctcacttcaaaaacaaaaaggaaaaaaaaaagcaaagagaaaaagtaaataatacgccgacgtttcgtgtttatgttaagcttcctttttcctttttcctttttctttttgccttttaaataaccgtcggactcatatttctcgcctccgccggcgaacagttttattatctctctctttctgcgtgttccaatttcttccacaaaaccctaattttctcttaaaccctgaaattcgtgtaacctttcaacaatctcttcaattttgttttcgattctgaatccattgtttacgaatctctcatctaaagctacattcttcgttaaatcgtttttaatcgactcgctcactcgtgagttgactcgtcagctgtttccataattgcttattgaatttttatacgatgatgtttcaatatg

SEQ ID NO: 12910 - DNA, 3000 bp, Unknown
  misc_feature (1)..( 3000): cDNA_ID_2709917_gDNA_ID_2214580_Annot_ID_135250 3000 nt of promoter + ATG
ttataatggatttaacaaaaaaaagaatagtttataatggagtcttgagagagttatttgaattattttgggaatttacaaaattgttggataaaaaaagtagttacaagaaaaaggaaaatatttacaagtgtgtttctaattttttcctactagaaagacaactagataagatcatttcaatagtcttctattcactaattatggacaagtaaaaattaaaagatttgttacaccatctctatcttacatttctctatttatagattcacatacccaatgtaaaaacaaatctcttgcctatataactctagacataattcattatattacaacaaacaaagattcaataatcaaaagaaaaatttagaatgacaagtaaatatttctccgtactagtgttcatcatcttggcttccaatgaagttgttgccaagagacactcttcaacacctaaattaagaaaaactgatttcccagaagatttcattttcggagctgcaacctctgcgtaccaagttgaaggagctgctcaggaagatggtagaggacctagtatatgggatacgttttctgaaaaatacccagaaaagataaaagatggtagcaacggatctattgcagatgactcttaccatctttacaaggaggatgtgggtttattgcatcaaattgggttcaatgcctatagattctccatctcgtggtcgcgtattttgcctcgtgggaatcttaaaggaggaatcaaccaagctggtattgactattacaacaacttgatcaatgagcttttgtctaaaggaattaagcctttcgcaaccattttccattgggacacaccacaagaccttgaagatgcttacggaggattccgtggggcagaaattgttaatgattttcgcgactatgccgatatttgtttcaagagctttggagatcgagtgaaacattggattacattgaacgagccattaacagtggtgcaacaaggatatgttgcaggtgttatggctccaggaaggtgttcaaaatttacaaaccctaactgcaccgccgggaatggagccaccgagccttatatcgttggtcacaaccttatcctagctcacggagaagcaatcaaagtctatagaaaaaagtataaggcttctcaaaaaggtcaagtcggtatagctttgaatgcaggttggaacttaccttatacagaatcagctgaggataggttagccgcggcacgagccatggctttcacattcgactatttcatggagccgctcgtgaccggtaaatacccggttgacatggttaacaacgtaaaaggcggtcgcttgcctacatttacttcaaaacaatctaacatgcttaagggatcatatgatttcattggcatcaattattactcgtcttcttatgcaaaagatgttccttgctcaagcgaaaacgttacaatgttctctgatccttgtgctagcgtcacaggcgaaagagatggagttcccattggtccaaaagctgcatcagattgacttttgatatatccaaagggaattcgtgatcttatcctctatgcaaaatacaagttcaaagaccctgtcatgtacataacagaaaatgggagagatgaagctagcactggtaaaatcttacttaaagatggcgatagaatcgattactacgctcgacatctcaagatggttcaagacgctatcttgattggagcaaacgttaagggcttttttgcatggtcgttgctagataactttgaatgggcatcggggtacacggtcaggtttggacttgtttacgtggatttcaacgatagacgtaagagatatcttaagaaatcggctcactggttcagacatttattgaatggaaaaaaggagaattgatgagatatgcaacattccaatatattaactaactagattaatacatgcacaatggtttgtttggaaaacaactattgttaatatacaaataaggtttgattttactgtattatatcaaacttaaatctcaaaaatagtggtttcaatgtaaaacttgtgcacactaaattaaatggaatagtatgcatttaaataaaaaaatcaagaattttcattcttatttcggccttctaaaattaattaattagttaaattagtttgtgattttattttgttgtggttgtcactagtggtaaattattaataatttaaaaatctaatattttcaataaaaattaatgatctatttttaatattaaataaaaatagttaaaattatagaaatttagttcatattgatatctctctaattcatttggaaaaatatttttagcacagacaacagtttatgcctgcatcattacaacaattttttttactattttctcataattttttaatactatttgagttataattgaaaagctaattacggttaaggagcagctatagataacgaattaatagattagagaggttaattatagagtcgtcacatctctctcacatgcctctctaagttccctttagggttttcttcttcactatagagactcatgctcttctcttcccaatcgccgcctctgatctctcttcctcgcttctcagattaggtattagacattcactctttcttacattgttataacattgatgaagtagaagcttagattcatatcattgccattggtcacgattaatcatctctttcactaaatcatcaattgtttcaatgagaaccaataacagctgaatcaatgtcgatacatttgttgttacgaaatcttttgaatcttcactgaatccgctttgtcatttttcttttgcagcctttgttttgttagattgatttgttatgtccaacaatctattgcctcagccttgtatgcaaatgggtcaattcattaatgtccctactcccactcctgagctgatttctaatccggaaatgagattgtcacaaccaatctgtagtcatatctctggtgggagacaagattttcatgta

SEQ ID NO: 12911 - DNA, 3000 bp, Unknown
  misc_feature (1)..( 3000): cDNA_ID_2709909_gDNA_ID_2214580_Annot_ID_135252 3000 nt of promoter + ATG
atgactattatgcaaccactgctcctcctcagtctggttggagtacttctctgccttcccatactgattccaaagacgttcatgttgaggtcagaagtctaaacattttatgattttgttgcgattcctaaattggttgagaatggatatgatggttctgtgtctattggttaacgattctctttgtgactgggaattctgagagctggtttctgttctaatgttaatttatcttatgcttatggctctagttagttattacaaaaattgtttgtgtgtggtgtctattgtctgagagaagaggatttgttattgttgctcatgttgctttatccttcctgaatatttttcatttgtgtgttacctatgttgtggtagcacatggttgtgtaggttgacttgtgtaagcgttagttcttgtccagattgcgtgtgattatcttggttgctgatgggattatcttggtgtgattgtcaggaaagtgaaagtgaggaagatattcttgatgaaggtgatgatgatgtggaggaagagcaggaacaggaaacagaggtacaggttcatccagagcctgaggtgaagaaagctcctgaagttcctgcacctcctaaagaggcagagaggcaactttccaagaaagagaggaaaaagaaggaacttgctgagcttgaagctttgttggctgattttggagttgcccccaaggagaacaatggcctagaggaatctcaaggtacacttgtcttcaatcaattttgacatctgtaataatacttatcacgtattggcacagccattgcaactgatattgcttagttccagacagttgtgctctttaatagtattaatgttttgtgtagtgtcactatcttgctgagaaaatcagcatgtttgatatgtctagcagttttgctaattccgatacattgcatgttctttttacagaggctggacaagaaaagaaagaagatgtcaatggagagggagagaagaaggagaatgcagcaggtggggagtcaaaggcatcaaaaaagaagaaaaagaaggataagcagaaggaggtaaaagaatctcaagagcaacaagcaaacaacaatgccgatgctgtagatgaagctgctgggtctgaaccaactgaggaagaatctccaattgacgtcaaggaaaggataaagaagcttgcatccatgaagaagaagaagtcaggcaaagaggtggatgctgcagctaaagctgctgcggaggaggcagctgcaagacgtaagaagctggccgcggcaaagaagaaggagaagaatcactataaccaacagcctgtgcggtaaaatcctgaatcaccaccattttgatcttgatggaaatgcaaatatgaacatgtatttcgccgtatattgttcatatgagtctctgtcctaataaatcttttgaagggtctggttcttagagttaaagacattgaatcctttttctagtcttattacaatgaacaggctaaagacaaaactactctctggagattttcatttctttttgaaacacctttgttttcttaatatcagaccttttttaggttcattatgtcttcaatcagcttcttatgtatggttcgatggtgttattttcttctttttttcgttcagttgcctgtgttttgattcatgccttgtcacaaaatcttttttggttatatgttccaaagtgattccccacttgagggtaatgtatttttatttttgcaatcacgaataataacattaacctgtatttagtctactatgcctagttcatcaatcaatatttagactccacctgaaccacaaccgcacttgattgtgcttcgttaaccacacttaaacgtgcttgactcgacctaaaagtctcgatttgaacccctaaattaagttcctttgctaattcagtcggcccaagtgctttctttaactatcataactctgaaccattctcaatgttagttcatgaatgcatgcatgatcatatccattattgtgccattattaccatcccatttcccttgatcagaaaatctctttatcattgatcacagttgagttgtgtaatccacgcacatggtgatatggatcaagttattgaatttcctttctcatgcggttaagaagcatgttaatcagttgttactcttttttgatgtttatattttcttcttgttcagaagcataccgttttgcccaaaaatatgtgtttgtcaactatgaacacaaaaatatatcttgtctagattggtcaaatatgttcgtctgtaatctttaatttgttatcaacatgcaaatcaaatcagctgtatgtattaatatcgtcttgaatatgtactatacactgaataatttacttaactatgtataaaatatgacacatttttgatatgtacatatctagtcgaatttttgtaatgatatttactataggataaataaagtattacctaaataaggatttgatgttcatattgtgaatttttgaaattgataaaaatttggaaaggtcaatgtcctcatggttggaccggattaatctggtaatcggaaagatatttcggttctctttgagaatcgggtttagagttattggtacggcgttatcaaattcgtgagtggtttattgcggttgaaccgaaccacattaataagttgtaacaattcacaagttttagacgcagcttgcttctttcttcttcttcctttccctatcctctgcatacacgaactcgtaagcttcttcgattctcttcttaaaccactgataatctctttctgatcccattctagaaaaacttgacctagattaatcagaattgattcgagttggttgctgtaatatagaagaaacttttgtttccccacacattcagaaccaattcaatctatgttaagattctcagaagtgggttgtcttaaagtctgaagctttagggggctaagagtcagacttcttggtccccagcagatgagcacgtgataatg

SEQ ID NO: 12912 - DNA, 1440 bp, Unknown
  misc_feature (1)..( 1440): cDNA_ID_3026995_gDNA_ID_2214580_Annot_ID_186471 3000 nt of promoter + ATG
tgatggaatttgagctttgatgattcaccaatcatcaaagtaccgtgggacttaccgaagtgatatcatcttcagtacttggacttacattagagcctattgatgcacgtcttctccatgaagatgactgtggaaatgagcctccaaagtttaggttcgtattgataacatcacataataacgtaagtagaagaattcgcataaaaaaaagtagaagaataaaaaaattcgcatactgaaattcgtaaaataaaaaatcgcattataaattcagcaattatatactcatttattttgtgttttgatgtttcggtaaacattatgcatattttcttaattggtaaaacttttgcatattcgcataatctatcaacaatggtttttcgattcaacatcctccacatcatcttctctttcttccacatcatttcctctctcttccacataataattcaatacccactcaaattttatactctacaatggtttgtttaataaaattcaacaccctaccccacaaatttttttttcattatttttcttttcttttatgttttaaatggataattaatagaattttgggtgttaaatgagttattgttgggatgttttcttttatgttttatcggctaatggattttttttagtgaaaatagatgtaattttttctgtgtccaaataaaatgaaacaagtctctatttataaagtttggaaaatgatgaattttagtataaaaataatttaaaacaaataaatattttataagataattgatctccaataattcagaggaaaataaaatataagaaatttcagtagcaaataaaagaacaacacatgtcctatctttatttaactctcccccacaatttctgtctccaattatttaatgacaagtggcaatgaaggatccatttttaaagattcaacattgttgaatagattcaacactatttaatccacataggattcatttctttattcaataccccattgtaatcattcaactattgaataaattttttcaataagccattgtagatagtctaagaaaacattattccgccattatacatgtaaacctactggaaccttaattgcttttgttttttttttttgtctaaaatcttaattgtttttcacactttttttgtcagcaaagacaaaaaataaaataaaaagcaaaaccattggttaacaagtcagaaccgaaacgaatttaatcaatcgggttaacccatttgcttccctgtcccagccttaatggtctgctctgctcgtctcagctaagttgacgattccagaccaaaaattcttcacaaaaaatatctgaaaaatccagccaagatatttcagattgtacggaaaatttcagagcaaataattttcagattaatcggtatgtattagctcagtgatcggaatttgtgacggcgatg

SEQ ID NO: 12913 - DNA, 3000 bp, Unknown
  misc_feature (1)..( 3000): cDNA_ID_2990777_gDNA_ID_2214580_Annot_ID_186462 3000 nt of promoter + ATG
ggaaaaagttatgtatggagaaattgcagcagagcgattgtgttccatgtcagcagaggaacttgcttcaaaggaactagctgagtggcgacaagcaaaagcagaagagatggctcagatggttgttctgcaggacactgaggtggatatcagaagcctagtaaggaaaacacacaaaggagagttccaagtggaagttgaaccaatggatagtggttctgtagaggtctctgttggaatgagttcgattaactggtctcgaacaaagaattttaagaagaaaaccccttccatcacgaaaactcttggagtcaagaatgaattgaacagctctaatgagagcactgggccaataaacggagtcacaatagatgatgagatgcaggctgccactggatctcttcctccaattgtctctcttgatgaattcatgtcatccatagattctgaatctccgtctggctttttgtcttcagatactgagaaaaaaccttctgtttcagataataatgatgtagaggaggttttagtttcatcacccaaagaaagtgctaatattgatctttgtacatcaccagttaaggctgaggcattgtcaccacttacggctaaggcatcatcacctgttaacgctgaggatgctgacatagtatcgtcaaagcctagttctgatttgaaatccaaaactacatctgttttcatacctgatggtgaacgtttatgggaaggtgtgctccagctgagtccttctactgtgagctctgtcatcggcattctaagaaggtttgtaataaattgtttcatgagtggtagcaaacctatctcagtattttttttttattccacatttccaaatttaggtttgcatatatgaatagctttctttatttagtctacatgttactacttatctatactattctagtgcttatcagctctataaaatgtttttttaatgaatatggcttcgctgttattgataccatgtttaccaacctgatttttacgcttcacagtggcgaaaagactactacaaaagagtggcctattttgctcgagattaagggtagagtcagattagatgcatttgagaagtttgttcgagagctcccaaattccaggagtcgtgctgtaatggtatttgtctacacgtttacctctatcattaatgtacatgttttatatacgcattctgtgtttgagcccctgcaaaagctattaactgtgacgtttaaccaagcttaagtagaagcatttaggaaagaagaggagagattaacggccaatactgatttgtgaatgattgagaaaaatacattacatctgtgaatcacaatggagatagatggacttacaaaaatattttcaccagaacaattgcatagcttatgtttcttgaataggcctccatattccaataaaactaagacctgtttgttctcgattctatatgtatgtgatgaactcgtttatccatcatggtacttctgaaaccttgctttcgtgttacaggttatgtgtttcgtctgcaaagaagagtgctcaaagacagaacaagagaacatttccgaggtatgagcgttggtagttaaccaagattctgtgtatccaaataaacgaaaagatgattaaaaaaacttgagatttatttgaatattaatgatttatttgatcaaaactgaacgcgaatctgtacaaactgaaaacccaaaccgaatttaaattgaaacactcctaaatatctgtagaatgtctaacttggtaacgaaatttgggcatttggttttgttactatacaggtggtggattcatacgctaaagatgggagggtgggttatgcagaaccagcttcaggagttgagctatacctatgcccaacccgtgggagaactgtcgagattctaaacaagattgttccgagaaaccaactcgatttcttgaaatctataaatgatgatggtcttataggtgttgttgtatggagaagacacacaatttaaaaaatcaccactatctaacaactctcacaagaaccaccgtgaaaagggttcttcgttaaccacatataatacttctcgttacagtaacatgctacaggtcaacaatgacgatggtgatgatgtgccaccggggtttggcccaatgaccatggctcgggatgaagatgatgacttgcctgaatttaactatttttccagtggggatgttgtcgtgaaccggacaagccggtctgtatctgtaagagagcttattcaaaaatatggaaaatctgaacctttgaggaaccaaagttataatgataatgacaatgatatactaccagagtggcagcctcaatctaactggactcttggggttactcatgtaaatggtggctcgatggttagaccatgtagtgagtggtggtctcatcaggatggcagaggaggatattaattgttttttgtttcaccttagcaattttgtgtttgttatgcattttctgttgcaggcaacactgctttccaaattttgtgattttctctcaacagtcaccgatatttggcactttattagtaagatgggcttgcgcagcccgctaatatattgctcctttctgtaacaaaaagtacaaaagtaacaaaatccactcctatcgattatactataaaacagaagtgcagagaaaatttcagtcatgatattttttgaccagctcgattcagaaatttggaaagactagcttttttttctctcgggtttcactttttaaaggtcgtgaaaatttgggaatcactgatcaattttgttaatatgatttcctgatttagggtttctctgcatgcctctagaatcagcaagtgtaaagcaattaccatggtgactccgaagcagatcgatttctcttcctgtggtggtggtgataactccgacgataccctctcccatcgagaatctccacggaatccttcctcaaagcgtgctgctgcttccttcgcagcagaagcaggcgaagagact

SEQ ID NO: 12914 - DNA, 3000 bp, Unknown; identical to SEQ ID NO: 12909
  misc_feature (1)..( 3000): cDNA_ID_2709921_gDNA_ID_2214580_Annot_ID_186458 3000 nt of promoter + ATG

SEQ ID NO: 12915 - DNA, 3000 bp, Unknown; identical to SEQ ID NO: 12908
  misc_feature (1)..( 3000): cDNA_ID_1034119_gDNA_ID_2214580_Annot_ID_186457 3000 nt of promoter + ATG

SEQ ID NO: 12916 - DNA, 3000 bp, Unknown
  misc_feature (1)..( 3000): cDNA_ID_3027021_gDNA_ID_2214580_Annot_ID_186456 3000 nt of promoter + ATG
ttgttgcaattggagaaccaaaacatatttgataatgtttttgtgtatgtgtttctttacaggtagttagtgaagcacagagaggacatgtttttggtgaagttggggtactatgttacagaccgcagctgtttactgttcgtaccaagcgattgagtcagttgcttcgtctgaaccgtacagtactcttaaatcttgttcaggcaaatgtaggagatggagcaataatcatgaataatcttcttcaggtttgtaataactctgaatagtacagtttgtttcaacctgttgacacacaggaccagttccataacagatatgttgtggttcatgcagcatttaaaagactcagaagatccagtgatgaaaggcgttttggctgatacagaacacatgttggctcaagggaaaatggatttacctctcagcttgtgctttgctgcagccagaggagatgatttattgctgcatcagttactaagacgaggctcaagccctaatgaaatggataaggacgggcgaactgcgctggtaagcccggatttcctttgtatataccatcatcctccttttaatgcctaaaccaaatttgctcactctctatgtttcttctttgaatatctcagcatatagcagcatcaaagggaagccattattgcgtcgttttacttctcgaacatggagcagatcctaacattagaggtaagtagtaaaaaataatgtttcactaggtcaattagcttaggatgataggatcatgtagtactaaattatcggtggctcgtacattgtttacagattccgaaggcaatgtacccttgtgggaagcaatcataggaagacatagagaaattgctaaactccttgcagagaatggagcaaagctaagcttagactcagtgagctatttctctggcttagccgtggagaaaaactgcttagacgcactcaaagacatcatcaaatatggcggcgacgtcacactccctgatggaaacggaaccacagctttacacagagcagtgtcagaaggacacttggagattgtgaagttcttactagaccaaggtgctgacttggactggccggattcttacggatggactcctcgtggtcttgccgatcatcaagggaatgaagaaatcaaaaccttgtttcataatcacaggcctgtggagaaaaaaccgaaacctatccctggaatacctcagagtcctgtgacagggaagccattaatgaagtatagcagtgagcctacaatgcattcaggagaactcgtcttagacgggggtcaggttgttgtttctcagaaacggaaactcaataacttcagaaactcgctcttcggaatcatttcagctgcaaatagcggtaaaaccacctcacctctccatctgctctctagatactcgttgctttcttgtcacgtaaccataattttcagaacttttcacatcacaatagtcattcttatatacaattcacaacgttcattacattgttctgttccttacaaatttacaaatttggttttcatttctggtttttttccagctgatgatggaggagaagttccaagaagtccagcggttcctggaggaggaggtagtatgatttatccggagagagtgacgataagttcgccggaaaacggtgaaactggtggaaaagttgttttgttaccaaattctatggaagagctattgaaaattggtgaaaataagatgggattcgtcccaactaaagtacttacgagagaaggagctgaaattgacgacatcactcttatcagagatggcgattttctccttctatcaagggatccttgattcacacgcaactctctttcgattttgagtaatgaaaactatttgtcttaacgcaaactcgcaaaccaccacagtcaagctttatggtggtgatatgatgctaatattaggggaaaccgtaagccccaatcaactccgggattgaaatatcttttaggttttttttttttgcttttgtgtatatattcactgcttactatttttcacatgtatatatatatatatcctgttgactattttctgttaaaagaactctctaacaacctcatgatattaacatcgaaatctacaagaagtatggaaacaatcttgtttttttcagaaagcatacaaggataaaggtcctttcttaaacgtctagacaatcttcttctctaagtctctaagaagaagcaagtgttaaaatttataacttttgtgcgaggtcgagatttgagagtaactcctcactcatcttttccaatcaagcttaaatcctctctaggtgacttatcctatttctgagatgaattatcatctcatctttcatttttgtttagatccatgatggtaaagtgatattgatgggacttgggagccaaagcattaccgaaaatgagcacaatgattgagatagagttagagacaacacacactataatattattattatttcatgcttcaaatgcaagaaggtaatatttgaatcagactctagagagcttaatctgctcccatctctctgaccaatacgaaacatccgcaatctgctcaatcaacctaaagaggtgaagttgtattttatgtctagttgaattaaaacccttgtcaaattagacaatggtttaaggttgatgagaatttgatgttggaaaaaaaaagtgatataaaagataaaagcggttcaaaacggttttgcgattgatgttaaaagagtgcgaccggttgtgggagaaccggtcaactcctagtcctagaggctagagagtgttgtgttgtgtgatttgtggtgcagataatatcttaaccggcttcaaattttaaaatctagctcggttagcattttaaaactgttttctggtttgattccgtgtctatctctcggctccgttgtatcggaaggtagatattaaaactgaaagaccactgccgtcgagagcaactcaaaagatcatcagaaccgattcgaacg

SEQ ID NO: 12917 - DNA, 3000 bp, Unknown; identical to SEQ ID NO: 12907
  misc_feature (1)..( 3000): cDNA_ID_2709889_gDNA_ID_2214580_Annot_ID_186455 3000 nt of promoter + ATG

SEQ ID NO: 12918 - DNA, 3000 bp, Unknown; identical to SEQ ID NO: 12906
  misc_feature (1)..( 3000): cDNA_ID_3027024_gDNA_ID_2214580_Annot_ID_186454 3000 nt of promoter + ATG

SEQ ID NO: 12919 - DNA, 1440 bp, Unknown; identical to SEQ ID NO: 12912
  misc_feature (1)..( 1440): cDNA_ID_2709897_gDNA_ID_2214580_Annot_ID_135259 3000 nt of promoter + ATG

SEQ ID NO: 12920 - DNA, 1690 bp, Unknown
  misc_feature (1)..( 1690): cDNA_ID_2712823_gDNA_ID_2214581_Annot_ID_135260 3000 nt of promoter + ATG
aagctttggagatcgaagagatgatctgcaccactcacgaaaatggtatgcgatgcacctttcgaaacttggtaagagtcatccgacttgacacctctttcgacgaagcatgggagaaatttccaattaaaagactcttcatggaaagctacatctctaaagaacgagtgcgagaaacgtttgaaaggacgagaagatcaatcttcaagaagaagagagacaacctgaagaaacctccggacgaatctgtatccaagagagctcgcctagggcgaagaaactcgtgttactacacctagtaagacccaaacgtcgagccaacgacgttaaataagcgcactaagtgggaggcaacccactagatagctacattttcccttagaattttattttgcttttgcttttgaccttttaagtatttgtttcagatttttataaaaaaacatataaaaaaaatagaaaaatagaagtagaaaacccaaaaaagaagagaaggttgtgacaaccggcccagctacttgcccgagtaactggcaccgccaggagaagttgtcccggccgcaacaaaccttggctggagcccgccaatgcgcgccaacctttggctgaagtccgccagaccgtgccaaccattgaccaaagtctgcctgaccatttcaaacattggccggagccagccaatccgcgccgaccattggccgtagtccgccggactttgccacaccttcgccggacttgccccaccttgcggcctaggcaacaccttgcttgccggtccggacgaacgcaaactcagccggccaagtggaagatgagccaattacagaagagagccccctcggaaaaaactaagtctggggaaccgaaagtaagaaagaagtaaaggagaagaaggtgtttaaaagaagaagtggttggaaattgtggacctcaaccgatctgttctctcttgcggttttgcaacatatcctgcattcgagactatacggtaaccctaaacactttaactccaccacttaaacacgaaaaatccctttcataccaggcgccgtctgttggtgtcggatcccgcaccacgggctcagatccggacaaagattgctacgtggataaaagaggcccataacagagaaggcccataagcgttctcgaggtgaaaatatggatggggtgttgacctgcgaagtgaatgcggcgtcgaggtcaagactactcggattgaagaggccaaatgggccaaaaggtgaagtcaagaaggcccggagtggattcaaattcaaacgttcggataattaatttgaagactagaaacggatacgtttaagatagaatgattgtgattaaataagaattaaatgtattctttggatatatattgagagtcaaaggtcatgtaaggacacacgcatattttggtgcaaattagctatacattttcttttacaatactcataattttctctataatcatctacttattttttagtatatttgacctcaagaataatccttctcactaaacaaataaatacttgagtgtgaatccgacatccacattttggcgccgtctgtggggatggaggattcttgagtcatcagattctttctgtgcattatatacccgaagtgatccgcaatgtctagagaggatgctaccaacgtttagatagccgaaaccctcaaggccatg

SEQ ID NO: 12921 - DNA, 3000 bp, Unknown
  misc_feature (1)..( 3000): cDNA_ID_2712819_gDNA_ID_2214581_Annot_ID_135261 3000 nt of promoter + ATG
ttcttgtcgagcgcttgttcgttcttttgatgattgtgctggaaaaaggaatatcccacccatacctaagccctaccctggtgatgttcctcatttgcttggaagacctcacgagttgactgcttatacgccaccatggatgatgagacgtttttctaggaagcatttactgctcccatctgatccacctaatacctgaaacccgacataattgatgcgtgttttatttcgcctcaggcttttacctgaaagaccacacgactactgcaagtgcacaatatatcggagtagtattttaggatcgaatccacaaggagagaagtagttctgagaaatccttaagaagagagtgaagctagaaccaaaataaagagagggggttgttgtatgatatgagtaaccaaataaagacaagttactaaactaaacggtaagcaataagagagaagcgttaggtcatcgagggtttctccggatgtcatggttgaataaataaggtatagatctcaatctaggtgaaaacatggctaggtttgtttacttccaatttcccagacatacgaaactctatcaagaccagctaaccctaacggttagtaggtgaaagccggctatcatcactaatatcttgcgtactcagttgccctatcggctagtaggtgccaacatggtttcaaaatacaagattaaagcattaagttcaaattcgattctagtccataagtccctatcactcggcgggtgtgcaacggttatagttctttattcagttgagttaggtcaagcattcaaacgagattttgccaaagaatgaaatacctaaggtcaagtactaggtggcgttctggatatacaagcattaagattaaactcaactagaaggaatagtgtaaacggtcaaacaaagccatagaaaccaccaacctagatcttcgatctattggtccccatgaattcccctttgaaaaccccctcaaacccaactagagatctactcgctcatggcaaagaagctaatcaaaagttgggttgagtaaaccataactaaaagatgaataaaactagaaaacgggttagggattacttctttgaatgtagaatacaagaggcaaagctccaccttaaagagtcttacacgaaaacgagaaagagaaagagagagatggtgttcttcaagcttaaagaggtgtggcggcaagtgggcagctcttggcgacagctagggtttgatggtgatgaaggcacgcctagggttagggcttagaacaagtatttatacttgagggccaagaattaggtttaggggtaagaacgtcattccgccggataagtaagtgatcgggccgagtagtgggcttcaaggcaagagactaatgacggcagtgcaaagaggaaaggacttgggcgtgacctaatggtcggtggtgagctactaggagctgcccgtgttcaagtctcatcggccggatgtgttttggacttattatttccaaacagccagttcttgacatgtctttactctttgggtcatatcttctaaacggcttcatggattgctatgatttgacttcgacgtgaatcttgactcttctagctgtccaatgacaccgagatatcctcatgccgggatagggaagaccttggccggatgctaaacttccgaagcactagaatgatcgtcttttgatacttttagcatcaaaactcttaaaaccttcttggcatctagaatgtgtgtttctcctcttattggctctagaatggcaccaaatgctctttgaaacataagaaaacaatagctaaaacgggctaaaaagtcgtgttatcaactcccccagacttagactttgcttgtcctcaagcaaacaaaagaacaaatctggtggagagttctaaaaatcgcgggaactctcctgttatcattgaccgtgtctcgaatatatcctacagaccacattaaacaaaagttgcgttagaacggtcgctcaatagtcctacgcctttctcgtccttgtccatccgctttgatcctacagaactctgaattcacgtcagtcaactcattacattctttaaatgtgttggcgtggactttcttattagaaggtgtcattcaggatagacggtgtggatgtcggattcacactcaagtatttatttgtttagtgagaaggattattcttgaggtcaaatatactaaaaaataagtaaatgattatagagaaaactatgagtattgtaaaagaaaatgtatagctaatttgcaccaaaatatgagtgtgtccttacatgacctttgactctcaatatatatccaaagaatacatttaattcttatttaatcacaatcattctatcttaaacatatccgtttctagtcttcgaattaattattttaacgtttgaatttgaatccactccgggccttcttgacttcacctttcggcccatttggcctcttcaatccgagtagtcttgacctcgacgccgcattcacttcgcaggtcaacaccccatccatattttcacctcgagaacgcttatgagccctctctcttatgggcctcttttatccacgtagcaatctttggccggatccgagcccgtggtgcgggatccgacaccaacaattagccccccaagtctttcgaagtgttactccagtttggaaggctttaatgctataagggcaaagattgcgccaaatgattcttttgatttcccgcccaaattacgcgattgcattgatctcggaattttccataattactgatgcgacacctgtcgcaattatgaccgtatattgtttatttactattaacgcggggaaactcttccacttcccccacgactcccaagacggttccgttatcatcactggctcgcgtgtaggtaaatttactttactctttccttgtcattttatttttgacgcttctctctcaaagcaaagttctcttctttccctgaaccttcaatctttctactctctacacaatg

SEQ ID NO: 12922 - DNA, 3000 bp, Unknown
  misc_feature (1)..( 3000): cDNA_ID_2712807_gDNA_ID_2214581_Annot_ID_135264 3000 nt of promoter + ATG
gaatcactaattaatggaactcgttgcttagttcatgttctgtaaatttgattcatgattatatttgggttgtatcttttccgaaagtctggttatcttatgtgttcatcataaaaggtttttaagttttttgatggttgattcacttatggaagaaccttgttgctagtgaaattgatggaggtattagcttagatctgagactaattttcattcacaaatgttagattgatttcaacgtttgtgtttaagatataaatgttaaaaaatttggtgcaaaatcgagaagatcatcttaactgagttaaatgaacagacctttgtagacaacgatttctggacacgttcttctttaccttttttatctcaaaatccaatcgagaagatcatcttaagagagttaaatgaatatacctatgtggacaacgacttctggacacgtttttcccttgaatttttaatcatttatgctatattttgagatgttttgtatataaaatcaaacttggacttgtattttaaattttcaaaatccaattaagaagatcatcttaacagagttaaatgaacagacttctgtggacaacggcttctggacacgtttttcccttgaatttttgatcatttatgttatattttgagatgttttgtatacaaaatcaaacttggacttgtattttaaaactttaaaatccaattgagaagatcatcttaacagagttaaatgaacagacctctgtggacaacgatttctggacacgttattctttacctttttatctcaaaattcaatcgagaagatcatcttaacagagttaaatgaacatacctatgtggacaacgatttctggacacgttcttcccttgaatttatgatcatttatattatattttgagatgttttgtatataaaatcaaacttggacttgtattttaaaattttaaaatccaatcgagaagatcgtcttaacaaagttaaatgaacaaacctctctggacagcgatttctagacacgttcttctttacatttttatctcagtttacttgaacttgtctctaatttttttgctgtcaaattctatggcttttgaaaaggaatggccctgttttttttgtaatcactgcgtcagccatcggcaactgaaattttttaacttacttgcatgtaatgtatgtggagactaacatcatcattctcgtgaaaagagtcgcagggactataaaagtggtcgccgtttagtctagtgatgccgacgacaacaacatctcttgtaaaagtggtacaccattactatttcttctccgtttcttttgctgtaaaagtggattgatgatgtgggctttgtttgtatctactatttctaatcgaaagagagggaactacctaattgatgattttgaaagagggaatgaaaatgatgaaaaacaaaagaacatggaagagagacgataaactaagaatagtttctcaatcacacgttcttatccggagtaagcggccataactaaaaatggagcgtttcattataaattattttaaaataattaagataataaatgtttttgatcgttcagttatgggttaaaaaagtctatttttttttttgaatagaagaaaaagtgcctcatctctgaaaagtgcctcaaaaaaaataaaattctttaaaagtgtgtaaacatgtcatattccctatttttaaatacaactcaagataaagtttattaaatcaaacttgtggatatatagaaaacagataaatactgtaatagaagactaaatttaaatccagtgttggacaaatcgtctgagccaagtcgaataaatttggtggtcttaagactttttcgaagtggaagtataaaatcttattagtgtcacgtctaaattatataaaaatgttggttgtaatatgtaaatgttttttcgttgagattttagaaattttttgatttaatgtgaaatttcatcttactctcaacaaaatattttggacataaaaaattgttttttttaataacaaaaaaaataataaaattgtttttaaagcagcaaacatacatacagggttggagcacgaaactaataaaatcatgcatgtatgtttactgcttaaaaaattatttaaaaataaaagcagcaaatatacttttcattttaagaaagaatttgaaaagttataaaatctagtttttagtagaaaatatagttttacattttcttaaaataaaactgaaaagctgtaaattattattataaatatatattgaaatttgataagtaattcattaacataaactatcttattttctaaaccgtgtaattggacaaaatattttgtttatcgattatgaatttatttgtatatattgaacctaaacaaaattaaatctcctaatggctcgcatattatcaaatatcaaagcacttctaatttctttatattaaactttcaaaactaaatttaatttattacactcgcactatatattattttaaatataagctttttagtttttttttttttttttaaatatgtttaaaaaagcatctttagtagtttaattatttaattataaaaacttacattagtattcttaatagaaaaaaattaacattattaatcataattttaaaattatattataacaaaccggaatctaaaaactatatttgatcaccttattaattcatcatgtgctttgaaaatttctggtccaactttataggaatatagttttaaaatttctatgttgatttggagtggtagactggtatatatatatatatatttgttgatagcttcctagaaaatactcattccattttagactgttattaatttagctcattttctattaggatgtgacgtttccatttgttgacattgccaacattttacttttagttctcataacaggggttgctaatataatgtattaagactttttggtgtcgttatgtttttgtttggttgagaactgagagtccagcataaaaa

SEQ ID NO: 12923 - DNA, 3000 bp, Unknown
  misc_feature (1)..( 3000): cDNA_ID_2709939_gDNA_ID_2214581_Annot_ID_135270 3000 nt of promoter + ATG
tgtcaagattaagttagcaggatatgattgaaataataagaaaacaaagtaagaagacagcaggttgattgtatgtaaacgattaaataaagaggtaggaacaagatattctcaggaaactattggttagtagatctaatgaaaggtaggttgttatcgaaccattcttaaactcaaactctaattatggaataactggtggtgttccgcgaaactccctatgtctataactaagaatagccagagaagccgagagatttttaacctaaacatgcattctaaacgagttcgattgttcaccttagtagataggccgattcttattacacacctataaaccaggctcatcaaataatagatccaactacagatacctatggtgggcatatctattgtctggattcaagatctagttaattactctagatctagcattaagattaatcaaagatgaagaattctacagataagctaacaggggagcgatctactaaaccatatgaatccctaatgagaaaccctattcctaacaagcagactactcagacatattgaatgaagcaaacaacatatttgatatagaaagcataaacacaacaataaagataagagttagaaaggatctcttcactgtattgaaaactgaatgaatctctgaagaacaatggatgaatagcttatgtctctgaaaatagggtttgcaaagaacttgatcaaagaaaacttaggtctaaaaacaatataaaaaccctataaaatgttcagggactaataatgcaaatagggaagtcttctggggcaaatttcctcttctgtaaacttgaaagcgtcatggactttgctgggccgaaactggtgtcgatcgacaccaggagtgtgtcgatcaacactcctctgaaactggaactcaaaatcgtctttaacttcctttttcttatcttttgctccaaaatgtctccttatctccattatcgtcccactgcatagaatacctgaaaagacactaaaaagactcgagaaataacataaagactcaaaatcctatacctaaaacatagatgaaatcagtgaaaatagggatatatcaagtcccactttaaaaacacctctctctctctcttctctctctcttctctctctcttctctctctaaacttttcagagagagagagattttgatcgagatttagccgtccggtacgctttaccggcttatgaatccggatgtgatccggttttgtcgatccatctcgctgtcctatctcgccatcaggtgtatccggcggttctcatggctattctgttgccgttgtgtttgtttcaccgaattgatttgcgaaacaatttgatatcagttttttcttcttttctaactagaaagtttcatggtctattctcgatctgtcccaccaccatccacaatcaggtaagtgttttggtgtttcgattgggcgactgttttagtctcatccacatgaatcaaaattcagatctgggcgaattatgggttgcttggctccttccaaccgttatagttgaaacggtccggcgtttttgacggtttcaatcacctcatttgaggtccgtcttgccattccaagaagtcaaggtatcaatttccaaagtctattcttattagcaagtgatgacaagagatcagaagcttcacctcgtcgttgattgtttgtcgacgacttctttcatgcttttgttttcggaaaagatccagtgatgagaagagaaagaatttgaagattaaattgaatcctttatctttttcggtttaatagctgtctgttttcataatccggagatgtttccggttgttcactcgctggaaattgtgtcagcttctgtttgcatatttcgctgaaggggttgtgggtaccggtttactaggttatccggttcacccggtttgtaagattggtttatgaataaatatccctttgagaaaaaatcaaataataatcaaacttatggatatatagaaaacagataaataatagaagactaaattttaattatatagttgtattgttggagatggatcctaatcggaaatatcaacatgcatgtaccaataaaaataaggcacgtccaatgttgaactaatcgtctcagccaagtagaataaatttgatgggatcttatggtaagactttttcgaagtgggagtataaaatcttataagtgtgtcacgtcaaaattatataaaagtgttggttgtagtatgtaaatgttttttcgttgagattttaaaaagttttgatgtaatgtgtaatttcattatactcccaacaaaatattttgtacatgaaaatttgttatttgtttaacaacaaagaaagaaaaattgtttttgaaagcagcaaacatacatacagggttggaccacgaacctaatataatcatgcatgtatgtttactgcttaaaaaagtatttgaaaacataagcagcaaatatactttttcattttaagaaagaatttgaaagctataaaatctattattttaatagaaaatatatttttacgttttaaaaaaaactgaaaatatataaagtctaattatacaatatatagtgaactttgataagtaattaattaacataaatatcttattttctaaccgtctaatgggacaaaatattgtgtttatcaattatgaatgtttttttttttttgtatatattgaacctaaaccaaattatcaaatatcaaagcacttctaatttcttcgtattaaactttccaaactaatattaatttattacacttccatgacaacaactaggttttaaacatattattttagactgttattattttcagccactgatattaatttagctcattttctatttggaagtgacgtgtccatatgttgacattgtcaactttgtactttaagttctcataatataatgtgttaagactttttggtgtgtttgagtttttgtttggttgagaaatgagaagtagaacagaatcaagaatg

SEQ ID NO: 12924 - DNA, 3000 bp, Unknown
  misc_feature (1)..( 3000): cDNA_ID_2709943_gDNA_ID_2214581_Annot_ID_135271 3000 nt of promoter + ATG
ggaaccgtcgggttttggagggaagacggtggcggagcggtgagttttgggagaggagagggaagcgcgtttggatagagagaggaggaggaaaatggagatgaaacagagaagggagagtagagggaagagtgagggtttgttgtgtgaagttgtagccatggctgtgtctctctcagaagctctcagccatggcggagattttggattttggctacttgagttatttgattaactgatttaattttattatatatttccggaaaatgtcaaaaagaagtcctcaatttttaaaaatgttttgaataaaaaaaacactagctttccaatagaccagtgttttcatgctcgatccagatcgttcggtctgaccggttaacccgtgatccatttttagtttgagtttagtattaatatccgacaaatttaaaactaatgtttttaaatccgatccggacggtgaatcagactaccgatctaacacgtggcgtgaagctcctaatgtgtgggtaaagcaatattacccatctgccaatattagtcatggagaaatatttgtagcaagatgtttcagactcttcaattccaccaattaggctaacgtttcggatccaaaactccaaacttgggagcatatgttgtacccttttgaagagaaatacaaaactctgatctcgaagaggatagtgattaaaggacaaaagtatgtggttgtgcaaaatcgcgtggcttacaaggcaaaagaagatagatggaaagctataggaatgctgcattatttggaaacatgatggaacttactttcttgctatggtatacaaaatgtgttatatcgttgtattgatttaccaaaaatccaatgcttcaactctaaaacaagatactgggaatctttgaagggttaggaaggtctgccagtgtttgacgatgatggttgtgttagattggtagattatagtggaaagatgactcttttgtgggataagtgcgttccttcatgtagaaacaaaatgatttagtgtgttgtgattgcgcttgaaagacgaagtactcaagagatttggggaaagattgagtgggctgatgatgttcttagtacagtccttcttttttatgattttgtttgtgcgctcaggcccgattattgggctgtgcaattggaactttgaatagggtccaatataattttgacatttttcttcagtatttaggctaatttgtattgaaacaaattagaaaaaacccaaaaaatttaaattctgtttatatatattttttttcaaactattgagaaatatgtccaataattaactgaatcgggcctctatgctcttactattactactactttgatgaattgacttgtgagaaggcttaatgtggtgaatctctagtgattgtgggttatttggttttgttgtatgattcagtgtgttttgacattaatacaataggcatcatttcacttataacactctgatggttagcttattttgtgctctgctaagaggcctatgaaagtctgttctgcctacgattgaagagtgtgtttagtgtccaagtgatttgctttttattccttagttgcagaaaataggttcttgaatgtgtcttacaaagttacaatctcattatcacagatgcaaatggtttcgcttttcatttgtgtttaagaaaaaaaaccggtacggagtgaatcatgttgaacctgcaagtccggccgtattggattagtccaattaattgacatgcgtgtaccaaccaacaaagaaattgccacagaaacattaagggcttgactcgtttaaacgcagcggttgtgggagtttgcggaaatgggcaattgcggtttcaagcgttatttagcgttttgaccgattggtttagcggttgaaaacatgtgcgtttgcagaagatttacgactggttgatcagcgggtacgatagcggttaaaccaaaatttaccaaaaaaaattaatatatgatttaaaaaaaaaatttaaacaccaaaaactagaattatgaaaaagtataaatttttaaacataattaatgatttaaaactataaataattattcaaataaattttacgttgaaaacaaaaataattattaatattgaaaatttaaagttagataattattttttttagaattaatgtgaatatatataagacttgataatatatataatttaatttgattatttttcttttttagtttctttccttttttaaattaaccgtaaccgcccacaaccgcaaacgcttgcgggaaagagcttttgaaatccagcgatttcgaacggttcgaaacgatatggaacagtttctatgattagtaccaaccgttaacaaccacaactgaccgctaacaaccacaaccgaccgctaacaactactagacagttgttagcggataaaccaatcaagcccttaaaattctcagttttataatttctaaacatcatataggtctcgtacctttttggtaacaattattcccataaaatcacatcataacctttccacattataccattaatactcgaacccaaatatcaaaactctaactaccaaaaagtcgaataatcattgctaataataatcaaactgataaatcaactaaatgacgaaaacacccttcaccgaaaacacgtttgcaataacatcccgtggacattacagtctttcgccacgtaaaccatctcctccagcttcatcaagcaaaatttgttttaatgtcttcttcttcatcaccttttcgtctctccactcacactaaaaatcactctccattttgattttcgtatctctcgtgtcacactcacacaaaacacaatcttcctcaaaaaaaattttgtgcaatctgatttgattttcactgtctttctaagtttcgaaacggtggattttgtccgtacgtggttttgattctcgtagatgtcgaagctctgacgtaagattagagtttcgatttctaggtttcttataactatg

SEQ ID NO: 12925 - DNA, 3000 bp, Unknown
  misc_feature (1)..( 3000): cDNA_ID_2709947_gDNA_ID_2214581_Annot_ID_135272 3000 nt of promoter + ATG
atctctgggagtaccggatttagcaagaacctcaagatcaacgagactcatagacataagacccaaagtaagaccagacattagtccagcgaacaagactagtaacactatcacagcgatgtgtatgaagaagctggtcccgcagcattcatattccaccgccatagttataagaaacctagaaatcgaaactctaatcttacgtcagagcttcgacatctacgagaatcaaaaccacgtacggacaaaatccaccgtttcgaaacttagaaagacagtgaaaatcaaatcagattgcacaaaattttttttgaggaagattgtgttttgtgtgagtgtgacacgagagatacgaaaatcaaaatggagagtgatttttagtgtgagtggagagacgaaaaggtgatgaagaagaagacattaaaacaaattttgcttgatgaagctggaggagatggtttacgtggcgaaagactgtaatgtccacgggatgttattgcaaacgtgttttcggtgaagggtgttttcgtcatttagttgatttatcagtttgattattattagcaatgattattcgactttttggtagttagagttttgatatttgggttcgagtattaatggtataatgtggaaaggttatgatgtgattttatgggaataattgttaccaaaaaggtacgagacctatatgatgtttagaaattataaaactgagaattttaagggcttgattggtttatccgctaacaactgtctagtagttgttagcggtcggttgtggttgttagcggtcagttgtggttgttaacggttggtactaatcatagaaactgttccatatcgtttcgaaccgttcgaaatcgctggatttcaaaagctctttcccgcaagcgtttgcggttgtgggcggttacggttaatttaaaaaaggaaagaaactaaaaaagaaaaataatcaaattaaattatatatattatcaagtcttatatatattcacattaattctaaaaaaaataattatctaactttaaattttcaatattaataattatttttgttttcaacgtaaaatttatttgaataattatttatagttttaaatcattaattatgtttaaaaatttatactttttcataattctagtttttggtgtttaaattttttttttaaatcatatattaattttttttggtaaattttggtttaaccgctatcgtacccgctgatcaaccagtcgtaaatcttctgcaaacgcacatgttttcaaccgctaaaccaatcggtcaaaacgctaaataacgcttgaaaccgcaattgcccatttccgcaaactcccacaaccgctgcgtttaaacgagtcaagcccttaatgtttctgtggcaatttctttgttggttggtacacgcatgtcaattaattggactaatccaatacggccggacttgcaggttcaacatgattcactccgtaccggttttttttcttaaacacaaatgaaaagcgaaaccatttgcatctgtgataatgagattgtaactttgtaagacacattcaagaacctattttctgcaactaaggaataaaaagcaaatcacttggacactaaacacactcttcaatcgtaggcagaacagactttcataggcctcttagcagagcacaaaataagctaaccatcagagtgttataagtgaaatgatgcctattgtattaatgtcaaaacacactgaatcatacaacaaaaccaaataacccacaatcactagagattcaccacattaagccttctcacaagtcaattcatcaaagtagtagtaatagtaagagcatagaggcccgattcagttaattattggacatatttctcaatagtttgaaaaaaaatatatataaacagaatttaaattttttgggttttttctaatttgtttcaatacaaattagcctaaatactgaagaaaaatgtcaaaattatattggaccctattcaaagttccaattgcacagcccaataatcgggcctgagcgcacaaacaaaatcataaaaaagaaggactgtactaagaacatcatcagcccactcaatctttccccaaatctcttgagtacttcgtctttcaagcgcaatcacaacacactaaatcattttgtttctacatgaaggaacgcacttatcccacaaaagagtcatctttccactataatctaccaatctaacacaaccatcatcgtcaaacactggcagaccttcctaacccttcaaagattcccagtatcttgttttagagttgaagcattggatttttggtaaatcaatacaacgatataacacattttgtataccatagcaagaaagtaagttccatcatgtttccaaataatgcagcattcctatagctttccatctatcttcttttgccttgtaagccacgcgattttgcacaaccacatacttttgtcctttaatcactatcctcttcgagatcagagttttgtatttctcttcaaaagggtacaacatatgctcccaagtttggagttttggatccgaaacgttagcctaattggtggaattgaagagtctgaaacatcttgctacaaatatttctccatgactaatattggcagatgggtaatattgctttacccacacattaggagcttcacgccacgtgttagatcggtagtctgattcaccgtccggatcggatttaaaaacattagttttaaatttgtcggatattaatactaaactcaaactaaaaatggatcacgggttaaccggtcagaccgaacgatctggatcgagcatgaaaacactggtctattggaaagctagtgttttttttattcaaaacatttttaaaaattgaggacttctttttgacattttccggaaatatataataaaattaaatcagttaatcaaataactcaagtagccaaaatccaaaatctccgccatggctgagagcttctgagagagacacagcc

SEQ ID NO: 12926 - DNA, 3000 bp, Unknown
  misc_feature (1)..( 3000): cDNA_ID_3027045_gDNA_ID_2214581_Annot_ID_186507 3000 nt of promoter + ATG
cagaataagataatagggagtagactttagcgttgagccttaaatatttgaatatgacatagaattctaaacatattagtgacttgcaaacaactttttgaaaacccaaatagtatttcatttgaaaatttctacacctagcactcaaaactttaattaaatattaaataggttcttaaaagtgggggcttactttctttactcattttacactctccattatgtgttactcattttacactctccattatgtgttatacaggcgattttaggaaggaaaaagagagagtttaaaatgtaatgaaaatagtgtttcatgcgtgtatgtattttctaccgtcttgtttatgtttgatttgtgaacatatatatgccgtcacgtttgtaagaaaacttgtaacatgaaaaaatatcagacatatttatctacaagatagcaacatgaagagtggaacaaaaaaaatgatagcaacagccttctttaataatctacggtaaatccatgaaggaagaaaacaaagatatcttgacttgttaactaaaaaagtctttgggaccaaccaataatttcatgtttatctttcttgctacttggaggtgttatggaataatcaaagctgcttccttattgatataggttaaattaggcaaatatgacatatttattagttttaaaaaattacttagatgtaattatactaaaataattagatgctattttttggaaatttttacaaaatcaagattacacagtcaattattaaaaaatatatagtcatgaagaatgttatatagtcttttaatgattttgcatgtatctctcccacttgctttacatatgacgtcatgtttaaaacgtaggccgaaccagtaacatcggatactatcagacacacattcatatctatggccagagatgacctgaccattatccatgatgcaatataataaaacaaagctatcttgacttgtttactaaaacaattcttaagacttatatataattccatggttatctttactggcttcatgcaaggattatggaataatcaaaacagctgcttattgaatgaggttggttaaattaaattacgaaaatatgacacatcattataaaagtctaagagctcatttgtttcaaatttggaaaaccatatacatcatctatattcaacatcctatatattgtttaaaactttaaactcgttcttttttttcaattttttattttttataattcggatgatttggttcaacagattttatgatctctgaaccagagcacgaagatttctttttctagctggttcttgggtcaatggaccatgagaactgactaatcccaggacgaggggaagccatgtgaaaacctctaacactcacacatttgtggagtagtttttagggtagatcaaactttggatagctcattacaactttttttagtctgatcactaccactagaccaagcttgtgtgggcaaaaagacttcgttctcaagggcggacctagtaaagaagaagggggtcacttgacccaagttgaatagtcaaattttattttttgcatagaattttgtttagaattagcagaacaattggtaaattccaaggtgttgacacccccaaaacatgagttcaaatctctataatgacacttttactcttttctcctcaatttagttttaaataaatgttttttttgtcttatatatttctttactttttccaaaataacagcaattaatatactatttttatttccttatgaaattgattttatttttgtgagtttgtataaatattataagaaagttagttataaaatactgtttataaattttttttgaccccggtaaaatttatttatgggtccgctactgctcgttcttgcctataaatgtaaattttgtttctatttgagtatgcagaaaaatacaagtactatatatataaaacactcgttttttaagtcatgtaaattatcattaatgaatgaaggaatttgtaagttaccaaaaaattgcttaaccagcgaaggggataaaccttgccaaaaaagaataaagaacaaggatatattttgcatgtcagagattaggtattaccgtattagcaagccaaagctgcattagggaaatcccaataaggtttttacgttcatgatttcttgcacgactatgatctcgtcaatatggaattatacaacgtctgctatttgaatatggctgccttaggctctctcaaatcttatctatactgcatattcgattggacgaaatggaactatgattatttgccaattttgtccatacatcaatattttcaaagtattccctggaattgtttcttattggtgttaagattttgtcattgttgaagtacttttgatgttatttttatacgtaattaatttaaatgaagtgaaaaacaagaaatgaaacttttttgtttttattcaattgtttcttttgttagtttttctatttctaaaatcttatttttcatactttggaatattttttagtttttttgttcatcaaatatcctataatttatttaaactttttaacctaatgtaataatacaaaataaattagacggtatgctgttgtaaatgttacagaattcagatcaaatttaatcaactatttttaaaaaattaacaagtaagtcatgaagaacatatagtctttttatgtttaatgcatgtatctactatctctcccacctgctttatatatgacgccacgtctatgacgtaggtcaaaacagtaacattagatactatactatcagacacacattcatatggccagagatgaccaaccactggagatgctctaagaaatttatcctcgtaggcttttctcttttaaaagtcaacatattggagccagatgtttattttataaatactaagaaccacaccaaagaaaaaacatttcaaagcaaaacaaaagagagagagtgtatccatttttggaggggaaaacaaagt

SEQ ID NO: 12927 - DNA, 3000 bp, Unknown; identical to SEQ ID NO: 12925
  misc_feature (1)..( 3000): cDNA_ID_2709947_gDNA_ID_2214581_Annot_ID_186503 3000 nt of promoter + ATG

SEQ ID NO: 12928 - DNA, 3000 bp, Unknown; identical to SEQ ID NO: 12924
  misc_feature (1)..( 3000): cDNA_ID_3027053_gDNA_ID_2214581_Annot_ID_186501 3000 nt of promoter + ATG

SEQ ID NO: 12929 - DNA, 3000 bp, Unknown; identical to SEQ ID NO: 12923
  misc_feature (1)..( 3000): cDNA_ID_2709939_gDNA_ID_2214581_Annot_ID_186499 3000 nt of promoter + ATG

SEQ ID NO: 12930 - DNA, 3000 bp, Unknown
  misc_feature (1)..( 3000): cDNA_ID_3027062_gDNA_ID_2214581_Annot_ID_186495 3000 nt of promoter + ATG
aacaattactagaggattctactgaacatgtgaaccatgcatccattgtgtctggtgataaggtatttcacacaacatctcaaattacattcttcattacaatcataaagttcataagagttttggcaatttctaactctatatattgcaggttccacttatgctggagaatggtaatggatcgccagactctacgactccatcttcaaagcgtgtttacgctagagaaacgagtggctctgaaggttcttcaagttcaaagaaggtgtgtgttgtaccattagacttggaaaagtctttatctgagaatgctgaacatggagttgccttgaatccgcaggtggctgattcaaaagaagttactgttccaactgaagtcaaaacatcaaaggttcctgttgaaacagagaatgaccaagcacttgtcccagctactgtcgtggtgaaacaagaaatcaagaaagagatggctaggaacatggctactgtaagggtcaaagtggagaagaacaagtgatctacttatctatttcttttaataagtgatgcttcttgaactatgtttggtcactgaagctatgttttgaattttgtttttctttaatggattatgttcgtgtttttgttttcgaatttataggatttcatgttttggattatgtttcatctttaattttggagttaatcttaaaattattttattaagcttatatgttcgatcattactaattttgtagccatctatatgaaaacatgaaatctcagttataatgttactgttagagggtccaaagaaacttaccatttcatgttgtatatatgtattcaactggcttaagacttttaatgaatgactttagtgtatacctgtatcaataagttaaagtttcattaacaatttgctattccaatcttttagatataatatagatttcataatatatgataaaatgaaactatacaaaagatcaagtcaatattatgtcaatattatgtcaatcttttgacaatcttctatatagattcactatgattaacatctataactgtctagatattaggaaattgtcttattcgtaatcattatacatctatgtctatgatatcttattagattttctcaatatgtcatattgacgtcatcatcgagaacccgcggaacgattcgtattttcttattttaaaaaacatctgccattcattgtatcttttcaacttatatatatattgagtaactgttccttttcgatctcaaccctaaaagataaaacaacagaataagcataaacattaaatccttagagagacatccgtggcttatattcacaaactcgaaaatttgaacttgatgaacaatcagaattgggttatatgcgtgatagttctctgtatttgggatcatcctccaaacgtgaatggtgatgttacaaccatgattttggttgatgcaaaggttagtctttcaaattcatctgctcttttagatcgtttttttttgtggcttggtctattgcatgtcatcaaaatatcttgcgggttctacttagtctttttcttttgtcaacttaacagcatcacagaatcgttgcaaccatacctagattgaatttgagggacaaattcaggcgagttctccaggagggtttctggtttaacatctctcagtttcgtgtgattccctctacacacagagtagaaacgtatgtgttgaaccgtctccatatcatgttcagatgggatactgtagtgttcagaatgtcagagttagtgaaatctgatttcacagactatcttttctccaatgaacttgaggactctgctacagacaatgttcctgatgttactggtatgtttataacgatcataattctttagatcatttcatgagtttatatttgagtactctgctgcagacaataactagcttttgattttttgttttcatagatgctattggtgtggttgcaagtgtttcttctatcaagaggtttccttatgtctgcaataagggtgagaccgactatgaggccaaatatgtttctttcgagcttatagataattggtaagtttataagttatagatttaggattagttgatctagcttgcagactttacatttagattattgcgtgtgattatttaccacagtctaccaatggtacagggaacaaaaactcaagtgtgttgctgttggttcatgctgtgaagagtttgttaccaagtggtctaggcgtatcactagaccaacatacaactatgaaccagttgtatgtgttgtgcgcttctggagaattgcttcaattgatggttagtattctaaatctgctagataattgtattgagttgtgacccatgaaacctgtgtttaaatttaaattatgttctgttttgacaaatgaaacctgtgttttttctgtgtgtaaggtgaaaacgttttaacgagtgagtttggatgttcccgtctacatatagacccaagcttcccttactttgatcttgcaagttatctgtaagtctagcaattggttttaaatttctgtagtttacaattaagaatagttacttagttttataatctattgtctctgtaccaggcggagtttcaaagatgctgatgatcaagaagtgacaatggaaccagttactgaagcttgaagctatttgggtcggtttgttcggttttgggagaaattcggttttaattttttttaccgaatagacccaaattaaaattcggttcgggtcggttcggaagtcggttcattcgggtcggttctagaaattgtgttccgaacttaaaaccaaacaaaaatttattcggtttctacggtttttaattcggtttagatatttaaaaaaaaaattacactaccaaaaatcctaatccaaacaaattacccactacaaattaataaaaagcccaaaatacaattcaaaaaagcccaaaacaaaaactaatagcccaaccctagaaaatattagggttttgaccaaaagat

SEQ ID NO: 12931 - DNA, 3000 bp, Unknown; identical to SEQ ID NO: 12921
  misc_feature (1)..( 3000): cDNA_ID_2712819_gDNA_ID_2214581_Annot_ID_186485 3000 nt of promoter + ATG

SEQ ID NO: 12932 - DNA, 3000 bp, Unknown; identical to SEQ ID NO: 12926
  misc_feature (1)..( 3000): cDNA_ID_2709959_gDNA_ID_2214581_Annot_ID_135275 3000 nt of promoter + ATG

SEQ ID NO: 12933 - DNA, 3000 bp, Unknown
  misc_feature (1)..( 3000): cDNA_ID_2712856_gDNA_ID_2214582_Annot_ID_135277 3000 nt of promoter + ATG
tctaattctacccaaagcaagaaagcagcctgcgccttgtccacagtattcttccgacccgtaaggcatttgagcgcaatagcatcgcaaacttcctttgcataccttcaaaagcagaaacaaactaattattcacatgcaaacgaacactccactctgcccatttctaaagcaataaaaataaacaacaccataccttccagcatctgaatcggctgctcgcaaaaacgcaatcaatgcatcaagcgctttctcttgcaccggcgcattagaatctgccaccgtcttcctaaacaagtgacctgcgaataaaaaataataatcagaaattcaatcaaaagtaaagcaaaatggaaccctagaccaatcacattcccactcaacaatccaaattcaaaacagatccacaccgatataaaccaccctaatcagatctgagcttcaaaaacaaaaaccctaacataataataataaaaaaacgaggtagagaaactcaccaaaatcgcgaagacgagggtccttaggatcagtaatcgaatcaaaaacagaagctaaatcgacgttagcttcgttcctaactttccaattcttatgcccaagccgatcctcccaaggaagttttttcgcctccttcaataacttctcatcctccgtcgacattactccacgaaattatctctccgacggtatcgatcttatcgatctataccaagttttttttttcttcgtacggtctcttggaaactttctctctcttttcaaaaaaatttcttcgtgttgttagtgccggcaagagagagagagagaaggacaaaaaagaagagtagggtggagcgtaatgagagagagagagtgggggaattttggtttctacgtttaaatcggtggtgtaatttttttgttaaaaacccttcacgcgcgttttgattggaaatgtttacacgcgcgattatttcaaatcttaaaacgagcgtttttcttttgctttctccacgtggagagatcggcattttcaaactattttaggaaatgattaacagtactgaattttcctattgttggttctgtaaatattttcaaaatatatttacattaacaatctattaatttctaagaaaataaagtaatattttgaaatgaataactcatttttagttataaaaatatttattttaaaaaatcaacaaaatcatgagttattattacttacttattggattatcttttcttctataaaatacaaataaatagtcattttctataaaactagacacgtaaaccaaaatggatttattagtttgattatggaagttcaaaaacattgtgtattttatgatttaaaaactagttaaaatttattattttaatatcctaaatatttatgctaggatctgatttcgctttggattttaatatatttgaaatatctaattcaaattcagaatacaaatactcaaatttcaaacaaactttgattgataattagtacaagaatatttaagccacaccacaccttacaccttttccatctccatcctcatgtcttaggtgatgtaactctctatctccagatatcttttcttgtctactgctaacacatgaaacaacaactcaaatttaagccatatttttacaatggtaccaaatttataagaatcatagatgaaattaccaaaacaagaagttacgtggaaagattgaatccaatattaatattttgatttctattataaaagcaaatgaaataatgattatcagtccattgtttgttccatttttaagtacacttgtttgtttgatttaggtgaataagatccgctaaagctgaaaatacaagaattgtccctaaagatagtaaagtacagtacgcttccaaataaataacaatgggctttagtaggcccacgcaataacgatgttttaactgacccaacaagcccttgtccagttctggcattatacaatgcgtcggtcgacacgtgtaataagtcatgatcggcacgtgtggtctccacttctcctctctcattggtcgtaaactcgtaactagccgattccttctccaaagtatctcacatttccactgcacactctactttctctctcttcactctctcataaatcacaacaacaacaaaaaaaaaaaagttgttagttaagacattgctttacagctcaattgcgtcttcttcctctgtcttattcttcatcttcatcttcctcctcgcggatccattttgaggttcgtgtaaattcccattctctttcgccatttttttgggggaagtgagattttggtctgagttatcggcgaatcgatttcgtttttttagattattgaatggttttgttgactcttcagttcttcttgtgctgtgattgcaatgatgtcctccgaatttcgtgatttaagttcgattttagctatccgagctcctctttaaataatgagttggggttttattctgaaggttcgatttctgattttgcaaatttgggaggtggatttgatccgattagataatctcactgttctgggtgctgtaattgttaatgagaccatgcaaatgttgtgcatcgatgttgtggaacgcttgatttgtaattgaggatttggttgtctgattattggaagatcgaggcttgatagagtttcaaatgagggtcagctgttattgttgtacggtctaatgacattattttatttaacttcaggagtctctttttgtttcttgaagatagactgggcgtcacggagcagctgagtatatgctacgagtgttgcattccggaggctgttctttcagatgattggcagtagctatattatgcttgaacggtgccataatgggcatctgtctaatgaagcgctgctgctcatggtttcttttgatctcgtttctctctgcactaacgaatgaaaatgaagcaattagtcctgatggtatacagcgatatgtgtctttaatctcttctatattttgtctttgacaagtcatg

SEQ ID NO: 12934 - DNA, 3000 bp, Unknown
  misc_feature (1)..( 3000): cDNA_ID_2712852_gDNA_ID_2214582_Annot_ID_135278 3000 nt of promoter + ATG
ttatgcaccaactatatagaagcaaataaagaaaaacactagtaattgttaggaaataatataaaatttggaaaaacaaaacgagaattcgatcagcaatgaagtgtaatcacactaatcagcataagtatttgggaaagcccttacattccctctaatgccgtgcaatttcccaatgaggcaggtattgattgatataacgcattgttgtgaagcattctgcaatgacatgggaatacacatacaatgagtagtagagcatatgctagacatcaataatattaattaaaaggttaggagcacatacaaaagccttaactgatccagctttccaagctcagggggtaaaggtccccttaatttgtgataagtaagactcctgcacacaagaaacttcaggaaccgacaaaagatgcaccacatactgaagaaaaaaaaagaatttaaactaaagaaattttaaacttacaaggctataactctttttgtttttgcatcacaggtcactcctttccagttacatggatcaggatcctctggtctccacagaccaataacaccatcagaagccaaaactccatttctaaaactcaaaagcgcctcacctggagaaaaaaaggatttaatcccttcagcaatctgggcggagtaaatggtgatcatgacttgtcaaagacaaaatatagaagagattaaagacacatatcgctgtataccatcaggactaattgcttcattttcattcgttagtgcagagagaaacgagatcaaaagaaaccatgagcagcagcgcttcattagacagatgcccattatggcaccgttcaagcataatatagctactgccaatcatctgaaagaacagcctccggaatgcaacactcgtagcatatactcagctgctccgtgacgcccagtctatcttcaagaaacaaaaagagactcctgaagttaaataaaataatgtcattagaccgtacaacaataacagctgaccctcatttgaaactctatcaagcctcgatcttccaataatcagacaaccaaatcctcaattacaaatcaagcgttccacaacatcgatgcacaacatttgcatggtctcattaacaattacagcacccagaacagtgagattatctaatcggatcaaatccacctcccaaatttgcaaaatcagaaatcgaaccttcagaataaaaccccaactcattatttaaagaggagctcggatagctaaaatcgaacttaaatcacgaaattcggaggacatcattgcaatcacagcacaagaagaactgaagagtcaacaaaaccattcaataatctaaaaaaacgaaatcgattcgccgataactcagaccaaaatctcacttcccccaaaaaaatggcgaaagagaatgggaatttacacgaacctcaaaatggatccgcgaggaggaagatgaagatgaagaataagacagaggaagaagacgcaattgagctgtaaagcaatgtcttaactaacaacttttttttttttgttgttgttgtgatttatgagagagtgaagagagagaaagtagagtgtgcagtggaaatgtgagatactttggagaaggaatcggctagttacgagtttacgaccaatgagagaggagaagtggagaccacacgtgccgatcatgacttattacacgtgtcgaccgacgcattgtataatgccagaactggacaagggcttgttgggtcagttaaaacatcgttattgcgtgggcctactaaagcccattgttatttatttggaagcgtactgtactttactatctttagggacaattcttgtattttcagctttagcggatcttattcacctaaatcaaacaaacaagtgtacttaaaaatggaacaaacaatggactgataatcattatttcatttgcttttataatagaaatcaaaatattaatattggattcaatctttccacgtaacttcttgttttggtaatttcatctatgattcttataaatttggtaccattgtaaaaatatggcttaaatttgagttgttgtttcatgtgttagcagtagacaagaaaagatatctggagatagagagttacatcacctaagacatgaggatggagatggaaaaggtgtaaggtgtggtgtggcttaaatattcttgtactaattatcaatcaaagtttgtttgaaatttgagtatttgtattctgaatttgaattagatatttcaaatatattaaaatccaaagcgaaatcagatcctagcataaatatttaggatattaaaataataaattttaactagtttttaaatcataaaatacacaatgtttttgaacttccataatcaaactaataaatccattttggtttacgtgtctagttttatagaaaatgactatttatttgtattttatagaagaaaagataatccaataagtaagtaataataactcatgattttgttgattttttaaaataaatatttttataactaaaaatgagttattcatttcaaaatattactttattttcttagaaattaatagattgttaatgtaaatatattttgaaaatatttacagaaccaacaataggaaaattcagtactgttaatcatttcctaaaatagtttgaaaatgccgatctctccacgtggagaaagcaaaagaaaaacgctcgttttaagatttgaaataatcgcgcgtgtaaacatttccaatcaaaacgcgcgtgaagggtttttaacaaaaaaattacaccaccgatttaaacgtagaaaccaaaattcccccactctctctctctcattacgctccaccctactcttcttttttgtccttctctctctctctcttgccggcactaacaacacgaagaaatttttttgaaaagagagagaaagtttccaagagaccgtacgaagaaaaaaaaaacttggtatagatcgataagatcgataccgtcggagagataatttcgtggagta

SEQ ID NO: 12935 - DNA, 3000 bp, Unknown
  misc_feature (1)..( 3000): cDNA_ID_2709971_gDNA_ID_2214582_Annot_ID_135279 3000 nt of promoter + ATG
tgtaggttgagaagaatgcagctgcgggaagaacaccttcaagcctaccgttgtcaactcctcccccttcgtccttagctcttccatctcctgatattccttccttgtcctctttagatgtgaagcctttgatgaaccctagatctgatttatacacagacgacatccgagccagtaacatgaatcctggaggtagtttcctagatccttatccttctttgtccttccttgcggtgtttatatatatctgttaaaaacaaacatctttggcagtgatgacagggacgctagatgcaatcagagaaaggatgaagaacatgcaactggcttcatcagagccagtaagcaaaccgctgatgccaacaaacgataacttatcaatgaaccaacagagcgttcccccgagccaaatgggacaagagacagtccacacacacccagtggttctcccaatggatgagaaagcattgtccggtcttcaagcccgaatggagaggctcaaaggtggatcactggaacatatgtagaactagagaccccaagctttggagtctgaagttacataagcaaattcgccatttttgttacttctctccaattaatgtagtagtaaaatacttttcttttaatatacaaacatataagagagagcaatattttatggtgaagcggctagatttcaatggagttagtgtgtatagtggtgggagagtctgggagctgatggtgagtgtgccagattctttttaatatgagacaaaatattattctttctatgcttgtttacatctttttttcaaccactagtagaaacctgaatattctctcgactctgtttagatatgattctgatgtagttggcatatcttgtgtaatccctccactctcaaatttctaacaattcttaatttttgggttgaaacggaagtaatattttgttcttccatctaaccaaaggtcgtatatttgcaaaccaattgaagtagaaattaacttaaaccgggaactggtttaagagatattaatatatgaccgaagacattgggtttaaaaagtcagaataataaaaagttggcgtagtctaaacgccgacccagaggccctctcatacctttaccagtgcctatatatatatatatatataaacagactaattactattccccatcgcacagacccccctaagaatccgagagagaagaagagataatgcagatcttcgtcaaaaccctcaccggcaaaactataaccctagaagttgagagcagcgacaccatcgacaatgttaaagccaaaatccaggtttaatttagggtttcttctcttctttatcccctcaaacgattccttagttcctctgaatctctacttgttcttaccttgaattgtataattaagaattgtttcgagtaggaatctctagtaatcttgaagaacatggatttgatttacttgagaatagctaaaaagtgtttgtgaggattgatagtttgtttaacgatctttatctgagctcgcttttgttcgaatctttggtaaatcattttggggtttcaggacaaagagggcataccacctgatcaacagaggctgatttttgctggtaagcaattggaagatggccggaccttagctgattacaacatccagaaagagtctactcttcatcttgtcctcaggctcagaggtggaaccatgatcaaggtgaagacactcactggaaaagaaatcgagattgatatcgaaccaaccgacactattgatcggatcaaagaacgtgttgaagagaaagaaggcatccctcctgttcaacaaaggtaaaaacaaaacttacgtttttctcttatgacttgacgagtttgtgtttgtcttggtgcatttaagcctcaattgagtcccatcctgaacattgtttgcagtatttttattgcatgtgttagtcccatcctgaacattgtttgcagtatataactctgtggtacgctctgaattctcaggctcatatatgccggaaaacagcttgctgatgacaaaacggccaaagattatgcgatagagggaggctctgttcttcatttggttcttgctcttaggggtggtcttctctgatcttaataaataagcttttcaacaaacatcttttccctcactattgtcctccttatgtggaattcatgacacaccaaaattgctatgggaaattggaatattatgctctgcttgtgtgtttggatcatattacttgtatttttcagtctctctgatatgatactttgtgagttaattatcgagtgccgtatcaggtaggaatcgttatctgactaacgagttttccactggcacataccaattcatatttcgtttaagtagagaagtccagattgcatgtgagatctagatccgagactccctcgttcgtctatccagagaccttgaatatggcgtcaactgccttcccactaaatataacgaccatgtcaagtactaagagtctaagaccactgctgagcatggccttctgtgataatctcggggttatacgttgctaaaagttgactcctagtcaccaaatggcatagttttataataacactgttagatccttgtaccagttactcagtgagatccttagattcacatagagttgtcccatataaagtaaaaaaaactagagacatgaaacatagatttttttttttcatcacgtgaaacatagataagaaaagaaaaaggataggtgttcaattatttaatttagtaggaaacatagaataaaaaaacttgctttgtttttcatattttctcattattggaatcactgtcttttcgaacttggtgacaatcttagtactagaaaacaaaagactttgaccggtctttggctcatctctttcttctcccctttctccaacacttatttctttctctctctagttcatgaattcaagattcaaagacacacgtatggctacctcttggtaaatccaaagagacacatat

SEQ ID NO: 12936 - DNA, 3000 bp, Unknown
  misc_feature (1)..( 3000): cDNA_ID_2709982_gDNA_ID_2214582_Annot_ID_135282 3000 nt of promoter + ATG
tccttctttcattttcctatatcataaatcttgagacatgcagggcccaaaattacggatccagcgatcctaaaaaaacaagccaaagaactggttagtacatggccagaagatctgcaaaacctcatcgatttaacacctgatgaaactatcagcagaactcctctagtagaccggtggctatggcctggcattgctcctccagcatcaaaaggacgagtggttcttgttggagatgcttggcacccaatgactccaaatcttggacaaggtgcttgttgtgccttggaagattcagtagttctggcaaataaacttgccaatgcaataaatggaggaaccgaatcaattgaagtagcaatggaatcatacgggagtgagagatggtctcgagcattcccgttgacagtacgtgcaaacctagttggcgcacttctgcaatgggagaatcctctagtgtgttccattagaaacaatattgtcataccaaagttactgaggcttggaccaatgcttgaacacacaaactttgagtgtgaacctctctttgtttctaaaagctgaatttcgtatatatagtgagatccattgaatagagagacttgaacaatgtataatcataggaacaatataaactctgtgattgaatgtaaaagaatcatacaatgtaattctagaagctaacatttgtgagaaaattgtctcaacaagaacagagtaaagcttgacctaatcaaagtctgtcttccaccatgtcaatttgtcactgtttgatctttgctactgtgaacaaatcagacaatagaaatacaagtcacaaccaaaaccttaaaaattacagagattctcgaacatgaacagaggatttgtctccgaggaattgaatttggttacctggattcgaaaacatccaaagtatgactgcgcagagaatgagtacgatcggaatgaaatggatagcgttctcggcggatctgaatcgcgatttgttcttcttcccgggatgagagttgggatcgtacctaggcaaaagaaggtggctatcatccgaatctgcggaggttttaattcgcggcggagatggtgatggcgaaggagaattcgctgagagttggtcggaaactatggaggcgctcgccgatcgacgcatctttttttcttctttctacttttacgcgcttcacaaggagaaacttctatatatagaatgaatatggtttttgaattgactgttttacccttttgaaagtcaaacttcacgcgcccttcccggcaaattagtgtcgagtgtcctaagttctcataccaagaacactcggaagaaattggaaaaaaaaaattggatttttttttatcaattttaaatttttaattggataaagaaaaacaaataaaaatgtaaaattaaacctttgtgtagaatgagtgagactgttttgagatcttggaagtaattgataacattttcaatgactggattagtttcactatgttacattaccttctttagaacaacacctccaagtgacgtttatcaaacctacagaaatctcaagtatgtgtttgagagattgttgactctcctcattgtgctatttggcattttggctcttttataattctcttcgattagtgattcttttgcattcttatcttatgtagacttattctttggttttactttagtattcaaatttgagatatccttcttcttttttaatctgattttattaaatcattcttaaacttaaaataaaataaatttctagttgattaccaaacccgaagaagaaaaatttacaataaaacgattttattggacttaaaatgggccatattaacttttaaaattatgaaattcaacaataattaaggtccaatcgcatatttatttagggtttcgggtatttcatctctataaatatgttatataggtttctcggaaactcagaaatacgccgcaccaacaccaaaaatgaagtttctagctaataagatataatctctctgatactagttttgtgttaaagtggtgaaggcgcaacataaattgttcttcgtttgatcattcatttgcgaaatcaaaaacgatcattccgctgcgaaatcataaagtaaatcgaaatctctatagattaaatatgcatgcttagattcagtaatattttattaaaatgtaggaatttcaacaatatatatcttgttgtttccatgatttctttttctttttctaattttctattttcttttcttataatctctactgccatcaaaaaattttttaacaaaatttagtctgtttatcaaaattttaatatagatgattcaatattttcatttttaagagcattttgtctgcaaattttaaatgatatacataatagatttttattaatctcaaaatttggttgtgaagttgtatctacttctgtgatgaagcacacctaatcaaagaagagtcaatctcaaaatataagactctttcttacttgtgtcttttcgtagtcatatttttaaaaatgtaaatatattcagcttttatatattcttcaacaaaaaaaaaaatataacaataagaagatttcttatttgtagtcttgtagataacgttctcttctattttttcttttaaaaaaaattatgaagttatgtgtagagattctattatgtttcatattgggaaacatgcacattttccagtccactattctttactctttataatgggtcaaaggtctgccgttacagttttaccttccttactagtttatatatcgcaattgggcagctaacattaaatggctatttcatgcacagtgaaagatggttagacgatcattcggagtttcgccaatgatctatacatgtttcattgatttcttgatatttctgctaattaaaattgcgtggatcacagtctaattcaatgtttatggcgtgacagcttatagattaatcaagcagatggctaggaagtccatacgggggaaggaagtggta

SEQ ID NO: 12937 - DNA, 3000 bp, Unknown
  misc_feature (1)..( 3000): cDNA_ID_2709990_gDNA_ID_2214582_Annot_ID_135284 3000 nt of promoter + ATG
ctcgccagcagactcacctgcattcattcttcgccatcatcatcagtagacagaaatgtcgacgcttatgcctcccatggaaagatttttcccagaaagcttttggtcctcacgcaagcccagccacagacacgatatcctcgccatcgcagcctgccccaccactttcaccctgtacaccatgctcagatctgcagctgccgcccatagctcattcccattaactttcactgacctccgtgaccgtgagtcatcatcattatagccctctagatccgagtgggtgactacaaccattgacccatcatcaaacaccactacattcccagaacaaacctgcttcacatttctcgggatcaaagctgaagttgcatcagttaagcaactctgagtattcagcaccttgacatggtagtactcaacaacggcctgcaaatacatcaacaatcagaagaagaagaataaatgactaaactctggttcatcggtgatgaagaatgggacccctgtcagataccttccattgggctgctgctaaaagaaccctgggcctgattgatctcacgtaggaatatgctgcttcaggtgtcatgtttttgtgttgaacctgtgttgaaaaggtatgatcagagaaaaggagaaaaagtgtctctgctcaaaatgtttttctgggatttattgcaatacaaaccaagtagcatatgacaatagttgtgctgcgaccccgacccgctttgcagtgaacataagtcgtctttccaagcgaagcatttccttcaaggagacaaaatagaatttgagatcaaatgaacgcgggttcggacaacagtaagctttttaataatggtcagtggcaaaaaacgtaaaagaataaaatgagaaggtacacttactatggataaattctacagcttggcatattgcttccatggaaggagcaaaacaataatctcttgtagcaatcaccaggtggtcaatgcagtaagacttccataagagtaagaaaattaaatgggccgggtcagtacatagaagaaaccaaaagacagaacggccacattaaataactcactttgtagagagacgatggaaccaaagtttcatatggctcattcagagtgatcactccacaaacaccgagctctttcagctgtggaacatcagatggaaatggaacagctcccagtaatataaactgcagaaaccaaagagagagagaagcataagcaaaagacccagaaccaaatccagaaaacatacttagaggagtatctacaagagatacaacaacaaatgaagacgattttacacaaaccatcaaaagcagcacaatctacatgatcaatgtatcaatttccactaaaacagctcaaaggacaatcaagattttacctcagccacgcgatcccaccagcgaaactcagattcgagcttattcctaacaacgttgtaaaccagagtaggataaaacaaagcacgagcaccaacaccaacgagtgccctctttgtagtcaacacaatcacgtttcctctgctcaccaataccgccttatctccatcatcaacgttatcctcaaccgatctctccctcttctcctcatccgtttccgtcagttctttgatatacatattcctcagtcaaagatctaaagatccaacacacaccaaaaaaaaaaacaatctattctcctgccaaccgatgccctaataatcaatcaccagtcttatatacacagacacgattattcacaatcctaattgattcgaagacaaagccaagaagaaagtctacacgtaatcgaaatcgcgataaagtcaagaggaagcaaccgaagaaattttgaattcaaaatcttcagggagatcaccaccatatttcgcctgaaacaaaacgatgatccgatcaaacgccggtaacgacgagacggagaagactgaaaaaaatccgatcaccgatggatataaatcaaattcgccaaatgaccaaagagaagaatcgccctaagaacaagttttcgaaatttggggatcgagaattttgtttttgcctaatctctactcaacctttaggttttctctttaagagaggagaaccaaaaaaagaaggatctcagtgttttcaatgagagggtttttgctaaactgacaagcgtttcacctcttattgtagcttttatgtgaaagtcaatgctctgttgacacgtgttttgccgatttatggagaaagagtcatgcgtcgcacaaggcccggataatattaggattatcctttctttaactcttttttttgttttggataagatcctttctttaatttttaagtatcaaattaatttaagttttttaaaagaacaattaatttacccatatttgaaatgaaaagaaaattatgtttttaattgttaaaattcaagacttcttgagccaaaaataaagttctctttgagcttaagaaaaagtatctaagtcctctaaaatattaaattcaaaacaaacaaaactagtcctgggtaatactttcgagtaaaaagaatttacaactaggctacaaaatagaaattactgcaaataggctttattatattggagtgatttactaaagtcaacaaaaaaaaatcaaaagtagctgagcaaattatctacagcccacgagagtgtagtaatgggctaatgggctaatggcaactatgatgtgtagatgattagagagagcttgattagttttaaaccaaatcttatcacgtctttcattagaatccgatataaatgataaatacttggaactttctattaccaatttttttgttacctttattacattagtctctctttctgttcaaacttgtaatcctaaaaatagaacaaaatcctctgttttttctgtaacgaattctttcttattgaatcacccaaaggtaagagcttttttagtggcttctctttctttgatttatccaatttttcacacacactcgagaatctgagacaatagagagaaca

SEQ ID NO: 12938 - DNA, 3000 bp, Unknown
  misc_feature (1)..( 3000): cDNA_ID_2712844_gDNA_ID_2214582_Annot_ID_135286 3000 nt of promoter + ATG
attgaaaacaaagaagattgattcgggcaaacctgaggagattggatcttgtcagggtgataaacttgagcccattgacgataagcttttctgatttcttcgtcggaggcctccggtgataaattcaggagcgcgtagagttctctgttgggtggtcccgtcggagctgcttcttggcccatcattgcttaagattcaatcgattcagtgattgaaatctcgatagagacagtcaaaggaaagtgatagaagaaagagaaagttccggtgccggagggttttaggggttttgcggcggatgaggttttttgacaccgctgctctcggctttagctcgcttgttgacgctttgacccttgcttgattcccaagtccattcttctttctttttcttcgtccccaattccctcgtaaattctacttttgacatcttattttataaattgttcaattttgacccatttccatatgttaatgggccttaaaatgtccataaggcttcggctaaagctacacattaatcttgacccacaaaacaatcgatttctaaagagattaagaagacaagattaaagaatgttggactaaacatatatccaacaatctcggagaaatagagtcataatcttctctttcaggcgttttgtcaaacttattgggctttctttggaatccatcttgaaaatagtttgcatgctaagatcttaacggttggaccaaactcgaatttgaatacctgaatattgtccgtttgataacaatgggttttgtttggaccgaattcagatgtgagattaagtaattctctagcctaatgtgttatgtggatacttgaaaaaaggtaatcaagtttgcatttaattgtaagagttaacttttgtcatatgaagatttcgattaagttgtgttttattgaagccttgaaatagtaggtactcctgtttttcatcatcgcaatcgcaaagattggctcatgaaactcattgtagcaactagcaacctttcgatacttaataaaaagaaataatgtcaacatggtctttaaacaataaaacaaaaatgtacataagtagaagtcaacagaaaaaggagacacttggttggatccgtaagcatctaaaagacaatttcagacaatttggaccgacgcggtttcaacacaagataagaggagtcgtgtcttgtttaatcagtcaacgtttactcgaccctttccttcctctttcccttttctctactttcttcccccaaatttctgttctaatatacgataaagatgttttttgttccatttattagttttgttcctagtttttatttataatttagtagtttataactatttaaaatgtgcagtattttaatttgttatattggttgattttttataaatgagaaaatacttgttgtttcttaatctttgtgattttagccaaaacgtttttaagaaaatgggatagaggaaatataatacagcctattgcatgatgaaatgatacaacacgtaatcttgatatgttgtacaatataaatatccatattgccatatacttaataaaaaaatacaagatgggttgttatgtattactccataaatgtgcatatttgggtacgtacagtcaacgttggatatctgcctaaaacatacaatgaattttattttcctgttaacctcaaaataagtggtacaaaaccaacgtgacaaggacgactattagaaaacgataacagttaatgtagttaggtataattctagtgtctgaaacgatctttccaataaaattatactattatgcatattgtactttgtattttgctaagtaattgtgaatcaaacgtaagaacattactttcctcctctctcctctgactaatatagggcttcttaccgtacagtcttgtggatgtgactcaaaacatctgtacaagaaatttgtgtattttctcactattcttggtccaatctgagtatttctatacagtatagtataattttttccttattttcggattttccattcacttttgttggaatttttttccagtttaagagatacaggaaaaaagttctcctcttaattactctaattattaaatttactaatcctatttcaattcctctcatttccagtatttcaatccactgatcgtccaatatgcaatatattttacctttttaacacacaatgttagtttcttgacagatttgactttgaattttggtggagattagtaaaagaattaaagaaatatgtagtggaaatataaaaaataatgaactgggatgagattacacaccagacaccacttgccaagagaacaacgggctcagtcacatggtcctaaattgaccatttccataatattagctgccaacaaaatacataaaataaaaatacggttactttcataactccccttttaatttattaatattttaaaaattaagcagaccttaattcatcatcttttagtgcgttacaaactaacagcgttacaaatctctcttagtccaaaaaatgtgactaaaagatttctcttttaaacccttaaaaatctggaatcaaaatcttttatattttcaaatttttttggaaacaaataagaatgtagaattcgatcaatatgaaagaaaaatgaacggtgttagatttgctttggaaatatgtaaactaacagtaattaacttgttttagtcattagcaactaatacagtaattaacttgtttaaagtaaaattagagcaacctaggaatatatgctcaactttttcgttttcttctaattgttaaaataatgttgtcattggccagtcgccattatacctttttaacccttcacagtctcccagaaacctccctttctctttgatacattctctgtatatatatatatacgcgtatgcgtttacacattctttaaaagtttcagattctagataaattcttttcatttgatttgttttagcaattcggacattgtacagagaaatcaagaatg

SEQ ID NO: 12939 - DNA, 3000 bp, Unknown
  misc_feature (1)..( 3000): cDNA_ID_3027141_gDNA_ID_2214582_Annot_ID_135287 3000 nt of promoter + ATG
ttatgctccggtcgccgcgtcttcaaacctcgatcttgaaccgtcaccaccgcgtttgcggtatctatcgccgtttcttgcggtggttgcagcagcagcagctgtctctctcgatacgccgtcgtttcgattatcataaaagatagaaccaaagacaagaacacaaagcctctctgcaaatccattcttgatttctctgtacaatgtccgaattgctaaaacaaatcaaatgaaaagaatttatctagaatctgaaacttttaaagaatgtgtaaacgcatacgcgtatatatatatatacagagaatgtatcaaagagaaagggaggtttctgggagactgtgaagggttaaaaaggtataatggcgactggccaatgacaacattattttaacaattagaagaaaacgaaaaagttgagcatatattcctaggttgctctaattttactttaaacaagttaattactgtattagttgctaatgactaaaacaagttaattactgttagtttacatatttccaaagcaaatctaacaccgttcatttttctttcatattgatcgaattctacattcttatttgtttccaaaaaaatttgaaaatataaaagattttgattccagatttttaagggtttaaaagagaaatcttttagtcacattttttggactaagagagatttgtaacgctgttagtttgtaacgcactaaaagatgatgaattaaggtctgcttaatttttaaaatattaataaattaaaaggggagttatgaaagtaaccgtatttttattttatgtattttgttggcagctaatattatggaaatggtcaatttaggaccatgtgactgagcccgttgttctcttggcaagtggtgtctggtgtgtaatctcatcccagttcattattttttatatttccactacatatttctttaattcttttactaatctccaccaaaattcaaagtcaaatctgtcaagaaactaacattgtgtgttaaaaaggtaaaatatattgcatattggacgatcagtggattgaaatactggaaatgagaggaattgaaataggattagtaaatttaataattagagtaattaagaggagaacttttttcctgtatctcttaaactggaaaaaaattccaacaaaagtgaatggaaaatccgaaaataaggaaaaaattatactatactgtatagaaatactcagattggaccaagaatagtgagaaaatacacaaatttcttgtacagatgttttgagtcacatccacaagactgtacggtaagaagccctatattagtcagaggagagaggaggaaagtaatgttcttacgtttgattcacaattacttagcaaaatacaaagtacaatatgcataatagtataattttattggaaagatcgtttcagacactagaattatacctaactacattaactgttatcgttttctaatagtcgtccttgtcacgttggttttgtaccacttattttgaggttaacaggaaaataaaattcattgtatgttttaggcagatatccaacgttgactgtacgtacccaaatatgcacatttatggagtaatacataacaacccatcttgtatttttttattaagtatatggcaatatggatatttatattgtacaacatatcaagattacgtgttgtatcatttcatcatgcaataggctgtattatatttcctctatcccattttcttaaaaacgttttggctaaaatcacaaagattaagaaacaacaagtattttctcatttataaaaaatcaaccaatataacaaattaaaatactgcacattttaaatagttataaactactaaattataaataaaaactaggaacaaaactaataaatggaacaaaaaacatctttatcgtatattagaacagaaatttgggggaagaaagtagagaaaagggaaagaggaaggaaagggtcgagtaaacgttgactgattaaacaagacacgactcctcttatcttgtgttgaaaccgcgtcggtccaaattgtctgaaattgtcttttagatgcttacggatccaaccaagtgtctcctttttctgttgacttctacttatgtacatttttgttttattgtttaaagaccatgttgacattatttctttttattaagtatcgaaaggttgctagttgctacaatgagtttcatgagccaatctttgcgattgcgatgatgaaaaacaggagtacctactatttcaaggcttcaataaaacacaacttaatcgaaatcttcatatgacaaaagttaactcttacaattaaatgcaaacttgattaccttttttcaagtatccacataacacattaggctagagaattacttaatctcacatctgaattcggtccaaacaaaacccattgttatcaaacggacaatattcaggtattcaaattcgagtttggtccaaccgttaagatcttagcatgcaaactattttcaagatggattccaaagaaagcccaataagtttgacaaaacgcctgaaagagaagattatgactctatttctccgagattgttggatatatgtttagtccaacattctttaatcttgtcttcttaatctctttagaaatcgattgttttgtgggtcaagattaatgtgtagctttagccgaagccttatggacattttaaggcccattaacatatggaaatgggtcaaaattgaacaatttataaaataagatgtcaaaagtagaatttacgagggaattggggacgaagaaaaagaaagaagaatggacttgggaatcaagcaagggtcaaagcgtcaacaagcgagctaaagccgagagcagcggtgtcaaaaaacctcatccgccgcaaaacccctaaaaccctccggcaccggaactttctctttcttctatcactttcctttgactgtctctatcgagatttcaatcactgaatcgattgaatcttaagcaatg

SEQ ID NO: 12940 - DNA, 3000 bp, Unknown
  misc_feature (1)..( 3000): cDNA_ID_3027141_gDNA_ID_2214582_Annot_ID_186531 3000 nt of promoter + ATG
ttcttatgctccggtcgccgcgtcttcaaacctcgatcttgaaccgtcaccaccgcgtttgcggtatctatcgccgtttcttgcggtggttgcagcagcagcagctgtctctctcgatacgccgtcgtttcgattatcataaaagatagaaccaaagacaagaacacaaagcctctctgcaaatccattcttgatttctctgtacaatgtccgaattgctaaaacaaatcaaatgaaaagaatttatctagaatctgaaacttttaaagaatgtgtaaacgcatacgcgtatatatatatatacagagaatgtatcaaagagaaagggaggtttctgggagactgtgaagggttaaaaaggtataatggcgactggccaatgacaacattattttaacaattagaagaaaacgaaaaagttgagcatatattcctaggttgctctaattttactttaaacaagttaattactgtattagttgctaatgactaaaacaagttaattactgttagtttacatatttccaaagcaaatctaacaccgttcatttttctttcatattgatcgaattctacattcttatttgtttccaaaaaaatttgaaaatataaaagattttgattccagatttttaagggtttaaaagagaaatcttttagtcacattttttggactaagagagatttgtaacgctgttagtttgtaacgcactaaaagatgatgaattaaggtctgcttaatttttaaaatattaataaattaaaaggggagttatgaaagtaaccgtatttttattttatgtattttgttggcagctaatattatggaaatggtcaatttaggaccatgtgactgagcccgttgttctcttggcaagtggtgtctggtgtgtaatctcatcccagttcattattttttatatttccactacatatttctttaattcttttactaatctccaccaaaattcaaagtcaaatctgtcaagaaactaacattgtgtgttaaaaaggtaaaatatattgcatattggacgatcagtggattgaaatactggaaatgagaggaattgaaataggattagtaaatttaataattagagtaattaagaggagaacttttttcctgtatctcttaaactggaaaaaaattccaacaaaagtgaatggaaaatccgaaaataaggaaaaaattatactatactgtatagaaatactcagattggaccaagaatagtgagaaaatacacaaatttcttgtacagatgttttgagtcacatccacaagactgtacggtaagaagccctatattagtcagaggagagaggaggaaagtaatgttcttacgtttgattcacaattacttagcaaaatacaaagtacaatatgcataatagtataattttattggaaagatcgtttcagacactagaattatacctaactacattaactgttatcgttttctaatagtcgtccttgtcacgttggttttgtaccacttattttgaggttaacaggaaaataaaattcattgtatgttttaggcagatatccaacgttgactgtacgtacccaaatatgcacatttatggagtaatacataacaacccatcttgtatttttttattaagtatatggcaatatggatatttatattgtacaacatatcaagattacgtgttgtatcatttcatcatgcaataggctgtattatatttcctctatcccattttcttaaaaacgttttggctaaaatcacaaagattaagaaacaacaagtattttctcatttataaaaaatcaaccaatataacaaattaaaatactgcacattttaaatagttataaactactaaattataaataaaaactaggaacaaaactaataaatggaacaaaaaacatctttatcgtatattagaacagaaatttgggggaagaaagtagagaaaagggaaagaggaaggaaagggtcgagtaaacgttgactgattaaacaagacacgactcctcttatcttgtgttgaaaccgcgtcggtccaaattgtctgaaattgtcttttagatgcttacggatccaaccaagtgtctcctttttctgttgacttctacttatgtacatttttgttttattgtttaaagaccatgttgacattatttctttttattaagtatcgaaaggttgctagttgctacaatgagtttcatgagccaatctttgcgattgcgatgatgaaaaacaggagtacctactatttcaaggcttcaataaaacacaacttaatcgaaatcttcatatgacaaaagttaactcttacaattaaatgcaaacttgattaccttttttcaagtatccacataacacattaggctagagaattacttaatctcacatctgaattcggtccaaacaaaacccattgttatcaaacggacaatattcaggtattcaaattcgagtttggtccaaccgttaagatcttagcatgcaaactattttcaagatggattccaaagaaagcccaataagtttgacaaaacgcctgaaagagaagattatgactctatttctccgagattgttggatatatgtttagtccaacattctttaatcttgtcttcttaatctctttagaaatcgattgttttgtgggtcaagattaatgtgtagctttagccgaagccttatggacattttaaggcccattaacatatggaaatgggtcaaaattgaacaatttataaaataagatgtcaaaagtagaatttacgagggaattggggacgaagaaaaagaaagaagaatggacttgggaatcaagcaagggtcaaagcgtcaacaagcgagctaaagccgagagcagcggtgtcaaaaaacctcatccgccgcaaaacccctaaaaccctccggcaccggaactttctctttcttctatcactttcctttgactgtctctatcgagatttcaatcactgaatcgattgaatcttaagca

SEQ ID NO: 12941 - DNA, 3000 bp, Unknown; identical to SEQ ID NO: 12937
  misc_feature (1)..( 3000): cDNA_ID_2709990_gDNA_ID_2214582_Annot_ID_186527 3000 nt of promoter + ATG

SEQ ID NO: 12942 - DNA, 3000 bp, Unknown; identical to SEQ ID NO: 12935
  misc_feature (1)..( 3000): cDNA_ID_2709971_gDNA_ID_2214582_Annot_ID_186521 3000 nt of promoter + ATG

SEQ ID NO: 12943 - DNA, 3000 bp, Unknown
  misc_feature (1)..( 3000): cDNA_ID_3027113_gDNA_ID_2214582_Annot_ID_186520 3000 nt of promoter + ATG
ataatagtttttgctgaccaccacttaattatttttgttttctgttaggttgccaaaacatttgatgttagcttgatgggagcttcatcgaggtcgtgtaaatatgttttgaacacacttatgcaggtaacttcgtgtgaattagtgatgctgctcttcttcattagctggctagcccacttagatttgtttgtgaagttcactactcataagtatgtatttttgcagacattccaaaataaaaagcttgcccatgcagtcaaagaagggactcttgaaagccttataacagagctcttgctttggcttctggatgaaagagttccacgcatggaagatgggagtcaacttcttaaagctctgaatgttttgatgcttaagatcctggtcagatattcgttccatgctaaaggttttcatcatatgtggctatgaagttctctgacttcattatttttatttcttgttttatttaattcaggataatgcagatcggacatcttcgtttgtggtgcttattagcttgctacgtcctctagatccatctagatggccttcacctgctacggctgaagtttatgctgtccggaatcagaaattctctgatttggtagttaaatgccttattaaacttacaaaggtattttaggacaatcattgttcacataactcaagtagttgttacgtacagccctactgtctattatgcaacacttgcctttcctacttgctacaatcacagtgtcaaattgtttagtattgtatatctgataattgcttgtccttgttaagctcctccaaagcaccatatatgaagttgatcttgatagacttcttcagagtatccatgtatatctgcaagatctgggaatggaagagatacgtaggaggtacatctctttaaatgcactcttagaaattttgcaaatctatgtctgtttattatgtggagatttttcgtacttggcaatactaatgcattctcggttggtattttttccaatgaaaagagctggggcagatgataaacctctgaggatggtgaaaactgttctacatgaacttgttaagctccgcggagccgcaattaagggccacttgtctcttgtccctattgacatgaggccacaacccatcattctcgcttacatcgatctaaaccttgaggtgagacctccttagtcgtctaacttcatgtccagaaattttgacaaatttgctgaagctgagggtttggtcaaagagcgcatccaaactatttgctgttttactatgttttgagaaatttagacgccattggtagtaactatttaaatacctgcagactttagctgcagcaagaatgttaactgcaacaggtcctgtgggccaaacccattggacagattcaacagccaacaatccttcacctcctgcaaattctgccgatgttcagttgaagcaagagcttggggctatttttaagaaaataggtgacaaacaaacttccacaattggtctttacgacctctaccacatcacaaagtcatatccaaaggtaatagatatgactatgtatttcaagtctcaatgtttcctgttcttcatgaacaaacgagccaaattgtatgtacttacaacctcatcttaatgcttgtaggttgatatattttcccaacttcaaaatgctagtgaagcgtttcgtacttacatcagagatggtctggcacaggtctgtaactagtctcctagctttttactatgatttcgataaaactcaagttttttgtcttgaagttttgcaatcggttctgtaggttgagaagaatgcagctgcgggaagaacaccttcaagcctaccgttgtcaactcctcccccttcgtccttagctcttccatctcctgatattccttccttgtcctctttagatgtgaagcctttgatgaaccctagatctgatttatacacagacgacatccgagccagtaacatgaatcctggaggtagtttcctagatccttatccttctttgtccttccttgcggtgtttatatatatctgttaaaaacaaacatctttggcagtgatgacagggacgctagatgcaatcagagaaaggatgaagaacatgcaactggcttcatcagagccagtaagcaaaccgctgatgccaacaaacgataacttatcaatgaaccaacagagcgttcccccgagccaaatgggacaagagacagtccacacacacccagtggttctcccaatggatgagaaagcattgtccggtcttcaagcccgaatggagaggctcaaaggtggatcactggaacatatgtagaactagagaccccaagctttggagtctgaagttacataagcaaattcgccatttttgttacttctctccaattaatgtagtagtaaaatacttttcttttaatatacaaacatataagagagagcaatattttatggtgaagcggctagatttcaatggagttagtgtgtatagtggtgggagagtctgggagctgatggtgagtgtgccagattctttttaatatgagacaaaatattattctttctatgcttgtttacatctttttttcaaccactagtagaaacctgaatattctctcgactctgtttagatatgattctgatgtagttggcatatcttgtgtaatccctccactctcaaatttctaacaattcttaatttttgggttgaaacggaagtaatattttgttcttccatctaaccaaaggtcgtatatttgcaaaccaattgaagtagaaattaacttaaaccgggaactggtttaagagatattaatatatgaccgaagacattgggtttaaaaagtcagaataataaaaagttggcgtagtctaaacgccgacccagaggccctctcatacctttaccagtgcctatatatatatatatatataaacagactaattactattccccatcgcacagacccccctaagaatccgagagagaagaagagata

SEQ ID NO: 12944 - DNA, 3000 bp, Unknown; identical to SEQ ID NO: 12934
  misc_feature (1)..( 3000): cDNA_ID_3027169_gDNA_ID_2214582_Annot_ID_186519 3000 nt of promoter + ATG

SEQ ID NO: 12945 - DNA, 3000 bp, Unknown
  misc_feature (1)..( 3000): cDNA_ID_3027186_gDNA_ID_2214582_Annot_ID_186514 3000 nt of promoter + ATG
atatttttttttttgaaatcggatttaggaaagggtattgtaatgatgatgtgacacaaatatgaaacttgtactaggttaacaagttggtaccaaactatatatataatattttaattagcagtaaaacaactacatgaatatcaaattattaagattccgacaaactttttaggttaaatattcgagttgtgaaaagattaatatcacttgtgcgctggttctttattatttgcagacatgtggggatgtgttttcggcttttcaatggaagagactaatattcaagaataaacggtttcgttaacaaagtttgtgtggttttaggtttcgaaggtggagactctcttgatctcttcagtcttcagcaaattaaagagtcaatgatatacttaaaagagttgttgaagattagcaaatatcaatctcagttttatgttgctcttggatttctaaatcggttaaagggtcttttccaagggaagagaaatgctatcggagtatatgtatatagttttcatgggtttttgttattaggctttatttcttgaggccctatttggtgtttttgggctcattttccatatctccagactccagtggtcaatataacttgcaaacacatactacttgtacgaagaagtttaattttcccataaccaatcattaaatatattttcaaatttcttaattgctgtatctttctttctaccattgtctcatgttaagaatatcttggtcgttgattcagtgtttagaggaatttgtcaacaagtttatatactttcaaagcttctcgttctgcaatgttttcattgccttttcaactaaagaacgttttccgggatattaagtaggagtcaaattagagttgaggaccggtttgattccatcatggtatgaccatctgcgaataaatattagtttgtggacttttgataaatgatctcatcatttataatcatcacaaactgcgtattcacttgctaattgatatcttaagattctaagttttcggcaaaaatgtatattttaatatttagtgtagattctgttctaattttgatttatgattcctaaactatatttgaaatctatactgtaaggagaaaaaaagaaaagaaaaagagaagataattctaccgaattctgtaataagtcgcctaactctactaaaatgtacattatctgtttgatggtgattaaacttcagtttggattaaatgtacaatgcaaatttttgggaaaaatgtcaattaatcccccaactttcaaaaaatggtcattttatacatcaacttcgtatgcggccgtttaaaacatgaactaaacgttgactaacttttaaaacataattattcgttgaccaggccaaaatagacatgccgttatcagtcattaacggaacttctaacgtccgttatcatccgttaacgactttattagtcaagttttaaattgtggccattttaaacatcgactttatatgtgaccattttaaacataaactaagcgttgactaccatttaaaacatgaaaaattcgttgaccaagccaaaataaacatgttgtcatcattcactaaaagaacttataacattcattatcacttgttaacgactctattagtatccctagttccccaaatttatttctacaaccgctcaaacaagacgaacaattttataatgagtcttcaatttgcttccatgattccttttaaaatttaaaacaaatatataaacgaaaacacctttatttgcttccaattactggcactgcgattatctctttatcaaactatgttcttgggttctgcttaaaactttttgatatgaagatttcatatgggaaaaatctttatgttctttcgattattctcaaacgacgttgttttggacagattaacagtcattaacggggttttaggttctattgataaagacatgtctattttggcctggtcaacgaatttttcatgttttaaatggtagttaacgtttagttcatgttttaaatggccacataagaagttgatgtttaaaatggccacaatttgaaacttgactaataaagttaacggatgataacggacgttagaagttccgttaatgactgataacgacatgtctattttggcctggtcaacgaaagatcatgttttaaaaattagtcaacgtttatttcatgttttaaacgaccacgtacgaagttgatgtataaaataaccattttttgaaagttaggagattaaatgacatttttcccgtaaatttttggacatattatatcaacaaaataatttcctcaaaagtatggagagttgacatgttcggacatcgtgggattggggaaaccggaaaacaaagtcaaagcaaccagagcattgcattaagatctctctgtctttttgtgtctttgcgtatttaatttttgtttttccaaattcattcaataaatatacatctaaatttacttaactagattaacaaacagatataaaaatattactacctttattcttaatatcttatccatttttttcttaagtgtaattataagtcttccaattgtgatttcaattcatgatctcctctttctacaaagtcttaaaagaaaaaaaaattgctatgaattgatatacacaacaacatgtccaaacttagctaaccatttgctaacaagaacattgttttataatgattttaaatgccactattttgcattacttgagagagttggggaatcaaacaaatgttgaataaagaaacaaattaataatgtaacccaaatacaatcgttaatgagcgaagctgctgaaagagaagacgccgaaaacgaagttgaccagaacctaccaaacgatcaaatcgatcggacaaagaggaagaagaagaagacaaaacccgaacaaaagagaaaaggcaccaaagaataaaacttttttgttaatggagatttgaggaagacgaagaagagattgaaacattgagaataatg

SEQ ID NO: 12946 - DNA, 901 bp, Unknown
  misc_feature (1)..( 901): cDNA_ID_2709998_gDNA_ID_2214583_Annot_ID_135292 3000 nt of promoter + ATG
ttgcttagtaaagtagagaagaaataatcgtcatctttatttaaaattgatgactgtagtataagcaattaagcatctcttgactacattattgaaatatactccctaatatacacatggctttgtgattttattatagaaaaaagtgctctataatagatgataatccagaggagcatattcgattctaattaggtccattactgtcagattttccagagatatatatcattaccgtttatgcttttgcgtgacctttaattatgaatcacattgagtaaaataaaacattattattatgaatccgatttctctttgatcaattattattcaaattctaccttgtctaaattattattattttcgttagtcaaataaaagtaattttataaacggacagatattaaagccatgaatgataatatagatcgcattcaaaaccgcaccgcaacagtactgtaacaatatcaaaaattatatatatatatatgtatttatgtatttttgttaatatttgaactgtaccgcatttctccaataccgcaaaacgcagtaaccattcgaattaaagcataaagacaattcaaatttggtattttcatatcatttttatttttgactcgttttatatacaattgttttttgtctgaacaaattgacttttaaatgaagaaaattaggagaaataaaatgaaacggaacgagtcatcatcataaacctcgcgtcccttttttttttttgcttccttcactttcttcttctctgtttctcgtgaattttcccgtgaattttcgcggagcttttctcgggaaaataatctaaagaagattcgagattaagacacgtcatctccggtttcgtagagagatctgaagaacgagtctcttctcttctccgatg

SEQ ID NO: 12947 - DNA, 3000 bp, Unknown
  misc_feature (1)..( 3000): cDNA_ID_2712882_gDNA_ID_2214583_Annot_ID_135297 3000 nt of
acgaagaggtgtgagtgttgtgtgatgcgcggggccatgagggaggaagcaatattttcatcagcccgagaatatgatcaccacacagcttctagggctttttcaagaaccgtcggtaccattgtcatctttgttggtgtctttggattcaagacttctatgtcttacatgtgaaacttgtacaaagagggtgtcacagcctcccattgaataacaagttgcggctcaaacgcaagccaaagagacgacatatgcaattaagacccagctgagtaacgtcaagaaaaactttctaaagactagttcatgatcctaatataaaatattacttcttctgtttcaaattagttgtgggttaaggtatttacacacatattaaaaaattatcaaaattttatttaatctacctcttttatataacagtatcattaattataaccaatagaaaaatatagggttaaatataattggtttaaaaaatattaaatacatttattatttgcatagaaagttgaaaacaatacttattttgaaaaaaaataaaaactcttaaaactacatttatatagaaacagaggaagtactaaatttatcacaaaatgcaaaaaaacaatctcactaagaggcaatgttaaatcatacaatccaaaacaaggcgtctttgttgttgagcatatatccacgactgtcacatatgccaaaagaccaatgtctttaaaatgtttgacaatttatgaatatattgcatacttggcaatattattatatccacgactgttacatatgccaaaagaccaatgtctttaaaatgtttgacaatttatgaatttattgcatatttggttcaactttatgctaatttttactaaactgtcccttgaccgacttcaaaatatatgagtacttctcttctattctttccaaaaagaacaacttatacattctatatatgtttgcccaaaaaagaaaaatacattctagatatgtatgtttatctacatagtctcgatttttatatagattattttctgatttttgctgatgttttatataaaacaacagagaggtaaggaacaaaactatattttccaaagttggacgagttcattcccatcatcatcaaccaaaaagagtgataaacttcggatacaattttattaatatcttatatatttattttttgaattagtttcgtaagaccacactccaaagattcatgtcttttcatataaccagttagaaattgagatctttgtacttacatttttatttgatcaatcaaatcttcttgataactctaaattgttgtgcaatggtctctcctttattgcaatgttacatattcctagtctctattatggattaggtttataccaaaagttaccaattgcaaacaaataataaatcaaagaaaatgtttgaaacataggaacaagtaatgcatcataaaacctaaggctaacttcaaatctctgtgatgatttcactctgtttcataatcttcctcgtatggtaatcgtcgacataaatgacaggacctctcacgcttaagccacttaaaggacggcggattcagttaggttttaggttttgattttgattgaagatcgaagaagaagaagagacatgcaaggaggaagggggaaataagagaagaaacaaatcactcaccaatggagaagagaaatcgccaaatcggaatgatattgctgtcgttgttgtggtcggagaagatgatttcgagatcggggttttgggttttggttttcgcttaatatcgaaaaagaagaagaacaaaagtgaccgcaaaaaaacctagtacttatttatagtctctttgtaacttcattttgagttttatttcacttaattcataattcttttttcttagttttttttaaggaaaatatgcttttaactttgattaaagataattagtctttttacttaaaaatagagtcattctagttaaccattggtaagaggagtcattctatttatttttgttaaaattatagtcaatttaagcaaatttcagttaaatatcataaaatgcaaacaaacaatctcgcgaagagctatgttaaatcatacaatctaaaacaaggcatctttgtttttgagcatatatccacgattgtcacatatgccaaaagaccaatgtctttaaaatgtttgacaattaatgaatttaatgcacatttagttcaagtttatgccaatttatactaacttcaaaattcatatatgaatacttctcttccattctttccaaaaagaacaacttatacattctagatatgtatgtctatctacatagtcttgatttttatatatattatttttctgatttttgctaatgttttagataaattaaagaagtaaggaacaaaactacattttccaaagttggacgagttcattcccatcatcatcaaccaaaaagagtgataaactttaaatacaatttcatttatatcttcttatttttttcctgcatacagaaaaatatatcagataaagaaaaacctttttttttgtggtcttagatactattattcttaaataaaactccaaaaaataaagtcaaattagatatgtagtgcaaaggcttgttgtttattaactttacttgggccaatatgagattacccaaagaaacatacttggtggtattaataattacaaggcttttagcaaagatgtatatctaagcgcattgaatatacaatgatttggcccaaaaggaccattaatcaaaattatggcgcactgaatatacaatgatttggcccaaaaggcccattaatcaaaattattgcgcaacgaggtcaattttttttttggcttaattgcgaagagaagcaaaacagaacaaacacaaaagtcttcgacgaccaaagaacaagatcatcctctgatttttcagacacatatttgtaatttataaagtttgtagctttttccttagcttgagattacacgaagaagaagaagatg

SEQ ID NO: 12948 - DNA, 3000 bp, Unknown
  misc_feature (1)..( 3000): cDNA_ID_3027190_gDNA_ID_2214583_Annot_ID_135300 3000 nt of promoter + ATG
attccaaatgaagttccataatattcttcggggtgtagaatagaggtgttttcttacaatttaggacgtctatactagtagctatgattgaaaccaagacaaatccaacaattgtggtccaaaacaatattgtacattgcttaaggaaagcgttgaagataataaatcagaattaaccaaaaagaaagaaaaataataaatcattgttatggtcgtcttatggatcctagttatatacgaattgagttttcattcatagttgagaacgaattcgtttgctcgcgtgtgagtttagatcgtggttgtttttgtttgatcgtctactagtgttaattaagatcattatttcttaaacccttgaatggttcttctaaaacctatgcaatgaccgtgaaaacgttgatgatattagttttaaccaaagaaatgttatgctaataatgatattgtgatgttaaattaataaagaaaaggttatgcttagcatgatcccaagcgataattcgtgtgtcctatcattaggtttggaaaaactctaccaatcatagacgattagaccagtatagttgattatagttttcagaattcagatttcagaccaaagatagagttgtggacgtaggtttcttgatttttgttttgtttctgtttatgtttttttgtcgttatacatggataaaaaaaattccaaccaatcgttaccttgagatgtgtagttggacttttattgcctcatcaatacacttatacaaaaggttcaattttctgtctaattatggacatgtttatttcaaatgtatggtaatcttccaacacttataataccataatgaaaaatacttctgtttatatatatattgaactgagattcaattagtgccacccatgtgacctgatggactctccgtagacaaatgtgggggcaattttgttggatcaaccaaacccaacatttattttatatctgatttgaagattacattagtaaataaacaatggttagagtcaagtttatacaaatatatgggacccaactaataagaaaaaaaaattattgacgtcagatatatactaataaagtatataacaaaggaccctcagtgcatgtaattaatatatattttccaataaatatcaaactatagattttctaatgtatttaatgttattatttctaactagtaattaattgataatttgacaaataaatttttgtttcacattattcttatataaaactgtaaatgatttgtagcaaaaatacaaaactgtgtatataatatactttataaatagtttctatgtattggatccaagtaggatttcgaagactttgaagggcacatctttttcaaagtttacttatacatatttaatgtaagataaagtcattgtttatatgtttttttctagaacacttaaatttccacaatatgataatttaaattaattgaattttgttttactttggttggtttgtggataaaatccaaatattacagtcactatctttcgacgtgtctcacttgcaacctaatccttttctggaatgtagctttttttttgtttgtcaattttatttctttctctcttaatccataaaaattttaggcatttttgtattactgtcaaagaactgattagctatgtcttctatatatctaaaataaaccataagaatcatagttcatactcattatggtattcttaattttctgaaactatcgataaaatgttaaaacgttatatacaaaaaaggactatcaacgtagcaataaaatgaatttagacttatatgaaagctaatggtgacgaagaagttgacggtgatgccggtcatttgggtcggtggtggttccgtcacggagactttgacggtgcattattgacgtcaacatgaagtagctctcacaaaacacaaaaaggaccgtttagtttgctagttattaaaaatataatgggcttcaagcccataataacatgtctttttacaaaacagaagccacgtattatataaacccattttttaatatataaataattgggctgtacttgggcttggacggtttcactcttttatttttatttttttaaagttttttctatattagtaatgatatatttacagtggaagcctttttggcggaaagttctattaatacttatacacaaagaaattgaggttcaagtcccaaatactgtgatttattagcagataatggagataagtgtgcaagagatctcgaacgatgtacaattataactgtttgccaggatttgaagatctttcaaggtgtccatcaaaagcatgaagacggagaagaaagtgtcgtctttcgtggatctaataaagatcgaaacaaattacccataatagaatcggctatataacggttctcataaatcataatttgcaataaataataaatctaaaacggtaaaagaaaaatatatttacatgaaaataacatgtcattttaaatatttccagaattaaaatataattccaactgtcaacggtccatatacgttatctatagactatatagtacataaattattttaaaaagacaaataatttgtttcgagaaataatgttgctgtctcgtcaaaattggaaaaaaaatacattttaaaatacagagaaacgaattattgagaggagaaatttagagaccattcaggttttgattgaagaaaaaaaagattcccattttatcatctttttagtttttagtgtcaactctccaacaaaagcaaaaaccttaaagaattttgttctttttttaaagcaaaagaaccaaacatggtttcacatgaatcccaatttcattgcaaagcataactaaaaataaagaagaagactttttggagatcgaatctgttcatgttgatgggttttggctgagctttctagagatagagctagagagtactgggtctgtgtaaagttgataactttttttggtttagagagagaaaggacagagctttacagag

SEQ ID NO: 12949 - DNA, 3000 bp, Unknown
  misc_feature (1)..( 3000): cDNA_ID_2710027_gDNA_ID_2214583_Annot_ID_135301 3000 nt of promoter + ATG
aaccccaacaacaataatactcatctttaccaggtatcaacggaggcaactgaggaatactcgcagcgtgaaacgctctttgacagttttgacatctaatacaatactcttgataaaccctaggatactcatgaagactgtaacagtacggacacgccgtccaaaacgtagacatcttctcattcgttgttgttttcttcttcgatttctgagtgttgagatttactttagtgaagatgagattcaaatctccatcgaattgagatttcttcgtaggtgttgatagaacttcccatgcatcaagcacgaatctgaaagcttgatcggcgaaagggaaacggtttttgtcagggtggagaagaagagcaagacgacggtattgtttcttgattagatcgttgtctgttgatgattcagttagatcttcgatctgaaggattttgtaccagtttggttggtttttgatacgattctctggtgctgatgagagtaagacatcgacgacggcgaggatttgatcggtgccttcgaggagtggctctgtctcttgagctaagattgcaaactcttttgaaccgtttagatctcgtgactcgagaagcttctccgcgattccgagaagacgttctgcttctgatcggttagggttgttgtctcccatctttcttcttccgtcggcgatggcggagaaatggtgagcagatctaaatattatcgcctcgacaagagacgatgaaacaaggctctgattggctgtgtgtaaaaatggtcgggggaaaaaaaatagtaacattggagtaaacggaaactaaaactttatttgttaccaaatttatttagtaataaaatcatttcttcatttttatgttattatttttcacaattttattttatgttattatttttcacccttttataatgttacctacttacaattcgtttcctatttcgccatatttataatattgcaaataaaatccagctttgtgtcaccagttacaaaaataatatgattatatactttattggttttattaacactacattaaaaaggtaaataaaaggaaaaattactatagtatattggaaataaagtcggtatttgactcactagagagttataatttataaatgagacataattattgtttattcatcttattcagacaacataactaaaaaatatatggtcaagataatattaaatgttttaagaatgaaaattttctagagctaagaatatcggaaataaagttagacgtattatgtttaacagaaaaagaggcagaattatggcagttagctcaatttgagctcaataccaaaaataacggttccatgggatcgaaaaaacaaattcgggttcagaatatatcacacgataatatttattctggtttgcgttgttttgtggacggatcttggaaaggaagcgataagttttctggattagggtggttttgcagatcatcaaatggagactcgccaaccatgggagctgctaatcttcgtagaagtctttatccactccatacagaagtcgaagcactactttggtcgatgaagtgtatgattggtgccgacaaccaagaagtagcattttttacagactattcagacttggtgaagatggtgtcttctccaaccgaatgaccagcgttttcaacttatttggaggaactaaagaccgatataaggaggaattcacaaagttttctttatctttaatttctcgaactgcaaatgtaaaggcggacaaattggcacgaaaaattcatattgaaccgcttcatgtcacttttataaataattttcctcacaattggctcttttgagctctaaataaaatctgttgacaaaaaaaaaaaaaaaatcagaaataaagttcatctatgactacctaccaaaacaaaagttcatctttgattcactcacaaaataatacaaataaaacatgaaaattataaaaacatttaatattatctcttaccataatttatttatttgttgtacatagtacaaataaaatggaaataataattattttttatttgtaacgtttgccggccgaataaaatattaaatttatttgcaatactactcacaacaaactttacaaataaaacatgattatcgttttttcttttcgttcattcaaactataaacaaaagcaatgaaagcatgataagaaatgatattaaatgtttaaaaaataaaatttgatataactatattattggaaacaaagtccatatttaagtcacctataaaaaagcatgatatgaaataataataaatgtttaaaataataatataatatctaatggtatttgaaataatgtatgtgtttgaagatgttataaaaatgttaaaaataaaaatataattatcaatattgataataatattcatattgatatgaagaaatgatattatttccaactacaatttatttacttttcaatgtgatgtgaataaataaagaataatcatgttttagctaatgtttcaaaatagaaaaattaatataaccaaatactgtaacctaaaattgtaaaaaataccactctagtaaataccaatattaccccggttagctgctactaacattaagggtgaagttgtcatttgatacagtgatcacgcacttttcacttgtcttctttattagttttttttccttgttttttaaagacatcacttgtgaccaaaaaacaaatccactaagaaagaaaaacaaattaataaaaaaaaaagatcagaaattagtttgtgcagaaatcgaattggagaaaccgagtaactatggtagccacagatgagttcatcgtttttgaccagatctgattgttttcgtctttgccgttgaaataatcctccgctccttcttctcatcgatttctccgatcgcgattttggtttctcgctctcctctctcgctgtggattttgactccgagagaaggtttgattttcggtggatttcatctgacagacatg

SEQ ID NO: 12950 - DNA, 3000 bp, Unknown
  misc_feature (1)..( 3000): cDNA_ID_2781846_gDNA_ID_2214583_Annot_ID_135304 3000 nt of promoter + ATG
ccttggtgccattgtagagatcaaccgtcgtgggtttaccagccatcagtttgtgcccaacggtcccagccacagagtatctgtaaaaaacggatccataaatggatgaaaagagatacaatttcgtgttagatgctatgctaggaaaaaactgaattgctaataaaggggaaacacaataggtatagtacccgggtaatgcaacaagattcaagggagaaggagcccagtgcttgaacacttcaagtgaaaagccagcacaaagcataccaggtgtggcaaagagaacacatggcccaggagcatgtataagagatcgatcgaaatctttaactgcagaatgtgaaggtagtagttagaaagcaagcagagttgtacagctaaggtagtggataagaacaaaaaatggacgcaaaggatgtattagaaccactagtttggttcttatttttcaagcacatcagagtttcggttccatatgatataaatttcatcttcaacgttctaaagttatttgcaaatggtagtacacataccattcttaaaatcaaatgggttatgcgtattgtgcttttctttaacgttctggcttgtccagctgatgagcattttgtaatacatatttgcttggatggtcaaacctgcaaaagtacaaatttatcttcagggacagcaattttcagaagatagagatcactattcatgaaatagagtcacgactttgttgagctgactaatctgcagaattgatttcatatgaggattggtggtgatttaacagacctgatgagaagtaaattggaacctttatattcatgcgttcccagtaatcatcaagcagcatgcagagttcctgaaaaaggaaacgcaattgtcaatgagacataagagaagcaaagacaagtttaagtaactgacttcaaagctctgtaagaagacagacctgagcccttccaagagcaaatgaaggaatcagcgccttccctccgccagcaacacatttatgaacctggaagagttttctgagatatcagacaattaccaaacgaaagcttaagcatttcctgaaggggtatattgatcagaaacaagccaaaggtgatgcgggtaattataatcaaaaaccatttaagaacaaatttagaaaccatgtgttaatagttacaagtagacatacagcttgaagaaactctctctcccggggatattttgagccgcgaatggtagttgcatatgtggacctaaaacggcatagttaaacctatatcaggtaaacttgttctttctaagtttgttgaaaaataccagcgaacaagtttgtatttgttttccatactctgaaatgagaagatccaactggagtctgtcaattttagcagctcctagatgtctatctgtcgtcatattgtaatctccagtgtacacaatcgctgcatctcccatctttgcataaaccatcactgctccaaggaccttatgatcaatacaaaataagctttaaaaaatacagaaactctgaatataaaaaacacagaaagaaattcactaaaaccagaacgaatgtcttacatgccctgcataataagcccggatttgaagatcttcatcaacctgaattgtttgcttcaaatctattgcaattactacatataaaaaaacaagaggaagtcaagttatagacactgcatctgaattcgtgcacaaagacctcaaatgaactaaatccaatattcaagtaccttttttcatgcagtttgcgatatgggtagtggtgaatagctcctcctcgcctcttctatccaccatcactcttcggtagtcctcaagcattaatggagacaaagcctttgtgggatactacaaaagagacaaatcaaagtaaacaacctttaccttcacaaaaaaaaaacagtcagtcaaacatttcatcgaacaccttgaggacaatataactcaccgacatataaatcggaccattgtacccacaaacttccgtgaagtaaggaagcgctccaacatgatccatatggctattaacactcacaattaaaacccacaaaaactaaaaaagtgaattttaaaaaagggacaaattctgggtttgaagaatcaatacaagtgtgtgatgatgatacaagagatcgcgttgtcaaaatcaccggatttagatatgagagaaaaatttgggtaacgattgtgatcatcacagcccatatgcatcccacaatcgaacattatctttttaccattaatcgtcactaccacacagctctttccaatctcttgtccagcacctggatacaacacaaaaaagatagaattatacagaaattgaaattgtgaaactttgaagaagcaaagagagaagaagaagaagaacaaaaactgttaccaagtacgagacaatcgatagccatagttactgaagaaataaacaacaatttgagtttcaaaactcgtcgatggtcaaaaatatcttactcgttgaatcagaacacaaattcaagtgaccggagaaaattttgaagggggcgagagaagaaacagagttaggtcgacaaacgaatttgaatggcggcaaagtgttcagtgacatcggaaccgttcggagttattacacgtgtctgatccaaccgtcgatatttttgtggtgtgaagcccaataatagttcttctcacggcccattaaatttaaaagtttgaaacgacaacgtctcatgtcgtttttaatctgaggaagaaaaaagctcgtaactaatccctaaatcaagagagaagtgagagacactgagactttgtagttgaccggatcattctcacttcgccggccgacgttcttccttccgccgtcggtatctatatttacgatccacgatctctcttgctgtttctgtcttcatcggtgagtaattttttactgatcttccaaatcctatcaattcaccatctctgagctctttcgttgatttgagttttgttcttactgcagtgacgaaaatg

SEQ ID NO: 12951 - DNA, 3000 bp, Unknown
  misc_feature (1)..( 3000): cDNA_ID_2710034_gDNA_ID_2214583_Annot_ID_135305 3000 nt of promoter + ATG
aggtatgagtatttgacctgagacaagaccattatagatacatgttgttttactaaccatagtttgaaaatgcaattcatgtatatgtgtggctgatgaagtacctgcaactcttgattgactgtaaagggcaaaacagcagaagggtcctttgatccttcaggaagcacgacctgaaaatgatatcttcctgtgttaagtgtaatctgctaacaatataaggaaattactattagtagaaaatgctaattaaacccactttgatagtcaacttgttaacaatagtttcgacgagcgggcacccaaaggtaaagttcaagtaacgtctgccatcagatgcttcaaagagatagtcttccaatggaactctatagccgatgataaaagttgcactccaccctccaaataatgggtagcggggttcaaattcaagttctgactgcaaataccaacaatttttttataagaacttagagaataagaaaccaattagagttatacaattagagcctaagcagagtttctcagggaggaaatatcactgcctaaatggctacagataaagagaagtgggcaatccaagcatacctttctaaagcctgtacgcaaatgtgaagtagagatgtttcctatctcatccctgtagtagacagagttcactctgggaggtaggactgcaaggagcgcattgaaagaggatgcaccactgaccgatcgtttagattgataatcaaccctgccaaaattgagaattcagagaaacattttcagcataacagcatacatatgaacacaacctcgccattgacctctttcacaagtaacagtaaaataggtaattaaatagacagttttccttcaataacagagaaaagttgcctgcagaaatggaaaatggcaccttaacagttagctcaaaacacataaatcgaaattctgcaacatctaactcctagagataaattttcagatgtcacctcatacattatagaagttattagtcccattacataccttgagaaaacacccttatgcctcgctcccccatgagtcaacctataattttctgtaatctgaaggctaccccagtgtgaaatctcaatttcacgcacaagctcctcaacaacagcaaatggactgttattctcgaagtgaatgatgacaggtgtgtaagagtatgaagcacgattttcatatggtccatatttgatctctttgccagcccggttagcaggttcaatgctagtgaacgactctactctagtactaggagtcttaataaaagttgtctgttgcttaacatgatacggtgacaatatcactgcactatcatgatagtaaaccaattgagattctgactgggttatctccactgggaaaggttccaaggaatgagtcaatatgtaaagcacctcaagtgaaacagtttcacccggacctaaggggctaataaacgtaacacggtagtatccagtgtcatttggtgcatcaggttgttcagttggttttacatctaatggcaaataagttttcttcttcttcttgccagtagttgccagggcttgtaccatagccaaattcttgatctgggtaggtgggaaagcaagaagcatttctgcagcaggatctttcccaatattttcaacctgaagaaagaaatccagacaagaaaatgtcacctcctaatagaaaaacttaaagatgatgaaggagaaaagcgataatatcaaattaactgtcacaacgaatcaaagccactaaagttccaacctttacaacaagtatcactacaataaactaaatttgactaaaagaaaaacagctgcagtttcatataacatatccaaaaaagctttaattttccaattctaagttccaaccttccagtgtatattcaataggaataactattataaacatttgcttataaataccttgagagtcaagaaggccttcacgatatgtgagcttaaatcaatctgtagacaaaaacaaacacaaaggagaagcatttcagtttcgggcaagaaaattttgcaaacaggttctatcattagactttctaattactcaaatcaaacgtataactgatgaaaagtcacactatctatcaatgtacatacatatgaagcctatcgatgatgatcaaccatgaagtgaccaatcacacagtaattctacaaaccgagtatagatcggagaaacagcaaagcccaacggcaacttcattaacttgaatttccataaatcggagaaacgggatccattaaggaagtttatgaattgtaagaagaagatagatcggagaatcttacccttcgctcggcatttacgatctggagatcctgagctgaggaaaatgcagaaatagataacaatacagctacgaagacggagaagatcccgatacgagcagccattttcgtcactgcagtaagaacaaaactcaaatcaacgaaagagctcagagatggtgaattgataggatttggaagatcagtaaaaaattactcaccgatgaagacagaaacagcaagagagatcgtggatcgtaaatatagataccgacggcggaaggaagaacgtcggccggcgaagtgagaatgatccggtcaactacaaagtctcagtgtctctcacttctctcttgatttagggattagttacgagcttttttcttcctcagattaaaaacgacatgagacgttgtcgtttcaaacttttaaatttaatgggccgtgagaagaactattattgggcttcacaccacaaaaatatcgacggttggatcagacacgtgtaataactccgaacggttccgatgtcactgaacactttgccgccattcaaattcgtttgtcgacctaactctgtttcttctctcgcccccttcaaaattttctccggtcacttgaatttgtgttctgattcaacgagtaagatatttttgaccatcgacgagttttgaaactcaaattgttgtttatttcttcagtaact

SEQ ID NO: 12952 - DNA, 3000 bp, Unknown
  misc_feature (1)..( 3000): cDNA_ID_2710015_gDNA_ID_2214583_Annot_ID_135307 3000 nt of promoter + ATG
gctgtcttccttgcataattgctcttctttatgccgttgctggaacggtatgaagccatctcatcgatctttgttgtctactactttaaagaacttagagacgccttttcttgcgggttttatacaggaaggtgtatcggaggcggagctcggtgttcttcccttgtacaaatttaaggctttccatagcaatgagaagaacattactggacctggtaaaatggttcctataccgatcaatggcttatgcttagcaactgaaagaacactgcttgctgaggatgcggtaaacacgaatctagtttgacaacgatttgttacttatgaactctgcttttgcttagtttcaaaggcttcttctacttgatttttcttaacaggattgttgcatatgtctgagttcatatgaggatggcgcagagcttcatgctcttccttgtaaccaccattttcattcgacttgtattgtgaaatggcttaagatgagagcaacatgccctctttgcaaatacaacattcttaaaggaaccactgatcaatcttgaagacaaaactcaaccaaccagagggaataagattctgcacatatagaaacagattccatttcctcaattaaaaagcttctgtatatatttatttacataactatcaaagtcatgtgtcttttgttaaaagcatccattttaaatgtaaaagatcacactttacaaatgcccttttctatatttgcccatatttgagaatacagctgatgctcatagtcatagctcaaatcataagaaagttcacgaacagttcacttcattgccacactgtttgctgcaatccgcatcacttactgctgttacaagcccccttctctgcatatcaagaagcaaatccgaagcagcggccatgtttccctccttttcataagctctaatcaagagatcaaaaacagccgaatcaggacttattccgctattcaacatttcatcgaaaacttgtcttgcctcaaccatcaaacccttgctagctagcccgtaaatcaatgtagtataggctaacaaatcaagcaaaagaccttcctgaaccattctggtttttaacttaaacgcatccaccaaattcccttgcttacacaaaccagctatccaagaagtgtacatgaacttatctggaacaagtccagcctctgagattttactaaacaatctctcaacttctataaagtctccttctttgcacaaagcatcaataagcacagtgtacataacatcattagctttctctatacagaaataaactatagcttcatgtagttgtccattcttcgcaatcccatcgatcatagtcgaaagagctacaacatcgggctcaaagcctctctcaattaatttgtggtacatgttaaccgcagccttcatgcgtccggatttaaaatatgcattcatcattgtagtaaaaatcaccatatcaggaactaaatcacttttctccatatcttctacaatctcagttgcctcctttagtttaccattaccacaaaggcctgatatgattacgccgtaagctgttatatcaagtctcatcccttgattgagcattttggccagaaacttcatggcattatccgaatctcctctctgaaaaaaaccatcgataatcgtagtgtatacaagagagtttggctcaactctatcctcgaccatccttgaatacatttcctcagctctctgcatttcccccttcttgcagaaaccatctatcaaagcagtataagtaacaacattcaaagacatccgaacgcgtctcatttctttgtataacgaaaccgcaacctccaagtcaccagctttacagtacccatcaatcaaacaagtgaaagtaaccacatttggagataaagcatctctcttcatagagtgaaaactcttcaacgccaactgcaactccccggatttgcagaacgtgtcgatccaagtactataagtaacaacattcggcgaacaacacttcaacataacacccatatacacaaaaacctcatctaacatcttcatcttgctaaacccattaaacagagaattaaaactaactatgtcaggcttgcagataaacccatgagaggctcttaaactctctaaaaccaaactagcacttctgatatctccatttctacaatgcccatcaatgagagagttataagatataacatctggttcacacccgaatctaggcatcgagtgaacgatatcttcagcgaatttaacttgccctagtttacaaacaaacgatacgaccgaattgaatgaagaacgatgaggagtgtaacctctggagactaagtaagctaagaatttgagagatagaatgccgcaattggaattgattagctgatgaatatgcttgttgcaggtgaatgggtctgggagattcgaggattttctcaggcgagaaagaaattgaagagcttctctgaccattcatggacatgggtttcttcagaagattcgaaaggttacaactttgaaaagatttttaaacatcaaagctaaatctaacggagaaggcttaaaccctagaaggttaaagaagaccgtcgttcggttctaaacgacagcgtttaattgtaagcttattattaaataaacatgaaaatgtaaaaaaaatctgaaaacggtaattatctctctctactcgctgtgacttagcataaacctcttttaaatccttctctaccaaaaaaaacttgctatttctcttttgtttttgtagaatctccggtgaagccgaattcaaaccctaacacttttggttcatcagttcttcttgacgattcagtgttgttgcgcgtcttatttctacattttgctttctcgatttgagaatgtgctgattttaggtatgtgttgattttttttttttgtttctggtggatggatttgagacttcaatagatatggaacttttgatgcctgtgtagattagagaagtaagggttttatagatcgggaataa

SEQ ID NO: 12953 - DNA, 3000 bp, Unknown
  misc_feature (1)..( 3000): cDNA_ID_2712864_gDNA_ID_2214583_Annot_ID_186572 3000 nt of promoter + ATG
ctctcctcctataagtagtaaagcaaacaactttttaagtaatcaatgtagctagagaacaaagagtggtacctagtgtggagagtagagcaaagacggtcccaaaagtccatgatttggtcaccagagaggtgattaggatcatcaagatcagtgttgatacaaagcaaatgaccaaaaccattgcaatgaatcaaaccatgcatcaaatgtgaagaaagcgtcaagctttctctcttcaatggctcattccattcatcacggtttgggattatcatatgatacttcctcttcgttacatagtgatgaccccaacctatatatatacacacacgtaaacgatccaaaatcgaaactttaccaagaacaacgaaaaaacaaaacctaagatttattatttaccaaagcatcgacagaaatcgcagagagggtttggagaagaatcagagatttgttgttcgatgatgtaaagagggaaaacgacgccatttgcttggcttccaaggaaaatagtagagacggtggctccgtcgatggtgtaatcttcaatctcggcatattcacggaggaacgatctgatgttgtcgcggaaagttgcggcgaggttgaagaaaggtggtgatgatgaagaagaagagatggcaaaatcgttaataaggaggactttgggggctttttgtctctccgtgagagcgtcgtatgcggttatcgccatgactgaaaaaggactacgggaaaagagagagagagagaggattggttttatcattgggatcacgtgacaggatctacttgtgaattgacggttttgcccttgtggcggcgatcgtgttttttggtttgttgttgttaaaagtaagagtggaatttccggtttacttggttttggtttgggataacgtgagattggcctgatttgattgtgacgggactcatcttcttccgtgtggtttgtttattaacgatttttgccctttcggcggcgattttggttcattggttttgttattttattgcaagagtgggagttccggttaaagagggtttggttcggtttaatttggtttgtgaccacgtgacattggctgattgttgcgacatgtctttcgtgtgggtttgcgtggattgacgattttgctcaatgtgatttctgaatatgtgttcgtgttggccatatggtgtattcatgaaaataactttatagaaggttaaatagtattagatttaggatatatgtcaatcttctgtttctctatatttactccgatacgttgttatctcctatgaggcaactgctgttgtataaatacctctcaaattctcaaattctactccgatactaaaaacttgaatagtaatcgttttcgtatatgggagtaacaaatcaagggaaaccaaagagaagctaatgttggataatggagaaaatcaaatcattatcttctgttctgtctgctcacataaagataaacaatgtgaaatctatttcgttgtccgcgcataatatcgggaaggtttagaatgttatatcattagtaaattcccaatgttcacacagttacaaaatagttacagtttgctaaatgtcatcttcatctccatcttccctttagtttaactaataagaatacaaaaaaaataaaaaaattataagaaacaaatgtgatgttttaaaatttgattaagcttttaagtacttccaaaatttatcaactaatttggtttttgatgttttcacctctggaacaagataactaggtaagtaaaacttttaaagattaaagtaaaatatatatatatatatatatatattatcacttttgatatgtaattaaattaaataaataaaaaaatctaagcaaaacataatcaaaatttaagcaaatgataatgaaatacgtgtaaaagtacaaattgtggattttgagtcattttaaccgcgggggtcactactttgtatgccaaatttgagctatatatagaatatgtccatatatatatatggtttatctacccttttttttgtgcaaatatggtctatctacaaaaagttcttgaacggactaacctctatagtaaaaagtcgacatcatactaagcattttattaaaaatcgtagctgtatgtttacctaactcaaaaggatcaacttgaaagggcttttgagcagtccgatgggtaatccactttggtaattaacttcatttctcactttacaagtttacagagtagtttgttcatcccacgcatgcaaaacatcactgatttgctatttttcggtatatatatatatataaaaaggcatttcgtgtgagtattgataatatgagtttagtagattagtctaataatcgtataaaagttattcttcaatccatcacaatgctaattattcaaaacatattcgtatcataaagaagttacacgaaaaggcttgttgagctgtattagaagacccttaacaggcctccatatcacactaagatgggctgaaattcactagtcttaaatggatccatatgagataccattaacatataagaatcatgaccaatttattagtcttaactgtaactaattgcctcatacactaattaaaagttgaaagtagtctattatatataaacctgaactaattggctcattaactactaactaaccaataaaatcagcaaaccggaacttaaagaggggtccgtaccgggacgtgtgagtcacgaagaagacggtgtaaaggagaacgaaagttccgatgatttcagcaccgtggaaaaggattgagacagagaaaaggcatgtatgtcgtggagaagatcaagagaatatttagttttcattattgcattttattagttttgtcatatttccatattcatatttatgcctagggttttgcttgtgtaatatcaaggtcctttcctatttacaggaggccttagaaataagtctcatatcctctaaacttatttttacttcaaaaccctacttcttcaagctatg

SEQ ID NO: 12954 - DNA, 3000 bp, Unknown
  misc_feature (1)..( 3000): cDNA_ID_2712875_gDNA_ID_2214583_Annot_ID_186570 3000 nt of promoter + ATG
ctgactgatactttactgccaggtatggcattgggttggaaatttcacaggggaatcaatcgatacttggtggcatagaggttagtcacttgtacgttcaagaactttttgtagatatagaccatatttgcacaaaaaaaactagatagaccatatatatattatgacatattctatatatagtgcaaatttggtatacaaagtagtgacttccgcggtgaaactgactaaacatctacaatttgtacttttacattgttcattatcatttgcttagattttttttttgttttgccatttaatttaattacatatcaaaagtaataatattttggtcgtgaacaagcctcaaagtaataattacacttgttcattatcatttgcttctattcatatccgttatcatctaattcctgatcaggggatgtgcagacctcagtgttctcatcagctctaagaatattaaatgaaacatgatctaaagacattgctacaaagcctacaagtgccattgcattctttttctgaatgggagcttttgatatgaaaccaagcatgaaccgaagcaaatcagagagagtttgggactacgtgacattggctgatttgttgcaacacgtctttcgtgtggtgtgtgctcatttaccggcgatcttgatttttttttttttcctttggttaaggggagagtgggaatttccgtattatgtggtttcggttcggttctatttggtttgatgcagttgttctattcattttctagttatttcaactcggtcgtttgatttgttgttctgtaatttgtgtaagtatgtaatgtactcatttaaaaaaaaaactgcttgctgacggaaacttcgctatcaagaacacaggggataacgacacagcgaggtttcttatggcaaagcttccatttcccgacggatacttacttccaaaaatggcattgggttggaattttcattggggcgtcaatcaatatttggtggcgtgggaaacccctgataatccgtccaaatcgagttacacgctaaacctcgaacctaaaagatgaggagaggaatatgttgcctcaagcttccctgagcttttcgtttctaactatgagggccgactgtacgggactggttcttctattaacctctttctgaataccaccaaaatgtatgaagatcttctagtaccaccaggccccttggatgaccaaaaagaacagagtctaatggataaaacttttctaagtgataaaatttacatagctgacatacaagaggtcagtttcacggcttacaacgacagcatcttcacaagattgaacctaagccctcccggaattttacagcgcttgacatggaaccagacagtagagagatggattggttcttggcaccagtaataatatttatccaaaactaactaatagaaacccaataatgtgttttcaaaaaaaaaaaaaaaccaattatgtatccaaaaagtgtccaacgcatttaatttaattacatatcaaaagtaataatattttttactttaatcttaaaaaattccttatcttattccaagaatgaaaacatcaacaaccaaattagttgatagtttttggaagtacttatatcaaattataaaacatcagattagtttcttaattatatttttggttttgtattttaattagctaaactaaagtttttaaatggatcaatctaatacttaattatatagaaaatgaagatgacatttacccaactgtaactattttgtaaccgtgtgaacattgggaatttgctgatgatataacattctcgttatatgttatgtgtcaaatgagactttgaatgtttctaataatctgataaatggtcacagaagttaaagatgaaaaacatgaaagtgtgtgaattggagcgttgcatatggcttcatgtaaattagcttttttctcatgcgttattcttttgcagactcatataagatttgttgctttctcatataactttcttttatattttcagaaaatttatcgtgtccacgtagaaaatgcatacatatggccagcttcatgccgtgggcaaagcatgtggcaaacacgctcaattttatctgaagttctgatcaaaaagttcaaaactcaaacctatttctccttgtcttatagaacttgtgtggaaagcatatataggatcttaatcggtgaataaagttttacagatgaggtcacaactcacaagacttctcgcggttaaaattaactcatatgagatggttccatgttggaaaaaaaaagacatggtttaattaaaagcgaaaaataacattagagtaggtataatgatattgttcatccgtaatttgattattggaaatttgcgcataacagcaccaatactctaaagatacttaatttgatgctcaattcaacatgaacacggaaaaaaaatgatacgtataaggtatgtggatgctcttagatttagcgtaattaaaaattgattaataaagcgtatttaaaaattgattaatatacaatttactttctcttcattatattagaaaataacttggaataatatttataagattaaatacttttacttacagtataaaggttttcctttaaaatatgtgtttgaattaatatgtaagggatttgacacactttaattgcaaactcatggaaactacttgtgggcatattgcttagtgttttcttttatggctttcttataaataatggtaacaaatcaataattaaataatatgatatatattatacttaaatgaaactcataggaaaattttttaagtaaatttgaaaccaaattacaaaataactaatatgatgtgatgatatgtttcccctcgttctttacgtatatatatatatatatatatatatatatatatatatatatatatatatcatgttcccacacacacacttcacaactttgagaaagaaaaaaaacgagagagaaagagaatcgatcatcaacaatg

SEQ ID NO: 12955 - DNA, 3000 bp, Unknown
  misc_feature (1)..( 3000): cDNA_ID_2710015_gDNA_ID_2214583_Annot_ID_186567 3000 nt of promoter + ATG
agagacgccttttcttgcgggttttatacaggaaggtgtatcggaggcggagctcggtgttcttcccttgtacaaatttaaggctttccatagcaatgagaagaacattactggacctggtaaaatggttcctataccgatcaatggcttatgcttagcaactgaaagaacactgcttgctgaggatgcggtaaacacgaatctagtttgacaacgatttgttacttatgaactctgcttttgcttagtttcaaaggcttcttctacttgatttttcttaacaggattgttgcatatgtctgagttcatatgaggatggcgcagagcttcatgctcttccttgtaaccaccattttcattcgacttgtattgtgaaatggcttaagatgagagcaacatgccctctttgcaaatacaacattcttaaaggaaccactgatcaatcttgaagacaaaactcaaccaaccagagggaataagattctgcacatatagaaacagattccatttcctcaattaaaaagcttctgtatatatttatttacataactatcaaagtcatgtgtcttttgttaaaagcatccattttaaatgtaaaagatcacactttacaaatgcccttttctatatttgcccatatttgagaatacagctgatgctcatagtcatagctcaaatcataagaaagttcacgaacagttcacttcattgccacactgtttgctgcaatccgcatcacttactgctgttacaagcccccttctctgcatatcaagaagcaaatccgaagcagcggccatgtttccctccttttcataagctctaatcaagagatcaaaaacagccgaatcaggacttattccgctattcaacatttcatcgaaaacttgtcttgcctcaaccatcaaacccttgctagctagcccgtaaatcaatgtagtataggctaacaaatcaagcaaaagaccttcctgaaccattctggtttttaacttaaacgcatccaccaaattcccttgcttacacaaaccagctatccaagaagtgtacatgaacttatctggaacaagtccagcctctgagattttactaaacaatctctcaacttctataaagtctccttctttgcacaaagcatcaataagcacagtgtacataacatcattagctttctctatacagaaataaactatagcttcatgtagttgtccattcttcgcaatcccatcgatcatagtcgaaagagctacaacatcgggctcaaagcctctctcaattaatttgtggtacatgttaaccgcagccttcatgcgtccggatttaaaatatgcattcatcattgtagtaaaaatcaccatatcaggaactaaatcacttttctccatatcttctacaatctcagttgcctcctttagtttaccattaccacaaaggcctgatatgattacgccgtaagctgttatatcaagtctcatcccttgattgagcattttggccagaaacttcatggcattatccgaatctcctctctgaaaaaaaccatcgataatcgtagtgtatacaagagagtttggctcaactctatcctcgaccatccttgaatacatttcctcagctctctgcatttcccccttcttgcagaaaccatctatcaaagcagtataagtaacaacattcaaagacatccgaacgcgtctcatttctttgtataacgaaaccgcaacctccaagtcaccagctttacagtacccatcaatcaaacaagtgaaagtaaccacatttggagataaagcatctctcttcatagagtgaaaactcttcaacgccaactgcaactccccggatttgcagaacgtgtcgatccaagtactataagtaacaacattcggcgaacaacacttcaacataacacccatatacacaaaaacctcatctaacatcttcatcttgctaaacccattaaacagagaattaaaactaactatgtcaggcttgcagataaacccatgagaggctcttaaactctctaaaaccaaactagcacttctgatatctccatttctacaatgcccatcaatgagagagttataagatataacatctggttcacacccgaatctaggcatcgagtgaacgatatcttcagcgaatttaacttgccctagtttacaaacaaacgatacgaccgaattgaatgaagaacgatgaggagtgtaacctctggagactaagtaagctaagaatttgagagatagaatgccgcaattggaattgattagctgatgaatatgcttgttgcaggtgaatgggtctgggagattcgaggattttctcaggcgagaaagaaattgaagagcttctctgaccattcatggacatgggtttcttcagaagattcgaaaggttacaactttgaaaagatttttaaacatcaaagctaaatctaacggagaaggcttaaaccctagaaggttaaagaagaccgtcgttcggttctaaacgacagcgtttaattgtaagcttattattaaataaacatgaaaatgtaaaaaaaatctgaaaacggtaattatctctctctactcgctgtgacttagcataaacctcttttaaatccttctctaccaaaaaaaacttgctatttctcttttgtttttgtagaatctccggtgaagccgaattcaaaccctaacacttttggttcatcagttcttcttgacgattcagtgttgttgcgcgtcttatttctacattttgctttctcgatttgagaatgtgctgattttaggtatgtgttgattttttttttttgtttctggtggatggatttgagacttcaatagatatggaacttttgatgcctgtgtagattagagaagtaagggttttatagatcgggaataaatggaggaaggtggatatgcgtttgaggttaacaatggaagaccaacggcgagtgagtttggtacgacggcgaggatttcgtcaccgtcattgact

SEQ ID NO: 12956 - DNA, 3000 bp, Unknown
  misc_feature (1)..( 3000): cDNA_ID_3027225_gDNA_ID_2214583_Annot_ID_186565 3000 nt of promoter + ATG
agtttctgtattttttaaagcttattttgtattgatcataaggtccttggagcagtgatggtttatgcaaagatgggagatgcagcgattgtgtacactggagattacaatatgacgacagatagacatctaggagctgctaaaattgacagactccagttggatcttctcatttcagagtatggaaaacaaatacaaacttgttcgctggtatttttcaacaaacttagaaagaacaagtttacctgatataggtttaactatgccgttttaggtccacatatgcaactaccattcgcggctcaaaatatccccgggagagagagtttcttcaagctgtatgtctacttgtaactattaacacatggtttctaaatttgttcttaaatggtttttgattataattacccgcatcacctttggcttgtttctgatcaatataccccttcaggaaatgcttaagctttcgtttggtaattgtctgatatctcagaaaactcttccaggttcataaatgtgttgctggcggagggaaggcgctgattccttcatttgctcttggaagggctcaggtctgtcttcttacagagctttgaagtcagttacttaaacttgtctttgcttctcttatgtctcattgacaattgcgtttcctttttcaggaactctgcatgctgcttgatgattactgggaacgcatgaatataaaggttccaatttacttctcatcaggtctgttaaatcaccaccaatcctcatatgaaatcaattctgcagattagtcagctcaacaaagtcgtgactctatttcatgaatagtgatctctatcttctgaaaattgctgtccctgaagataaatttgtacttttgcaggtttgaccatccaagcaaatatgtattacaaaatgctcatcagctggacaagccagaacgttaaagaaaagcacaatacgcataacccatttgattttaagaatggtatgtgtactaccatttgcaaataactttagaacgttgaagatgaaatttatatcatatggaaccgaaactctgatgtgcttgaaaaataagaaccaaactagtggttctaatacatcctttgcgtccattttttgttcttatccactaccttagctgtacaactctgcttgctttctaactactaccttcacattctgcagttaaagatttcgatcgatctcttatacatgctcctgggccatgtgttctctttgccacacctggtatgctttgtgctggcttttcacttgaagtgttcaagcactgggctccttctcccttgaatcttgttgcattacccgggtactatacctattgtgtttcccctttattagcaattcagttttttcctagcatagcatctaacacgaaattgtatctcttttcatccatttatggatccgttttttacagatactctgtggctgggaccgttgggcacaaactgatggctggtaaacccacgacggttgatctctacaatggcaccaaggtcgatgtccgttgcaaggtttgtttactctttcttctggttctcacaaaatttatgtaaccttaacacgaaaacagcaatgcgtccaattcacacgttgaacctaaactaaaatgtcttgttgattctgttgttatcaggtacatcaagtggctttcagtcctcacacagatgcaaaaggaataatggatctcacaaagttcctttccccaaagaacgttgtactcgtgcacggcgaaaaacccagcatgatgattcttaaggaaaagataacctcagagcttgacatcccctgtttcgtccctgccaatggcgaaacagtttcattcgcttcaaccacttatataaaagcaaacgcttctgatatgttcctaaaaagctgctccaacccgaatttcaaattctcaaactctactcagctccgtgttacagaccatagaaccgcagacggggttttggtaatagagaagagcaaaaaggcaaagatagttcaccaagatgaaatctctgaggtgttacatgagaaaaaccatgtggtctctttagctcattgttgtccagtgaaagttaaaggagaatcagaagatgatgatgttgatctaatcaaacaattgtctgcaaagatcttgaagacagtgtctggtgctcagatccatgaatctgaaaactgtttgcaggttgcatctttcaagggctctttgtgtctaaaagacaagtgtatgcatcgaagcagtagtagtagtagtgaagctgtgttcttgtgttgcaactggtctatcgcagatttagagcttggctgggaaatcatcaatgctatcaaactaaatcactgattcttgtaacactgagaagtgttttcagtttttgtcgtttttctgtcggcatatgtaaaagttttgatcctagtaaattaaattaacccagtagtaactaaacttaccaactttagcgccaatttctatctaacaaagtaacacccgtattaaaaaccggaaccaattacccgaaactgaatctgaatccgaaaatttacttgtgtcctaaattcttctaccctaaaaaccaaatctgaagtcgaacccaaaaatacatgaatattttaatcaaaaatttaaattttattcgaaatccgaaaaatttgcatatttacccgcaaaatcaagtatggttctaaaaaaggcctaaaatctatacacgaaccgatattttagatttaccctatagaatcctaaacttctctacccgaaaaaccgtattcgatcgaattttacccgaatccgacccgtttatccgaatggccactcctaaccggatcctttaaggttaaagacgtacgacttattgtgataatgataattaacttataagactgtgtctaatcttcaattaatgttaattaactaaaaccattttttaaaactgtccgccatggcttagcgttttctagagcagagagaaagaagaatctcaattctcttcgttacta

SEQ ID NO: 12957 - DNA, 3000 bp, Unknown; identical to SEQ ID NO: 12951
  misc_feature (1)..( 3000): cDNA_ID_3027229_gDNA_ID_2214583_Annot_ID_186564 3000 nt of promoter + ATG

SEQ ID NO: 12958 - DNA, 3000 bp, Unknown; identical to SEQ ID NO: 12950
  misc_feature (1)..( 3000): cDNA_ID_3027233_gDNA_ID_2214583_Annot_ID_186563 3000 nt of promoter + ATG

SEQ ID NO: 12959 - DNA, 3000 bp, Unknown; identical to SEQ ID NO: 12949
  misc_feature (1)..( 3000): cDNA_ID_3027237_gDNA_ID_2214583_Annot_ID_186560 3000 nt of promoter + ATG

SEQ ID NO: 12960 - DNA, 3000 bp, Unknown; identical to SEQ ID NO: 12948
  misc_feature (1)..( 3000): cDNA_ID_3027190_gDNA_ID_2214583_Annot_ID_186559 3000 nt of promoter + ATG

SEQ ID NO: 12961 - DNA, 3000 bp, Unknown
  misc_feature (1)..( 3000): cDNA_ID_2991081_gDNA_ID_2214583_Annot_ID_186554 3000 nt of promoter + ATG
aaggtatttacacacatattaaaaaattatcaaaattttatttaatctacctcttttatataacagtatcattaattataaccaatagaaaaatatagggttaaatataattggtttaaaaaatattaaatacatttattatttgcatagaaagttgaaaacaatacttattttgaaaaaaaataaaaactcttaaaactacatttatatagaaacagaggaagtactaaatttatcacaaaatgcaaaaaaacaatctcactaagaggcaatgttaaatcatacaatccaaaacaaggcgtctttgttgttgagcatatatccacgactgtcacatatgccaaaagaccaatgtctttaaaatgtttgacaatttatgaatatattgcatacttggcaatattattatatccacgactgttacatatgccaaaagaccaatgtctttaaaatgtttgacaatttatgaatttattgcatatttggttcaactttatgctaatttttactaaactgtcccttgaccgacttcaaaatatatgagtacttctcttctattctttccaaaaagaacaacttatacattctatatatgtttgcccaaaaaagaaaaatacattctagatatgtatgtttatctacatagtctcgatttttatatagattattttctgatttttgctgatgttttatataaaacaacagagaggtaaggaacaaaactatattttccaaagttggacgagttcattcccatcatcatcaaccaaaaagagtgataaacttcggatacaattttattaatatcttatatatttattttttgaattagtttcgtaagaccacactccaaagattcatgtcttttcatataaccagttagaaattgagatctttgtacttacatttttatttgatcaatcaaatcttcttgataactctaaattgttgtgcaatggtctctcctttattgcaatgttacatattcctagtctctattatggattaggtttataccaaaagttaccaattgcaaacaaataataaatcaaagaaaatgtttgaaacataggaacaagtaatgcatcataaaacctaaggctaacttcaaatctctgtgatgatttcactctgtttcataatcttcctcgtatggtaatcgtcgacataaatgacaggacctctcacgcttaagccacttaaaggacggcggattcagttaggttttaggttttgattttgattgaagatcgaagaagaagaagagacatgcaaggaggaagggggaaataagagaagaaacaaatcactcaccaatggagaagagaaatcgccaaatcggaatgatattgctgtcgttgttgtggtcggagaagatgatttcgagatcggggttttgggttttggttttcgcttaatatcgaaaaagaagaagaacaaaagtgaccgcaaaaaaacctagtacttatttatagtctctttgtaacttcattttgagttttatttcacttaattcataattcttttttcttagttttttttaaggaaaatatgcttttaactttgattaaagataattagtctttttacttaaaaatagagtcattctagttaaccattggtaagaggagtcattctatttatttttgttaaaattatagtcaatttaagcaaatttcagttaaatatcataaaatgcaaacaaacaatctcgcgaagagctatgttaaatcatacaatctaaaacaaggcatctttgtttttgagcatatatccacgattgtcacatatgccaaaagaccaatgtctttaaaatgtttgacaattaatgaatttaatgcacatttagttcaagtttatgccaatttatactaacttcaaaattcatatatgaatacttctcttccattctttccaaaaagaacaacttatacattctagatatgtatgtctatctacatagtcttgatttttatatatattatttttctgatttttgctaatgttttagataaattaaagaagtaaggaacaaaactacattttccaaagttggacgagttcattcccatcatcatcaaccaaaaagagtgataaactttaaatacaatttcatttatatcttcttatttttttcctgcatacagaaaaatatatcagataaagaaaaacctttttttttgtggtcttagatactattattcttaaataaaactccaaaaaataaagtcaaattagatatgtagtgcaaaggcttgttgtttattaactttacttgggccaatatgagattacccaaagaaacatacttggtggtattaataattacaaggcttttagcaaagatgtatatctaagcgcattgaatatacaatgatttggcccaaaaggaccattaatcaaaattatggcgcactgaatatacaatgatttggcccaaaaggcccattaatcaaaattattgcgcaacgaggtcaattttttttttggcttaattgcgaagagaagcaaaacagaacaaacacaaaagtcttcgacgaccaaagaacaagatcatcctctgatttttcagacacatatttgtaatttataaagtttgtagctttttccttagcttgagattacacgaagaagaagaagatggatgacgttaaagataagctaaagggattcatgaaaaaagtcaatctctcttcttcttccggcaaattcaaaggccaaggtcgggttctcggatcttcttcttcttcctctgcaccacccgttaacccgattcagaaccggtttaactcttcccaagctcccaatccgactcctagacccaaacccaatccaaatccgttgcctgagaaacccttatcctcctccgatcagaagattagtgggtcaacgagaaacccggatcatgacccggttcgtgctccacaagatgggtttgacccgtacggtgctttcataacgtcttcgaacagatctcagaacggatattctctgagcatg

SEQ ID NO: 12962 - DNA, 3000 bp, Unknown
  misc_feature (1)..( 3000): cDNA_ID_1534314_gDNA_ID_2214583_Annot_ID_186552 3000 nt of promoter + ATG
gttccgtcagcgctcatcaggttcagaccgatcgaaacagactctctcgtctttacaggactccgcaatgaactcctggagatcagtgaaccactctcgtgatcatttgtgttccactgatgatttagcttgagcccatgaaataagtttacaaatttaggtttctctcttatatggtgtgatttgatgatgatttgtgtttgtgattcgagcacattttataggtttataagaaatttgtgtcatttgcacaataagaagaatcataaatttgaaggtccttcatttgttaatactataacaaaacaacaaaatagatcattatgtctctatacgacaaaatagatcataaatttgaaggtccttcatttgttaggaacttatgtctctatacgacaaaatcaggaatccatggattgagccgttcacttgttccgatttcttttcttgcttccctttgtcttttcttcagatgaataatctttagagaaagaaaaaaaaaaacttacactctataatcgggagaagggtattttcataccgtactatattctgagtgtattttcatacccagacaaatttgtacctaaatttatttgtttgcgaacacctggtttataacgtgtctaaaacgacgtcgtttattactcatcgaagcaatgaatctagaacatcatcttttctagattactactcatcaatctcaagcatgagacctgtatcacataaatctgcatagagagatctcacaggcgagactgtgttcttaaaggaaagctgtaaacgagtttgttacagatcaaaacttgtgtaatttgaacaataataacaatcaaatttgaagattcttcatttccaaaatcatgttactataacaaaacaacaaaaacaaaacataagtaaacttataggacaagatcagaaatccatggaatcagtctttccttttttcttattccttttcttgcttccattagtgttagtcttcttcttcggtttctcttccaccggtggctgttgactcagcaagtgctgaaatatcgaaccaactggatcagcttgaaaagctggatggtctagaaccttattcaatctctccccttctgtcaatctaaacaacacacaaagacacaatcctttcagatgaaaatcgcaagaaacaacaacaaaggaaacggagacttacacgagcttttgtcgccttttacagttcattttcagctcgggtgcaggaagagctgatttctgcagagcattgaactcgggaagaaactccgacaggttggtgagatcatacgcctttagcttcttttgtcggctgcggattttcttcttctgattaaaccgtaattagagttaccctcattagcaaatcatatgtatatagaaaaagttcaaagctttcacaatagcaaccaactccattgtagaagtagcaaccaacaactacaagtcctgaacaaaacaatggactcaaattgcaacgttcttaacaagttctaacaaagattgatactttctctaatcatagagaagtgtttaccttgccaatctccttttggacagacaaagaagtaactgtatctttgacctctgcattcacaaacaaagtttcagacacattgcaatttgatagcttagcagaacaaattttcaaattcgagacaaatttgatagcttacttgtgtaaaattgaagcttcttctcaaacttcttatcagacttcgttgtcacttccgatctgagaaataacgtccgaaatcaaatctcaaacacaaaaccagtcaagaacaaaacaatctgaacttcagatgaataactgttcgaagaagataagagaagccttaccctttgcttggtttgcccattctgtgtcttcaaatcttcaacgatttcaaactcgggttaataatggcgaatgctctgatcgaacaagatttagggtttttgattgaacaaagagagtaaaagtttgaatgcctttgtaaattcggatcttatgacccgacccggaaaatgaaatttgtttatatcagtaatgtttgggcctagccagacttatatctttcaacccattatgagcccaaaggttgttaaataaatacgtcattgttaaataattacgtcattgttttcgcacatactactaaacacaaattaatgatcattgcattttgttgactaaagataaacaaacttatatgtatattttttaaaatatctgaaagttcaggctcaaaaactctatattttttaaaggcggcgaaacttacaccagattaaattcatctttcttaaagaaaaaaatttttccaatatgcttcgaacacaacaattccacctaaaaacattatcattagaccaacaataagttattatttttcttttttctttttgacgtagtttggctttgacaaacaaacagaaattgaatgattactcgtgtggtatataaatagttgagactcaaaattaaaaagaaacaacgagttcttttaattgttgtttttttagatgaccgttgaactgaatcaagtgtgattcactgccacacaattaaaacattgggcattggctataaaattcaccaagaaaatctatttaccataaatttgaagaaacaaaaaaaaaaaaaatcctagaacatttatttaaaggttagttttaaacgaaaataaaagaattgtttttccaccgaaaaataaattattaatatttagtggtacgatacatcttttcagcaaaaaaataaaaaaaaattagaaacccaacttttagcctttaggcttgaagttatatatattactcttttgaagcgaactgattcttaatttttcactttctatttctctatatctatttttttatagatatatattttgtcttggttggattttgttctcgtgggttacttacttgagagaacctcgagacctgtcttgtctttatgcttcagaagcaaatcaaagcatctctccaagatttgaagctccatctatg

SEQ ID NO: 12963 - DNA, 901 bp, Unknown; identical to SEQ ID NO: 12946
  misc_feature (1)..( 901): cDNA_ID_2709998_gDNA_ID_2214583_Annot_ID_186548 3000 nt of promoter + ATG

SEQ ID NO: 12964 - DNA, 3000 bp, Unknown; identical to SEQ ID NO: 12954
  misc_feature (1)..( 3000): cDNA_ID_2712875_gDNA_ID_2214583_Annot_ID_135309 3000 nt of promoter + ATG

SEQ ID NO: 12965 - DNA, 3000 bp, Unknown; identical to SEQ ID NO: 12953
  misc_feature (1)..( 3000): cDNA_ID_2712864_gDNA_ID_2214583_Annot_ID_135312 3000 nt of promoter + ATG

SEQ ID NO: 12966 - DNA, 3000 bp, Unknown
  misc_feature (1)..( 3000): cDNA_ID_2710065_gDNA_ID_2214584_Annot_ID_135314 3000 nt of promoter + ATG
gatggtcggacgatgtattgccggagttggtgtagggtttgctctcatgatagctccggtttactctgccgagatatcctctgcgtcacatagaggctttctcacttctctacctgagctttgtattagtcttgggattttactaggctatgtctcgaattactgttttgggaaactgacgttgaaacttggatggagattgatgcttggaatcgcagcgttcccgtctttgatattggcttttgggattacaagaatgcccgagtcgccgaggtggcttgtgatgcaaggtaggttagaagaagccaagaaaataatggttttggtatccaatacggaagaagaagctgaagaacggttcagagacatcttaaccgctgcggaagtagatgtgacagagataaaagaagttggtggcggcgttaagaagaagaatcacggtaaaagtgtttggagggagttggtgataaaaccgcgacctgcggtgcgtttgatcttgatagcggccgttgggatacactttttcgagcatgcgacggggattgaggccgtcgtgttgtacagcccgagaattttcaagaaagccggagttgtttcgaaagacaagctcttactagccacggtcggtgtaggtttaactaaggcctttttcataataatagccactttcttgctcgacaaggtaggtcgtagaaagctcctgttgaccagtacgggtgggatggtcttcgcattgaccagtttagcggttagtctcacgatggttcagcgatttgggcggttagcgtgggcattgagtttaagcatcgtctctacgtatgcatttgtagcttttttctccatagggcttggacctatcacatgggtgtacagctccgagatattcccgttgagacttagggctcagggagcgagtataggtgttgcggttaataggatcatgaacgcgacggtctcaatgagttttctgtcgatgacgaaggcgatcacgacagggggcgtgttcttcgtattcgccggaatagcggtggcggcatggtggttcttcttctttatgttgccggagacgaaaggattgccattggaggagatggagaagctttttggtggtgggggtcctcgtggtgatcgtgacggacttgagattcaaactaaaaccatctctattgggggtttctcataagagtttctcacaattaaaaaaataaaaataataaaaatgaaggagagagagtgtagaaagattctcagaaactttgagatactctctacaacccatcatgacaattcgcttctcactattggttcaactttttaacaaaaatatttttttaatcaaaaattcaaattataatataatattaatttttttttgtttgagaaactttgtgggtttctcatggatggagatgcccttagagagtcaataattaggttagattatcatggctatgtagaataatttttaaatccaacatgatttggcatatctattataaggtgtgattttttgtaaaggacaaagtatgatttttatattcatccctttttactgtagctaatgagaatctacaacctaataaaaaacaataacaattatttaattataaaatctaatagttcaccaaaacaaaatcatatatcggtttggatttataagagagggttaaagtttaaattttatgattaaacgaagttaaataccagtttaggtttataaacgattttagattttagaatcaaacgaggttaaatgtcggtttagagttataaacgggtttggattttacaattagatgaggttaaatgtcggtttgagttttagaaagaacgatttaagtttagattttacaattaatcgagtttaaatgtcggtttggatttacaaaatagaattagagtttaaattttgtaattaaacaaaattatatatcggtttgagtttatgaaatagtggttaagattatagattttataattaaatgagtttatttatttattaggtgacatattctaattggctgaaagaggtgaatgaaaaggtgaaccaagaattgttcgatttttaactacacatctaattctagactctagagtatgcatattaatgtttccagagatcagaaagtgcttaaacaaaacatattgatcacttcatggtttttaagtcttagtttaattgatggaaaggagaggattaccaatactgaagtagagtcatagttgatatttgaggggtgagaaccctgagattcgtaaagaaatcgatgaacttgtgcgtgaagaaattagtttgatcatgctcaaaggtctaaataataaaaaaccttgacatttgttcccaattgaagtcctttaattgtgagaaaaattatgttgctctagagcaatattgaagaaaaaggagacatatcacatatgggaagacctgaggagcaatgatttgatttgacggaccaaaataaaccagagattttcctgacaaattaaggtaataatgcatgaggttacgtggaaatgaatcaacaatcgttagctcctaatatcacggagccaaaaagagaaaaattagaccggagattattacaattagtaactaacacaaaactgttattaagacagaaagagagagaagaggcatgtttctcggaatgaagacagagcaaatctcaatcttcctttttcaccttattcctattatcattttctgatcaaatgttcaaaaactctctccccttaatctcttcctctaaggtacacactttcatgctaatctcttaactaattttgtattaatctcttatatttagcattacctgttttgttaacgatctaacgaacataataagacaagaacttgttccaacgttaacaccattttgattatgatctgttttttctacgtgttgttgttgttgttctcagaataattgagtggttaagggagagaggagacggagagtttttattttcgttaccggaaaattttgatctccgatg

SEQ ID NO: 12967 - DNA, 3000 bp, Unknown
  misc_feature (1)..( 3000): cDNA_ID_2710076_gDNA_ID_2214584_Annot_ID_135321 3000 nt of promoter + ATG
gttttccttgccgaaagttatagtgaacaacacagattgacaaaaatacttttaaactagtgatcaactgctataaaggtattctataaacatagtaatatgttgaatgttgaaaaaaaaaaatcgtagacaatatgggggattatttaagtggccatgactaaattattaattaggtaaatgataaagtggcaaaactgtaattaaggagtttcagatttttgtttttcacattttgggaaagtcattcggatttcgcatattaatgctattttatttaatagcaagttgttggataatattgcatgataattttctatagaagttttctatataacatactgatttttctaaattcgttacatgaacaaaatagcatgtcattttagttaagaacatgttattttctcaaaattagtgtgttatatactaaattggatagagtgtacttttcaaactaaaaagaaaaacattttaacttatatatctgatattaacagaagttcatggttatctagaatggttgtatgaatactctagaaaatattaattttattatttacttacaattttcatttgtggatatgcaacctaataaaaacggaacaccaaacatctataaattttttaattggttttggctaaaattaatgagaaggggatatgttgaggccatcaagtttatttgacagagaaaatgatttttaagagtttaatgtgtgtttagggaatggtattgggtgttaaaaccttgcagcggtggccggtggcaaagaagcaataactccaatctctttttaatttcaatatctaggaagctcacatgaaatatcagtttcacttcccaaccatcatttttcatggctcactttagttatttatcagaagaaatcggcctaactttatatccctagatagtaaatacactatagtttgtaagttaaaaacaaaactttcgatatactttgactgacccccacacctaatgtgctctcgttaagttcagattctgtcaaaccatgaactaactaagaaacattggtaacaacttactggaaacaaaaagcggaatcgataaaagataaaaaagagtgtgattggtgtaattttaagaaacatagattggatttgtacactttttatagttcaagcagattcaatcttagcattttagtatagaataatatgtgtcgagatatcatggttcatggattgatgctgttaaaaaggttggtcatatttttcttatgtataagagatagaaagtaatgtttaaccaaaagaacttgatttttagtagtgtttttacatttttttgggtttcttaatcattcgcaaacttagttgcacaagctgtggaatacaatttatgaattttatatggaaaaagaggaaaacttaatatatgtgaaaaaagaaagaaagagaaaaacgatcctatttgttgcgattatgtattatttaggcccatttatatcttagccaacggcccattgaaaaactgtctcatatattatttaataagagtatagagagccacattattttgggtcaaaattgagtaaatgactttgatgacctgataatattagaagctatttttccaaataacgactatgtattagagaaataacatagtgtataccgaataacgatcgaatttttatgcttaagtcatgctctacttgacttaaatcgaatttttatgcttaagtcatgattagtgttaattttaaagaaacatgattatctacatatacatttttgcagccattttgtgaaataaatcctggagttgtaacttatttacaatggctgccactagcttttaattattgattttcttttggcaataaattgattaacaaacaaaaaatatttcaaatatattctaatcccatatatcacgcaaatttctccaaaatttgaactagatttcggaaactatttaaaacaaaaaatatttgacaaaccaaaatacaattgcaatcccttaaaatgagcaaaacgcacctaaatacatttcttatcagttcactaaatcttatttctccaatatttgaattagatttcgacaactatttaaaacaaaaatttgtttgacaaactaaaatataattgcaatcccgtaaaatatttttttaaattagcggtgtactgcagatttttttaacgggacgggtttggtagaacgggtttggaaggatgttacttgtaaactataaaatataaatattttataaataaatataatttacagacttttatatatactaattttaaaaaaacaattatttctgcggtgtaccgcgggttataatctacttattattattctgttacattgaaagaacttaacaataaaaaaaattgttagagattgagcaaacattttggctagtaattattttcttctctttatttatagaagcaaaataaggaatgttctaaatccattaacaagcctcatgcaactactgaactacactttgttcacacgaggcctcggaagttcttgcttcggtatgtgggaaatggttcacaagtttaacataatgggctgggccctatattactttgaaatttgtctaatgattaccacacatcattagagatattgtcactaggatcaatagaaaatgcaaagcacaaacgattacgactatatccacttatttgacgatacgttagatgctttagttgatcatttaaacaaaaaaaaagaaagagatgcaatgtttttgttcccttcaaagattttaagattttttagttaccaatcaatcaaatacaattatctacttcgacgtaagttataatatttttcaacgattgacggcatttcacgaacattagattagtatcaagaaataattcaccacgtgtcaaagtaataatacacgtgttcacttatcacgacacgtgtctattcacggacccacctctcatcgttccattgatgttaataaaagagctaaagattctctcatttgagtaatg

SEQ ID NO: 12968 - DNA, 3000 bp, Unknown
  misc_feature (1)..( 3000): cDNA_ID_3027260_gDNA_ID_2214584_Annot_ID_186604 3000 nt of promoter + ATG
accatttgccatgtgtctattaaataattaatgtaagctcttcaacttttaatttataggttaatgatatatttattattttattttacatatttaattgtattattactaaatttattttaatattacatgatttttcaataaaccattttaatagttttctcatacccgaagattttttttcttgtaatccaaactcaaagtacgagtgtataatagttgtggattacttaatgatttgagtaagttactctcttaaattgatatttatattctcttaaattgatatttatattctcttaaattgatatttatataataaaccactgagggtgaagaatacgtaaaaagctccatcatcaaattcttaggtttttagaatccaacactaccatctgttaaattggtttaaaatcaacgttgtttctgaattatgtgtatgatgcattgttgagaatgttgttagaattttttttaattaaaattgaatcatcgaatacgttgttatattgcataaacgaatgcttttttcagttgatactttttttttttttttttttttgtcaaacaagccttgtatttcattcaatgcatctcctaaaggtaaagtttacaagatcttcaagcatacaaagggttaaaaaaactccaaataacgaaagctaacaacaaggaaaaaaagataggtttgataagccatagaggaacggagacagaagcaatcaagcaacaagccacatgcgacctcatggtgtgtcatagacacttccgcgaccacgtcggggagtttcggattactcatgatcgagaagacttgatcttttgactttaaaaaaatgtcctttgtcttatggctcgtcggcaagaaatgcattgtggacgttgggaccaatggtaagaactcatggaaggtaagagttttttcgggtatgagttggagctcaagctttagggttaacggatataaaatattgatgaagatttggtaaccaccactccatggagacgggatcataatgacattattcatcaaacttttactttcaagaatagtacccatgatgtagctaaatatatcaagtatgaaatcaataataaaatgaatcggagatgaaaacttgaagaaactacggtaatcactgctccttagagacgagatcatcatgccgatcttcttcaagcaattagcaacatgaatagtacacctatagattctaatggcaaggttctcaaaggatttttgtaccaacatagcagcaatgttcgattatgattcaattgatgtccattagcaattggtatcatgaatcgatgcaaatacaagctaagagaagacaaaaaggagtttgggtcaaacctatgattttgcggagaccgtttagaggggctgggccaatgcattagtggagatgggccattgttttgggggatgggcctaaatttggttaatgggctcgaagaacagtggcccattaagaggaaccctaacaaggcaacagtgtggcagaggatggtgatggtgcgacggatctgaggcggcagataagaactccgataaacgctaaatgatgctggtgggaataaggtcaacgtagatgagatacccacataaaacaggtcggaggtaaggatggtgttgcatgtagagatcatagcggttttagattggaaaaattggggctgttctgttggtggaaacttcaaaaagatggatgcggacaaaagctgaatagaaggaaagatcatcgagcatttcctctgccctctgtcgtcaatgaacggccgaggaagttaaacgattgaaggttgggttgggatgattgagataatagccagagaagaattaaaaatatgaagagataacgaaagaagtgaaacgaagaagagaaatcccgacgccggtgagcaaaagcatcaccggcgccggaaggcgaagctagggtagtctcctcgatgttagtgtctgggagagtccttaagtttatataatgtcgtcattctaagacttagattatctccaactccgctacaatattcatctccaaactccttcagttgatattttaatgttgcttattgcataagtgaatgattacataaataaaaattatatttaaattaaaaataaaaaaaatctgaaaaaaccgcggcataacgcgggatgatcacctaatgtttaataatttgattaaacaagaacaatttgctttcatttgtgattgtttatcttatcatatacacctcgtgagacatgacgacaccactaaaatattgaaaattcgttaataaatttgtttctctacggatctggatctttaggcacatggaaaaattaatagatttagagtagtcatggtgctttctcgaaaaagttttttttttttttgaactttgaagtggaatgtctagacccttgtgggtggtttagggatgatgatgttcaataatttgaaaaaacaaccttctaaatcgattatgagggttcaaaatctaatctaattttcgagaaagctaattaacgattttgaggtttttttttttgaaaatgatgtcttttagctaattatagaaactattaacggatacctaacattgtctgattagtccattaggtagttaataatatgttttagttggttttgtcaacgaaaattagtgatttaacttaaagttaacataaaatcaagtattttattcatcaaatttaaaattcatggtttaaatcaacgaaaatggataattgatgatttaaatggtatttttcccctcatcttcttctaccatgacttgaactcatgcggtggtgtttagccctcataccaaatgagctacaagaacaggctaaatggtatttttcttactgtaaatgatgtagagcgttgtattatgttttcaagtgagaatgaaaattgacagacaaaaaaagaaaaataccagaaaaaagatatgtgagtaaagcccaaaagtttagtttttctacaagttgcttttgaaacgatg

SEQ ID NO: 12969 - DNA, 3000 bp, Unknown
  misc_feature (1)..( 3000): cDNA_ID_2710041_gDNA_ID_2214584_Annot_ID_186600 3000 nt of promoter + ATG
atatatgctatatataaatggccacaaacgttaaagacctacataatgaaattgattgacgtattagtaaaaatctattactgtatcacgattaccaatataggctctaagcttgaactagtaaacatattacgtaataatttaggtgtcatatattactttatattttgatataaatatcattttggtatttaacacaagaattaattgtttttttttgtttttatgatcataagatcgatgaaaaatggtaagtataagatcgatcaatgttgtaataagtataaaattgaaatacaataaaaaagcttttttttttaagcaaaaaaaaaacaattaaaaactagtattacccaaaataacatgtatttcaaaaatttaactttacttatccacaataatatgcctttaagaattgtaattgtaagatcgattaaaagtctcatattctcaatttacatcaattcttcttatttttcgtttgtttgtcgtttgtcaatttttttcttaaacatgaactcacccaaattagcgaagcttaaatatttagttctttttatacaacaattaaagattccaaatttacttggttaaagacattaatcaccacaaacaaatacaatcttctcgagtaatcaataatcatgtacggtcaaaccttaatcacgtggcacttaagtcatatgctttccaaaaatatacatttacaaagattattctatactctctctcctttatctttgcctctttcgagctccaacctgtgtctgaattcgatatcaccattaggtgctttaaccacatggttagcaacatgttaatctatattatacatttccataaataggttgaggacacgtgtctccatacatgtgtttacaaatatcatgttgtaggtaatgattctaacaaggaccagctaaaaagaaggtggatttctagatagctcttaagttatggtcctagatctgtttagccagttaattaatcttgtttttttcaattgttaaatgttaatacttaatactattattaatatattctttctattttcgttcatgcagcttttaaggcgatcttgtataacttcgtggtggtccaaggtatacatggcacaacatagaagcattgtgtcaatataatattttcttaatcaaatcgaaataattgtttagctcaaaactttgattggttcacatattatattgtatataataacctttttccttcaagaaacaaccagtaagatctatatcagctgtaaaataaatacgcaagaacctattaactcgactcgccatttattactaaatgcggtagtgtcattaggaccaatctctcgaatttgacttctgaccatataaaatagggagtgtattttcattaacatttgagactttttcttgtaacaattgatttataatttttcatgtgcctacttgtatctttagagtctgtatggttagaggactgaaaacttttgtaatgttttaggcttatttgaataggctataatacattagacttctagttcaaatagttaatcatttttttaaaagatagttaatcacgttatggaataactcaataagtagaatatcatataattatataattgggtgaaaactttaatttaccataacatggaattaacaaaaaatgattgcgacgagggaaaagaaaaagagagaatcagagaacgaaagattggaacatgggaaatggcatttcttgttgtctttgttttcataatgactaaaagtctaaaactataagccgtcataaaaaatttatgtaaattatttacaatagcaaaaaattacgtgtttggtaaaacatactgcacaattattcccatccgactactacatttataattatgtttacgggctttataggctcaaataatttactaaacttaggatgcatataaatgaatacattaatgggccacatttcttatagcccgataaatagttgagttactatctttcatagtcttgagtcttcacattaaaacgggtttaaattagcttcaattcaaagtcaaattataccaaaccagtaattaggatttactaacaaagaattgaacagaaactgttgacaaaaaatatctcttggactttgagttattccattgatgcatttttggcggtggatctttaaatgatattgatgcaggaacttaatcgttgtaattttaggtaatttacatttataaactatttaatattttggcaatttttattggttttccttctttttttatggggttttctccataattgaacttaactcggtctcaaaccgaacacgtataaatttctaaaaaaaattataaaatcgaatcatactaattttttatttcccacgcacgtcatatatatgacatatttattttgatacacgatagtgcatataatgatatcagaatatcaaaatttcagtgttaattatatctttagtaaaaatgcaacaaatgaaattagtatcttatttgtaaataatttttagaatgacaaaaaaaattgcttttgttttctaaggtgaggaattaaaattttaaatttgtcatttttaagtttattcaaaaaaacatgctagtttaattggagaatcgagtccgatttttgaagaaacatgtctaaatccacatattgaagaaacatgactcatatattctctttctgttctttttctacaaattttggcgttacaaaagtaggcatggtagtttttgttaggtctcgctaacaaataattaatagcatgtcacttgtcaatgcctcatccgaaatccaatccaagattattttgttccacagaaaagaacaaagtttataaaaataataatatagcgactataacgtttactattcatccctttatgggtcagtgtatatgtaatctcttcttttatcccaaatcacacattggcattgccattgacaatcaataaaacatcttgtgagacaagaacgggtaagtgataagatc

SEQ ID NO: 12970 - DNA, 3000 bp, Unknown
  misc_feature (1)..( 3000): cDNA_ID_2710038_gDNA_ID_2214584_Annot_ID_135322 3000 nt of promoter + ATG
atgttgaaagttaaaacttacatgcttttatcgttcgtctcctttctcatttagggaatctctaaagacatacgttaaccatttctttaaaattttcccgattcataagccaaccaaattcaattaatttggtaaagattctcatcacagacgcaatgtttttgttatattagttatatatacatgtatcttaataataataaataaataaaagtaacggttatttgttgataagtatttgcctatttgggataagatgattatttttttctctaatggataaataaaagtattttatttttctaggtgtaatagataaaattagccattcatgtataactaactaacacgtcatcttgcgtttaaatatttaagtcatgtaatcttcatgtctttttaacatttttcttctaaaccatttaaacagctaattatcataaaaatcagctacttaactagctagtaagtagtaactacgctctgctatttaactacattccgctagttttaatcctcagaatatagaagaatcttaaattttgagaagataaatgcttaaagaaacattaaacgatcgattttctgttaacaaattggtcaaaatagtgtgtacgtggttgtggcttgtggctggcttgtggctgaaccagtaaaaacatttcgaataaaacacatttcatcacaaaaattaatattttggcggctattgcttaccaaagtctgattggtcgaaagaaagtttggaaactgaagatcagaagacgtgtatgaatgtgagaggtggcctacctgcgaattggtagaatgttgacacgtgattagactccatgtgcttaccttatcacccgaaaagaagctctttcatagtttcattggcgtgaagcgatgaaagaaagtaaaaaatatcgattgatgtatgtacttttttgtgtattaaggtgtacgtacactgattttcgtggttttaagcatttttttttcttcgttttaaagcttaactttaactcatttgaatatataaattggttatgtaaaccaggaatcaaacgttagattatccatgattaaccgaatactctaattatacaaatagagtgtatcattgtaacggaatctttaagaggaataacagaataatttcatcttcttcgtttttttttcaaattctcgttcactaatatggtatcatagagttaagttttaaaatctcaaccgatttgacctaaatttcatggatctttgagattcttcttctgtagatctcactgaagtctcgttcactaacaattagccattttttccacaatatatatattttctatattaaaattatatattttattttaatatatctatatatatatatatatatatatatataacattaagtcatatatatatctaaattattcagaatgtaaaacaggaaaaacaattattcaaaatgggtaaagatataatctgggtatgtcaacatttgtaaaaacgttttctaagaaaacaaaacaaaatagttgttcaaaatgggtagagtagtttgaattttaaggtatatgtattaaacccaaattttgaaggttactttgttctttgaatataacttaccacggttttacatggattctatatgcagaatattgttatttatttatgaaatgttatttttacagtatgtacatatgcatacgtatgttcaaaatatatgttgatcattgctaaaaagaaaaacgattacctcgtatttattattttaaactctgaataacctaaaatgtgtttccattttggctatacaacaaaataaacgttaacattaacgtagaccatatatgtttcgagtttaaaaaccgattaaagaaaacatttgaaagagtgagtaaaattattagtatacgagagatgagagtaaaagtaaactaccttttgaaagacaagtcagttatgttttctcttttaggttgttgcttagacttatccatatgatggtgataacgacatcctctaatcctctcatcacacgtaaattaagctttatcgcattacatatttataaatgataattacatgtatttcctttagtttttcaaaggcgacctatatattgattattgctttggttttaaagactacgtacgtgttaatatccataccttaagaagcattttaaaaatggaatatgtttcataagactttttttgttttgataagaatttacatgaactaattaacttgtttatgcttcttaagataatcaagggtttgtatgtcaaaacacacactatttaggagctctagtaattaagtgagttttggttccaaattgccaacaaagtgtaagatctacaacaaagatcgaataaattaaactacggcggtttagttgaaaagttattgaactataggctgcatattttagaaaattcctacgtaaacaatatatccgcattataaattttcaattctagttaagatttctattttatatataaaaacataaaatgatccatttatcaattgttaccaaattataaaaacataaaatgattttatagtccaaataatattgggaggttgtttattcttttttttttttttggtctcttacttattgtcacatgaatttgacaaagaaaatgatattgtcaagttaaagtcatgtattttcaatatgaaacaatattaactattaagatattaacgaaagtgatgtacatatgtcatttgagatctactactagtcttgatttgctaagtggcaataatgttatttgaaagaatcataagcccaaatccggaaaaaagaaatatgtattagaaaaaaaaaaactctaatcaaaccatcccttgacacctactcctcctttataaatgataagtcctctgcttctcctaacacatcttctcttattgcagaaaaggtgagacaaaaaacatcaccaatcttttgaatctaagagagagaagaagaagaaggtctagagaacgaaaagaagaaacatg

SEQ ID NO: 12971 - DNA, 3000 bp, Unknown; identical to SEQ ID NO: 12969
  misc_feature (1)..( 3000): cDNA_ID_2710041_gDNA_ID_2214584_Annot_ID_135323 3000 nt of promoter + ATG

SEQ ID NO: 12972 - DNA, 3000 bp, Unknown
  misc_feature (1)..( 3000): cDNA_ID_3027260_gDNA_ID_2214584_Annot_ID_135327 3000 nt of promoter + ATG
atgcatctcctaaaggtaaagtttacaagatcttcaagcatacaaagggttaaaaaaactccaaataacgaaagctaacaacaaggaaaaaaagataggtttgataagccatagaggaacggagacagaagcaatcaagcaacaagccacatgcgacctcatggtgtgtcatagacacttccgcgaccacgtcggggagtttcggattactcatgatcgagaagacttgatcttttgactttaaaaaaatgtcctttgtcttatggctcgtcggcaagaaatgcattgtggacgttgggaccaatggtaagaactcatggaaggtaagagttttttcgggtatgagttggagctcaagctttagggttaacggatataaaatattgatgaagatttggtaaccaccactccatggagacgggatcataatgacattattcatcaaacttttactttcaagaatagtacccatgatgtagctaaatatatcaagtatgaaatcaataataaaatgaatcggagatgaaaacttgaagaaactacggtaatcactgctccttagagacgagatcatcatgccgatcttcttcaagcaattagcaacatgaatagtacacctatagattctaatggcaaggttctcaaaggatttttgtaccaacatagcagcaatgttcgattatgattcaattgatgtccattagcaattggtatcatgaatcgatgcaaatacaagctaagagaagacaaaaaggagtttgggtcaaacctatgattttgcggagaccgtttagaggggctgggccaatgcattagtggagatgggccattgttttgggggatgggcctaaatttggttaatgggctcgaagaacagtggcccattaagaggaaccctaacaaggcaacagtgtggcagaggatggtgatggtgcgacggatctgaggcggcagataagaactccgataaacgctaaatgatgctggtgggaataaggtcaacgtagatgagatacccacataaaacaggtcggaggtaaggatggtgttgcatgtagagatcatagcggttttagattggaaaaattggggctgttctgttggtggaaacttcaaaaagatggatgcggacaaaagctgaatagaaggaaagatcatcgagcatttcctctgccctctgtcgtcaatgaacggccgaggaagttaaacgattgaaggttgggttgggatgattgagataatagccagagaagaattaaaaatatgaagagataacgaaagaagtgaaacgaagaagagaaatcccgacgccggtgagcaaaagcatcaccggcgccggaaggcgaagctagggtagtctcctcgatgttagtgtctgggagagtccttaagtttatataatgtcgtcattctaagacttagattatctccaactccgctacaatattcatctccaaactccttcagttgatattttaatgttgcttattgcataagtgaatgattacataaataaaaattatatttaaattaaaaataaaaaaaatctgaaaaaaccgcggcataacgcgggatgatcacctaatgtttaataatttgattaaacaagaacaatttgctttcatttgtgattgtttatcttatcatatacacctcgtgagacatgacgacaccactaaaatattgaaaattcgttaataaatttgtttctctacggatctggatctttaggcacatggaaaaattaatagatttagagtagtcatggtgctttctcgaaaaagttttttttttttttgaactttgaagtggaatgtctagacccttgtgggtggtttagggatgatgatgttcaataatttgaaaaaacaaccttctaaatcgattatgagggttcaaaatctaatctaattttcgagaaagctaattaacgattttgaggtttttttttttgaaaatgatgtcttttagctaattatagaaactattaacggatacctaacattgtctgattagtccattaggtagttaataatatgttttagttggttttgtcaacgaaaattagtgatttaacttaaagttaacataaaatcaagtattttattcatcaaatttaaaattcatggtttaaatcaacgaaaatggataattgatgatttaaatggtatttttcccctcatcttcttctaccatgacttgaactcatgcggtggtgtttagccctcataccaaatgagctacaagaacaggctaaatggtatttttcttactgtaaatgatgtagagcgttgtattatgttttcaagtgagaatgaaaattgacagacaaaaaaagaaaaataccagaaaaaagatatgtgagtaaagcccaaaagtttagtttttctacaagttgcttttgaaacgatggatgggtatgtcagtaggcccatttagtttcgttaggcctaataaaatgagtttttccttttttttttttttaatatttttttgaataacagaaggttctgaggcgaaacccgtaatctttccaggcccgaaaccacagcacgtaatattagtttcggattttcattatatatatagtttgaagaagggttgtaattttttcagaatcagcttacggagaaagctacgttcgttcgttcctcgtcgaaccaaatcaatagtgaagacgaaaggttcgctcatctttgtattgatctaaagaatttgcaactcgtaagctctctccgatctcttcgttttcacttttcgtatcttagttttttttttgtttcttccttccgatttgataaaatctccgatcgtttggttatccgaagaagattcatgatttgtttcatagtcaatttttaactagtttcgatctctctgaatgaaatttcgttagggttttgagtgattgttctgttgtaattcatgaattttccaaagaaacttgtgtgaataattgtatgatgttgttgattgatttgtgagggtagaagaacgatg

SEQ ID NO: 12973 - DNA, 3000 bp, Unknown
  misc_feature (1)..( 3000): cDNA_ID_2710134_gDNA_ID_2214585_Annot_ID_135330 3000 nt of promoter + ATG
cgagaaaaccgccctgaagaagtggtttcaggaaggcacagagtttcaccaccaaatccgctagactcttgaatcgtttaaaaatagaaccccttagaacttgaaccaaaaagagaaagaatgagaaaaagggtagagttacgacatctatgggactggatgtgtccgttggcttttacctttagcattctgctaaagctcaatcttttctctaagagtcccctgttactcgaccaaatcattagagggaccatttatgtctcttagcctaagctcgaaaccaagtgagtttataacctttgtattgcttgatctactgttcgtgcttaatgaatgttaaagggaattggttgatctgaatgcctgaatagattaaggcaggttgttaggttgcattatgacgagtatggctaaagtttttaagtaagggtctatcatcttgcaatctagaattagctacctggacattgagcttacccgttctatatgcatgcttcggtttttgaatccccaccttcaaacctctccttcaacttaagattttttgtttgcttgagggcaagcaagagataagtttgggggagttgataacactgtattttactcattttagacatgtatttatcttcatttagcttagtgatcactcaatatttcatatcattttgaatcatttttggcttattttgcacctttaggcatttaggatcatcttgcatacatattgcatgtttttgtgcgttttcaggtgtagaaggagcttaaaaggattctactcgaccctctactctatccaaccaggagggaagcagcggagcaatctactcgaccagttcactcgatccaggcatctatagaggaggcagcaattcactcgaccagtttactcgatccatgcagctacagaggaagcaggagatcggtctactcgcccctcttactcgatcctctactcgaccccttcactcgatcaaggacgaccaactttacaagacttgttgatctatcaaagcatcttcagatcctcctcattcctcactcaaccagacatcggagcatacagataggagaggaagaagcatctactcgaccaattgatcactcggagcatagacacaaaggcgcagagtttgcagcaccctctttacttgatccccaagatcgagcactcacccaaaccgcctcaagtctcttgtcttctagtgaatctagggttttcaacattttagtataaatcgatcactttgggatttgttcaaaggatctagcttttatcctttagtttttttttgtgttcttgaatctaaaaaacttaattactcttaatctattttgtttttgcatttagttctttgagtaaagttgtttagtttgtttagatctacattttggtatgatttcagtaatttcttggtttgtgttcttagttatgttgtttgagtagtgattagggttcttgaggatggattagtgatatggttcaaacactacaagaaaacagtcaatttgcgaggaagggttgcgagggaaggcattcctcgcagtttttgcgagggtattgcgagaaaggtgttacgtaccgcacgcgcgtagcaattccgtcgcaaaactagcgagggaagacttcctcgcaaatttgcgagggaagtacgatggtttcgcaagaaagatattatccgtcgcaaatcccaagcagatacgtcgcaaatctttatcctaaaccctaaaatacataaaagtgttttgcaatctttgattctcatttataaatatgaatctaagtgaccatataatcattcaagttgattatatggtttgaacaaaaaaatattgtattggtttcaatattaacatttcattttgaaaatgttaaacattcatgattcatacttaaagaaaaccataagatcatcattgatgtatttggggaaaacacacattcgaattatatgatgataaaataggttcaaatgtagataattaacgttctaatgattcaaaaaaatgaatccaaatgattttgagtagtgattgttgtatttttcgaaattgattatacattgcgaggatattgcgaggtgtttgctagtacgcgtagcacttccctcgcaatatttacactaaaccctaaaatatttagaatttttagtcatgttcttattttgctgagggtcttactagaaataggagagactgaatcaaatataattattgaatcagatatgatttaattggttaaaacactgcgagggatttgctaggcgctctcgcagttccctcgcaatgtaagttgcattttgattggtttaaaagacggttcctcgcaattttctagcaaggtttgcgagtgatttgcgaggaaatatattcttatatatactcgataacctattttgagcggagctcaaacctgccgcattaaaccctaaacctaagttttttctttgattctcttcttctccgatctgttttcctcgtcgccggcttctcttcttctccgatctattttcttcggtgccgcctctcttcttcttcgatttgattacgtcgccgcctctcttctttttctccgccgcgtctcttattctccagcagccgccgcaactcttcttctccaacttcagccgcgagtcgatctgtttcttctccaaggtaacgtcttcttctccgatataacttcttctttccattccaacttccaccgttcgatctaacttcttcttcttctccgttgcgtctcgtcttctccagcaaccgtcatgactcttcttctccagcagccgtcgcaactcttcttctccagcagccgtcgcgactcttcttctccagtagcagcagcgactcgatctcttttacctccaaggtagcgtcttcttctccgatctaactgcttctctccgatctaactttttcttcatctccgatctggcattgttttccagatctaatatgttctagtttacggatctaaactcagggttttgtttgttttgcaagatg

SEQ ID NO: 12974 - DNA, 112 bp, Unknown
  misc_feature (1)..( 112): cDNA_ID_3027288_gDNA_ID_2214585_Annot_ID_186628 3000 nt of promoter + ATG
ccaggcactttctccaatgcagtctattagcagttggaaacttttgaaaaaccagatctcagctacctctttttactaaaacagaattatccaacagttccttccaaaaatg

SEQ ID NO: 12975 - DNA, 3000 bp, Unknown
  misc_feature (1)..( 3000): cDNA_ID_3027292_gDNA_ID_2214585_Annot_ID_186627 3000 nt of promoter + ATG
tgaagaagacatgcaaaaagtactagacaataagccttaccactatgatcaatggatggtcatccttcagaagtgggaacctacaatctctgacacctttacctctaagatccccttttggattgatatccaaggactcccaaaacattactggcaccaggatatgctcaaagctattggcgtagacttgggagaaattctggattttgaaataaccaattcttcagcaaagctaaaggtctttgttgatggcctgaaatcgctagtccttgacaccatggtagactttcctgatggcagcgaagctctgatctcgttagtctacaagaatctcaaaaattactgctcacattgcctaagacttactcatgaaaagaaattctgtccagatctggtttcagaaaatgaggacactacaaagttcagatcttccagaagtgaagaggcatccaaggatctggctagaaattattacactcctagagacaatttcatagcccctagatctctaagagaatcatctccctcaagagcgccttcaagaaacccttctattaatcaaagtcgttctcaagatcttggaaaagtaagaggagtagacctcaacttctagagaacatctatctcgccgagctggaccctatgaggagagaagacacagaaatccttttaaccctaacagaaggaatttaggtcgccatgagacaggagacaaaaggggtacctcaagatatcaggatcctattagagaggggccaagaagagattcttctcagactcctcaatggagggttagagccacacatagactcagtcctagaaatgatagctctgaaacttcgagaacaagacgtcccccgttggagagaaacctggattcttatgaggttactccaccacctcctcctcccatccctactaatgaccaaatcatgggagagcttagagacgtcactctgcaatatgttagttgtgcacacccaactgaaagcgctgcaagaaaacgaagagtttttcaaggagaagaaaaaggactcatggcagaaacagcttctataatgctggaagctgcactcatctcaaaccaaaattaccttgcctctgaagatcttccaacacaagataatctctctcagtaccaagacctacaaagtcatccggctgatcagactacaagctgtgttgctcctgcaaaaaagaaaagaggacgtccacctttagctaaaccccaaaacaaagctgctttaccattgctgggagcaaaatcaagcaaaagaaagggacttatccagaactcccctaaaaggaaatccacacctgagaagaatgaagctcacatacaagaatctgctggccctagcagaaccacgaaaacaaagcaaaagcttctcctccaacctggagcctccaacccttcctcaagtcaacctactccacgagtaactattatacctgcaagagtgaaagataaggtggattttcaccatctaccaaatcagattccttaaaagttctgagctggaactgttgtggattggggagccccacaacagtacaacggctgcgtgagatgcattcttcaatctcaccagaaattctgttccttatggaaaccaagaaccccaatgagacaaccctcacctctttaaactggatgaatttttctgcacatcaccttgttcccccgcatagcccaggaggtggtggtctggcccttctctggaaacatgaagtagaagtgacaatcctttattcctgcaacaactttattgacacaaagattaaggcggcgggtaaacacttctttgctactttcatctatggggaaccagacagatcaaagcggaaagctatatgggatcagcttaccagtttagggaaagatagaagtgaaccctggtatcttactgagaattcaattatatcatagattcttctgaaaaacaaggaggacctgcaagatatgaaggaacttttgtggacattagatcatttatggcggaatgtgatttgtatgatttaagacattcagggaatttcttatcttggcgtggaaagagacatgatcatgttgtgcattgcaggcttgatcgtgcattgtccaatggagcgtgggctgaagattatcctgctagtagatgcatttacctttgctttgaagggtcagaccacagaccacttcttacccactttgacctgtcaaagaaaaagaaaaaaggagtgtttcgttacgataggcgtctaaaaaacaacgatgaagtcacagcccttgttcaagaggcctggaatctttatgatacagacattgtggaggaaaaaattagcagatgtcgtttggaaattgttaagtggtctagggctaagcagcaaagtagtcaaaaacttattgaggaaaatcgtcaaaaacttgaagaggcaatgtctagtcaagatcacaatcaagagctgttatcgactatcaatactaatttgctcttagcatacaaggcagaggaagagtattggaagcagagaagcagacagttatggcttgccttaggagataaaaattcgggttacttccatgccatcactagaggtagaacggtgataaataagttctcagtgatagaaaaggaggatggagtacctgagtatgaagaggcagggatcctcaatgttatctccgagtattttcagaagctattctctgcaaatgaaggagctcgagctgcaaccattaaagaggccattaaaccattcatctctcctgaacagaatcgttctctgatttaattgccttcagcagaggaaataaaatctgcttgtttttctatccatgctgacaaagcacccggtccggatgggttttcggcgagttttttccaatcaaattggatgactgtgggtcctaacattgttttggagatccaatccttcttttcttcatctacccttcagccaacaatcaacaaaacacatatcacactgattcctaaaatccaaagcctgaaaaggatg

SEQ ID NO: 12976 - DNA, 3000 bp, Unknown
  misc_feature (1)..( 3000): cDNA_ID_3027296_gDNA_ID_2214585_Annot_ID_186626 3000 nt of promoter + ATG
ttatctttttatcgtaacttttggttaacattgacggttactctttatatttgtcattcttcagattattgtttcatgatgaatccaaaaaaaaaaccttaaaatgactagaaattcttgactctctaatctaatctgtttctaaatatacatcaatttaatatcaaagaaattcttctaattcttgatctaaccaaagatttttggaatgattataacaatggtgaagttttaatcaactctaaatataaaattctaatgaagatgccaacaattttcttctcagaattgggcggattatacagtgaatttttttatttaactattgtatatggtaatagtgatactttctgtcttaaggcaatatatatgggttgtatacaacgaaatattgatgctgcgttaacactattacaaagtccgaatatgagaagacatcctcaagcaatatggctatatttttcatatgtgttgggcgctttaaatgtggtaaacgtcaaatgaaccattttaaatggtatagtaatccagaaatcatctccgttattaggaaaaaagcaatgattccaatacgtcacatgaatattcaaggaagaagtttttttagtcagttaatttatcaatataagtataaattcatgaaatcttgtaaatgcttatttgttttttttttttttttaacactcactatgctttattgattaacagagtcaacgtacagagcagttgcaatacatggtgggattaaatggtgataaaagaaatcgatggttgataaacgttgattccgtgcaagctgatctgctgctttgttagctgttcttgggacccagttatattcgacaccttcaaatcttcgttcccataacttgatctctgttacccagttgaataagtcaaagcgctgtgcaggagattgaagaagagacactaagaccatgtttatttgtttgttatagatgtaatttacgtcatcaaatattgtattttctcaaatctatataatataatctgaaaattatccagattgacttaaaactgggcaataataattaaaatgactctcattagtgatagataactagactaacacaaattttatgtaaaaagacaatttgaccttagatgtccacatttaatgttttagtggtaaatatggtaactgttctaataagtctgtcattacatggaaaaaaaactgtcaccattgtaaatattattatagcaaacaaatatgcaaaaaaaaaccataattgatttttgaagttatagaatttttatatatttgggttgactatgtatatttacggtataatttttaggtgtcaggtttagtatttaggatatagaaattagttttgaatattaaatttagttttagatttgtggtatttttgaaaaataaaattcattatagtattttttggaaaaactcattttagtagtatttaaaagaatttcaaaaaaaattgacaaaaaaaaatcaaatctgtcataatatgattttccaaataaaacaaatgttacaatagttagtattattctatgaaaaaaatcatggaaaaaagaaaactataaatcggtcaccataaggatttcaaattacaaatctgttgtaacataaaatatttttaaggtcatgccatcaaacgacagatttatggtaatataagtttatctgtcacaacataaaacaactctgtcataacacaaaatattatattttagaaaataaatctgccatcaaacgaccgatgttgtgtaaaattgcaagaatcttttataacataaaacaagtctatcttaacattaaaaaaattggttatcgttagacgtcattctagtaattaactttttgacaacaaatgtgttacaatgtgacagaattttttaacaaaattataaatctgccatcacttaacgtaaaaaaaacatccaaaaaaataagtctgtcaaattatatgaaagtctgtgattgaacagtgggtaaaccatatataaaaaaaattatatcctgaatttatttgtatttccaattactcaaaaaagcaatgtatctagatcatctttgaatcatcccataaatctaaaactggtgttgtcattattcactaaatcgacttccactctttcttacagaaatatgtttgataatcaatagaaagagatacataaatgagaaaactacgaactctattatgattttaaacgatattgaatatacaagaaacttaatttcgagagaaacaaaagagacaaattaaaataaaaacctccaaagaactaataaaatcgtgtaaaaaaaaatcaaagcttttgaaacgtaaattagtaaatttgtctgtaacgaaaaatattccgatgaccaccagcacggtcaccaacttttctccctcttccttcgcctccaccgccattaatagcaggttcatactgtcgaaccgactctgttttttcttcttctcctcctccgttgaaaatttataagttatattcttattgtgaaagtacagaagtacccacgaatctgacttgacttttgatccttggcttttcttcttcgtcctcgaagaatttctgaaaatctcgtttcatacaaaactttgattcacgaaatctcgagtattcatcgtatcttgtgtaggagtaagcttgactgcttgagtgttacttgagatttaagttgtttagttttgagaaagattaagtttaattccttaggagttatcttaggatattattaaaagttatctaatattaatccttgtgtgtttaggtttagattattgatctctatataagagttaccaaagttgtggtgaaccttaagagaatttgagattgtgaagagatcaatagctttacgttttgagtgagttttctaaagaaattaaagagagttattctttattttgagttcttaaacatttctctaaaacaagaattggtattagagctttaaaggttcaatcaaaccaaccaatccattaagagagaaat

SEQ ID NO: 12977 - DNA, 3000 bp, Unknown
  misc_feature (1)..( 3000): cDNA_ID_3027300_gDNA_ID_2214585_Annot_ID_186625 3000 nt of promoter + ATG
catgtctcaccatagatagtttggaatattcattaacggttattttttccgttagtgtcttttatcgcaacttctcatacaactgtattttttatctaaacagttgtgtctattaaaatattgacagttactcttttacattcgtgtcttttaatcgtaaacattagattactaattaaatatcggaaattttgcttaaatcaaaaaatatcacatttaatatcaaattttttatagattactaatttactactcgaaattcaaatactatcgattaatatttaaatgtatatatattacatccgtctatttaggtgggctttatctagataagatgaaagtacagttttacaagttacaaactcatatgattgtgccacgtgtcaaatataacgatcagatgttttactgtatcactaaaaatttaatttttttatttttttttttaaaataaaaaaactaaaaaagtaaacaaatttacatatactaattttattatatatatatatatatatagacaaatattttgatcaacctaaaggaaaatttacaaatttgttactacatgtgttattggtcgattaaataagtctaaaatgtattaattcaaaatagaatcattagtatgaataatctatactatataaaagttgaagctatttgcttataaagacgtccacataggatatagaacgactaatcggggttggacatgtcattaattaacatttttttaccattttattgattaacttttataaattttacgaattttctataataagattattatatggaaaacaatatatatggaaagaagagatatgacaacttttgaaaatatagcatatggaaataagaaaagtgtaaaattgtttaggctatttgctctttacggcgtccacatagaattttaaacaactaattgcagttgaagatgtcattaattagcatttttagccattatgttaatttacatttttaaattttaacaaatttctatgttaaaatatttatgaaaagaaaaaaagatatggagataagaaaatgtattatttgattagtatattatagaaatattaatgtcattgttagtgtcactatgttagcttccaaataaattaaaaaaaaatcttaattctaaaataatatatataataagaattggaaaaaaaatcaaatataaaaataaattttctaaaactctatactatagaaaagtcgaagcttatgagcctctaaagacatccacataggattttaaacaacgaattgcggttggacattgtcattaattagcatttttagtcattctgttagtttacaattttaactttttaacaaacttcaatattaagatatttatgaaaaagaaaacaagatatggaaataaaaaaacgtataattcaattatataatgttgaaatattaatgtcattgttagtctcactatgttagcttccaaataaattaagaaaaaatcctaattctaagataatatagataattagaattggaaaaaaatcaaatataagaagaagttttctaaatattaacaaaaagatagtaataaacaaccgtgcagaaattttccggaagtttgagaaaattaaagtttaaacaaaaagaaaaagcttaatgacttaaagaaaaacttcttcttaacaaccatggaaattaataaagtcttaaataataaagcagtggtgtctatataaataaacatctatggaccattgatgatagtcgatcaaagattttactttgaaaagtttaaacaactaatttattgacttaactaagcgacctctcgacaaacttgaaaaaagcttttactaataagaaaaggaagaaacttttaaagaatcatatatatgaaagttgaacaactctctccatatgagtgacacatcatcacacaagaaaatgacatgtgtgattctacattaattaaataaaaagattaaaaactatttgaggaaaaattcttttgttgtattaaatccaccattaatctcactcttaaataaatattctaactatacaaatataattacataaaatgaatataactttattaactacataataacatacacgaaaataacataaattaataataaaaatagttaaacataattatttttaaacaaatttcaaacaacaaccaacaaaatgacaatcacaatgtgaatccaaactttaatcatgagcctatcacaatgttactgaagtacataaaacaaggaaatgattatttataatcgagttaggcaaatattaaaccacaaaaataacatagttacacagaattgtattaaaatatcattattgttgttatatgtattcataaagtgaaaaatattaaaattttataaataatcaactttatacacaaaaatatataaattgatatttcgagtcacaaatgaatctaaccataaaaattgtaactacatattatggatctaattttactaataatacaagaataaacaaatagtaaatataaattagcaaaaagaacaatcaatgtaatttttttttaacaattttcaaaacagatccacgcgtagcatgggtactcatctagtatatatgaaggtaggctatgtgaaaattttggaaggtaggctatgtattgtttaaacaaaatcataagaggatggaaagatacacccgttaaaaaaaagtgtgtgaaattttttttaaaaaacaaattatttctaactcttttttctcgatagataatcaagcctatggcgtcaatgtttttttgctgttgatgtcgatggaagtccatcacgagattaataatattttatactaacatatcttggcccacattaagaagcccaccaagattctcaagcccactataggcccatcagctttttatttcttcaattgagtttgacgtgttaactatatagccggaaggtaccaaaatacttttcgaagctttgacctaacttggagatgagagatttaacaacagcg

SEQ ID NO: 12978 - DNA, 3000 bp, Unknown
  misc_feature (1)..( 3000): cDNA_ID_2710119_gDNA_ID_2214585_Annot_ID_135334 3000 nt of promoter + ATG
ggatttcaatttccatctgaagaaatctgtaacctgataatagaggaagatatcaagtgcataatcgctcttttgtgtattaaaggaatttgttgggtcgtcatgctaatccacttggaacagaaggcagtttgtgtgtgggattgtgcatcagcttttttaacaaaagaagttaacaaaaaacatgttggtgcctactctattgttgtgccatacattgttcagaacatcctcagaaaagaggacatggatgtctctccattcagtattagagtcttgacctcttttcctcaacaaatttctaaatttctttaatatatcagagtcttgacctctattcctcaagtaatttccaaattaaatgcttaaaattcttttggtttttggtggtaggctcctaagattgaagattttggtatctacgttgtgaagataatggagtgctatacaatgtatactagtcattcaaaccttgagggaaatattattggaaacgcaaggaagaaattcgcggctaacatctacacagaattagcaaatatataggttagtatatgcttaaaccaatataatttcaataaccaatccgtttgaagaattaagaagttttgggttatattatcatttttcttttgaatagggtcagtcactatgcagaagtagcagattgctaataaaaaagagtggagtataagaaagatttagcagcttttgtttcttatttcataaaactttgtcgtttgaatattttatgaacatctgtatgatataaattttatgaaatttatttagtacaattactattgaacacaattactgtatgataaatatgctttttagcagatttttaaatgatgtacaagcttttttttaaaggatttaaaagcgttgaaaaaattgcagtaactgttattataaaaagatttacaactgtttttaaaaaaatttacaaccatttttaaaagaatttacaatcgtttttaaaagaattttaaagtgtttaaatttttttgaaaaaggtgcactaaaagtaattcgaactcaagacctataaaactaaaatggaaaaaaatattgatgaagtttatttagtacaattcctatatatggttgtctgggttagaaagtgcttaaagttgaattgaaaaggattcaaaaatgatttacaaaagcaattttaaaaggtttttgaaaggatctacaatcctttttaaaaggttttaaaagaattttaaagcgttgaaaaagttacaataatgttaacacttgtactgttagtaatttggcctaggccacttatttttgaaaagcaagccgttttagtaaaaattcactgaagcccaaaattcactaaaaacaaaaagaaaaggaaatcgtgaaagtaacaaaaaaaaaaagatgcaaagaaactgtcccttcaacaatttgaagaaattccgtttttccagcaaagaaatgaattgaaggtcacaatttatgacactaaagtttgatatttggatttgttcgattttgtttctttttgccgaatctcttctttgttatagcaatttctagggtttttggttacaaactacacaagtaaaatagattgatatttgggattatgaaagaattttagaaatggttttacaattttgatagattaatatttaaagtttgatatttgggtttcgaaaaacttttaaaaagatttctaatgccaattctcttatatgccaatcctcacttaatttatgggttaccagttgattagagctggtttgaaaatgttttttttttgtttctatttatggttgtgtgcttttaaaaaattttaaaatttttttgtacaagggttataaaaaagtctttaaaaggattatgaaggatttttaaaaatgattttacaagggtttttaaagtcctttaaaatgacttgtaatgactgtgttgtttcgaaactacacaagtaacatagatttacaatgatctacgtatacatttttggtagggtttttggccaaaaatccctcacctatttactattttcaatattagtctttacaaatttaatttcaatcaaatactttataactaaaaacttacaattagttgaattgcagtaattagttgaattaactccaataacacttgaattgaataactccaacgacacaaaaattttataaacagtttccatactcaacaatgtgcattcatgtcaattaaaattctcaattcaaatatatggtaaatatcaattggcatatacaacttgccctatataaacgaattctcaccacaatatcacattcataatagtcaatatatttaagcaataaagtttgcgtgattagctcacggactttctctgttcgtttcttcttaatagccaatatatttaagcaataatgttgcttacgacttgccttatacaaccgaattctaatcaagcaaaatcactaacataatagccaatatatttaaggaataacgttgactttccctatgtgtttttttcgtgtgtagctcacaactttccttatacaaacgaattctaatcacgcaatatcactaacataatggccaagaatatttaagcaataactttttcgagaaatgaaaagaaatttccttatgcgtttttttttctctgtgtagagcaaaaggatttttaacctattgttatctctataaatactcttttaacgaccggcacttctcatcatcacaaactccaatctcttactaattcattagcaaaaagcttacttcagaaaaatggtttccactttcgcatatcttaaagttgtgagaccctacaagacaagtggaaacagttcaccgcgagtaccggtgaaacattggagttggtcatttatgatgagcaagtaaaaaacagaccctccaagtatattctttacaaacgtaaataatgtatatgtcttgctaatgcatcgtatcatttttcaaaacatttgtaggggaagacacacatctgtgaaaaaggagttgatg

SEQ ID NO: 12979 - DNA, 3000 bp, Unknown
  misc_feature (1)..( 3000): cDNA_ID_2710111_gDNA_ID_2214585_Annot_ID_135336 3000 nt of promoter + ATG
gaagagttttttctttcttaatttggctcttcaaactttatgagtatttatttcctttcaacgagcattcaatattcttcttcatctgctaatacattacatacatatatttttatacgaaagacatagttcaaacatttctttattgacatagtaaattgtcttaatattttgggatgtactttgaagagcattttcatattctgttcatgcaccattatgaaaaaatagttcaaacttctttcatttttaaattctctaattgagttacctaaacaccatattgaggtgttattgtctgcttgcccgttcatttaccattttaaatttatcaacaattctctacttttttgccttcaatatataagacctttaaatttttgaccaaaatatctagttccagcactaatatttaatccgtggtatatattggcattgcacgggtcttttgaaaaatactgcgaattaaaaataaataaaaatcagaaatactattaaccattaaatattccaaagatactacaaacttgtgtttggactataatttggaggatggaggttcctaagaatataggaagaatttgcctcttgttgcttctttggttagcttttcactgggactcctatgttgttacaccttgttatgttatggcttgttgatccacaatgtccacaatgaagagtcactccttgtcttgtcaatttttgcattttctgaggaggttgatttgctcatatctctttcatcttcttcttctgtggtgactcatttttcaacttgattcttttctgcttctttttacgacccttatcccttgatggtggttgaactgtagattccctagattttccccaaaaatccattccatatactcccataagtgtctcactgtattgatttacccaacttgtagtcaaataccaatctgagacaacgaaatcttcaagcttcagctttttaccaatattatttgtagtacatgtcgacaaggtaatcatatcatactccacctcctacacacacatttctttgcattcatatcaactctaaaaccttttccatgctcagttacctcatataataaaatatatgttacatttaaaaaaaaaacaaatccttttttgttaaactatttttcgattgttattttaatatttacttcagaattattgaaaagtgataatctataatatatgttttgtaggcagaattttaaatttctatttaaatattataagtatttttcttgtatattccataaatattggatctttcatcatttaattaattttttgtttttgaccaaatttagattgatatcttaatgaattatttttatattcaagtcaagattaaaacaaaatctaaggtcaaaagtttttataaaaaaaagtcaatgagcggttgagtaaaagtggtgatggttgagaaatttttttgcataccttataaatttgtttttcattggaagatagttgtgatgatctatagtcgaatttttccaaatatcagagagctataatctgaatatgaaaaatttagttaataatgaaacataaaataaaacaaataaattaaattaaacaaaatcataattaaataatttatataaaactgggaagaaaacaatggatgtcttgttgaaagatatggatgatcttatataatgaagagaggatgtcgatttagggttaaaattttgaatcttctagtgaaatcttcttttaagctttgagagcaatgctaaaaaaataaatgaaaattttcattttcatatttgaatactcaatcaatgatcattcatattaaatatacataattataaatttgtggaatatgcttgttttaaacgattataatatcagatttagggagtataatcataatttttatatcatattcgaatactcaatcaatcatattaaatacacgtaaatagatcaaattaaataagattcgaaaataattttgtatatttaagttatgaattattttcaaagcggaaattaataaatgttatgaaaattaatatttaaatatcaaaccaaaaatgtattattttttaatgtttaaaaatatttttatattttaattatgaaacataaaagatggtttaattaaatgttattacagttatttatataaatttagaatatttaagccaattttgaattcaaacatattaattcgatatttataattatatatatatatatatatataaataaatcatatttgctaaattacattagaaaataatattttccgccaaaaaaacgtaaacccgtgattttcccgccaaaaacgtaaacctgtaatttttccgccaaaaacataaacccgtaattttcccgaaaaaaatgtaaacccatgattcttccgccaaaaaagtaaacccgtaatttttccgccgaaaacgtaaacccgtaaaagtagaatccgtaatgaaataataattattaataacgataattatttatttttgttttacaataataattaattaaattcttatttaaatgggttaacccatttaacaactcaacccatcacatattctcagtggggattcaaaacttcctaatggactcttcgccagcgatcaatattcgaagggaaggctgaatgtatactctagactagatattctatcctttgtccggaaggtttttgatgagacagagaaattcgattttattcttcagtcatgctttggatctctattccatttgtcggttagtagggttgcgacttcgggtaaagtcattcatgccttactatgtaggaagttggttactaagaaaaagtatgagttttggacacacccaatgtgattttcactacttgaatttgcttccctggctggcttgccttgtggggagtttccggtggagtacgaccctgaaaatactccggtttatgatgatggcaagaagagttaccggaacgagttaattggtccagacaagacggttacgttaggggatatatcagccatg

SEQ ID NO: 12980 - DNA, 3000 bp, Unknown
  misc_feature (1)..( 3000): cDNA_ID_2710107_gDNA_ID_2214585_Annot_ID_135337 3000 nt of promoter + ATG
aaacatatattatagattatcacttttcaataattctgaagtaaatattaaaataacaatcgaaaaatagtttaacaaaaaaggatttgttttttttttaaatgtaacatatattttattatatgaggtaactgagcatggaaaaggttttagagttgatatgaatgcaaagaaatgtgtgtgtaggaggtggagtatgatatgattaccttgtcgacatgtactacaaataatattggtaaaaagctgaagcttgaagatttcgttgtctcagattggtatttgactacaagttgggtaaatcaatacagtgagacacttatgggagtatatggaatggatttttggggaaaatctagggaatctacagttcaaccaccatcaagggataagggtcgtaaaaagaagcagaaaagaatcaagttgaaaaatgagtcaccacagaagaagaagatgaaagagatatgagcaaatcaacctcctcagaaaatgcaaaaattgacaagacaaggagtgactcttcattgtggacattgtggatcaacaagccataacataacaaggtgtaacaacataggagtcccagtgaaaagctaaccaaagaagcaacaagaggcaaattcttcctatattcttaggaacctccatcctccaaattatagtccaaacacaagtttgtagtatctttggaatatttaatggttaatagtatttctgatttttatttatttttaattcgcagtatttttcaaaagacccgtgcaatgccaatatataccacggattaaatattagtgctggaactagatattttggtcaaaaatttaaaggtcttatatattgaaggcaaaaaagtagagaattgttgataaatttaaaatggtaaatgaacgggcaagcagacaataacacctcaatatggtgtttaggtaactcaattagagaatttaaaaatgaaagaagtttgaactattttttcataatggtgcatgaacagaatatgaaaatgctcttcaaagtacatcccaaaatattaagacaatttactatgtcaataaagaaatgtttgaactatgtctttcgtataaaaatatatgtatgtaatgtattagcagatgaagaagaatattgaatgctcgttgaaaggaaataaatactcataaagtttgaagagccaaattaagaaagaaaaaactcttctgatccatggattcatgtccgtttatatatatatatatatatatatatatatgcatgtgaaagcagcaaatgcatgtagacgtgatggaggtttcacacagtttacactgtagccattacaataataaacaacaaatacttctggtaggagaaggatatttctcttttttttgtatcttgcaagagcctttggttcgggtactagcataactgtaaattctttcgatactcgaggtagaaacagatatcattgtagtatagacatttccttataatctaaagtataaaaaaattgtttgaccatcattgttactttgtctgtgttattatttgccattatatgatgattacaatatcagaacacgtaaatttgcggttatagcaatcatacttgttgagtgttgtagaggagttaaaggtgaagtgcaagaatgcgaagacaaatgtagaagagttggagagacttggatgcattgtggtccatggtgttaatgtgcactccatgagcatagattgcagggttgttggaacgattctatatgatagaatcatcttcaatttttctcatgtatggttttcttttggtcgtgagcatgagagctacatcatctcatatgattttttgttgtacatatatatatggtcgctgttattgtttatggtgttttaaacaaatatttccgtacttgtgagagaagacacaggaaacaccaaaaaccggtggaaggttttttcaggagtgctagagtgatgcttaaagaccaatatggagagattcatgtgactcataagatggttcactcatttaaggagtggaggatactggttctgggttttacatttggttttcgttgtcacagagaagtggaaattaacgcatgcaatatctaggttacactaataagagaggaggtggaagtgactatgactctagtttccctgttggacaagcttctactttcatgtttaggaaattctaaaggagagttgatatgaaaccactcattttgtagaattcttttaaattatatgatttgtttgtccaccagaactaatcaatcttatgagtatcataggtatctggatcatgtctgaataccagtaccacaagattttgtgtcataatgtatttcgagttttagaaaattaatttctatgtacttttaaaatttgttataaggcatgtccatggtttttttccttcttatgtatataactccaacactttatataactacaaatttaataatagatggagagacaaacaaacatagatggacatttttgggattatgaaaattattaagcaatcagttatttgggcaataaataaaaattaatggaggttatcctagctaatcataataataaaaaaaaagtgggtaatcttaggtaaattttagtatatgagtccatttacacataaatgattagattaattaggataacctcctttaattttaaattgggagataaatggaaaaacattgagataaaatgaaaactgttacaaataattgatggatgcccattataaggcctatcttctagaattctctagaattatttgtatctagaattttattttgtcaccaagtaaaattcttcacttgtactcctatataaaggaccctttattcattggaataatacactcattttgtacaatctctttctctagttacaacacgttatcagcgcgctttaaaagaaacaatgaatggtggagaaatatgcttggcagacaatgcaactaatcatactattttaaaaaataagagatatttctcttttttgaca

SEQ ID NO: 12981 - DNA, 3000 bp, Unknown; identical to SEQ ID NO: 12976
  misc_feature (1)..( 3000): cDNA_ID_2710095_gDNA_ID_2214585_Annot_ID_135341 3000 nt of promoter + ATG

SEQ ID NO: 12982 - DNA, 2637 bp, Unknown
  misc_feature (1)..( 2637): cDNA_ID_2712894_gDNA_ID_2214585_Annot_ID_135343 3000 nt of promoter + ATG
ccaggcactttctccaatgcagtctattagcagttggaaacttttgaaaaaccagatctcagctacctctttttactaaaacagaattatccaacagttccttccaaaaatggctttacacaacgggcaaagatggagttccagtgacctttttccggcgttttcaactgttttcacctcaccgagaagtggaggtatcttctctatgcatcccggtagtgtctctgcttttactctctaattctgttttgtaacccttttcaaacttttaatcatgtgtatccctgttatcctgtttgaaaccctgaaactgtttgaatctctactttatccctgatgcctctccgcttcaaaccttacgccctctgtaatcatgagttcaagaatcccctaccatctcaaaggtaaatgaatagagagagaactatccccaccaattcgaagaagaattcgtgcaccagaactggacacttcagacctcatcgaagctaattccctaactctaatggatcgcctcacaaacccatctatccaacgattatggtctctctttcctttcctctcaaaccggtggaatctgaaaggaaaagctacgggttcagatctgggaagaggctgcttccagttttgttttgactttgaagaagacatgcaaaaagtactagacaataagccttaccactatgatcaatggatggtcatccttcagaagtgggaacctacaatctctgacacctttacctctaagatccccttttggattgatatccaaggactcccaaaacattactggcaccaggatatgctcaaagctattggcgtagacttgggagaaattctggattttgaaataaccaattcttcagcaaagctaaaggtctttgttgatggcctgaaatcgctagtccttgacaccatggtagactttcctgatggcagcgaagctctgatctcgttagtctacaagaatctcaaaaattactgctcacattgcctaagacttactcatgaaaagaaattctgtccagatctggtttcagaaaatgaggacactacaaagttcagatcttccagaagtgaagaggcatccaaggatctggctagaaattattacactcctagagacaatttcatagcccctagatctctaagagaatcatctccctcaagagcgccttcaagaaacccttctattaatcaaagtcgttctcaagatcttggaaaagtaagaggagtagacctcaacttctagagaacatctatctcgccgagctggaccctatgaggagagaagacacagaaatccttttaaccctaacagaaggaatttaggtcgccatgagacaggagacaaaaggggtacctcaagatatcaggatcctattagagaggggccaagaagagattcttctcagactcctcaatggagggttagagccacacatagactcagtcctagaaatgatagctctgaaacttcgagaacaagacgtcccccgttggagagaaacctggattcttatgaggttactccaccacctcctcctcccatccctactaatgaccaaatcatgggagagcttagagacgtcactctgcaatatgttagttgtgcacacccaactgaaagcgctgcaagaaaacgaagagtttttcaaggagaagaaaaaggactcatggcagaaacagcttctataatgctggaagctgcactcatctcaaaccaaaattaccttgcctctgaagatcttccaacacaagataatctctctcagtaccaagacctacaaagtcatccggctgatcagactacaagctgtgttgctcctgcaaaaaagaaaagaggacgtccacctttagctaaaccccaaaacaaagctgctttaccattgctgggagcaaaatcaagcaaaagaaagggacttatccagaactcccctaaaaggaaatccacacctgagaagaatgaagctcacatacaagaatctgctggccctagcagaaccacgaaaacaaagcaaaagcttctcctccaacctggagcctccaacccttcctcaagtcaacctactccacgagtaactattatacctgcaagagtgaaagataaggtggattttcaccatctaccaaatcagattccttaaaagttctgagctggaactgttgtggattggggagccccacaacagtacaacggctgcgtgagatgcattcttcaatctcaccagaaattctgttccttatggaaaccaagaaccccaatgagacaaccctcacctctttaaactggatgaatttttctgcacatcaccttgttcccccgcatagcccaggaggtggtggtctggcccttctctggaaacatgaagtagaagtgacaatcctttattcctgcaacaactttattgacacaaagattaaggcggcgggtaaacacttctttgctactttcatctatggggaaccagacagatcaaagcggaaagctatatgggatcagcttaccagtttagggaaagatagaagtgaaccctggtatcttactgagaattcaattatatcatagattcttctgaaaaacaaggaggacctgcaagatatgaaggaacttttgtggacattagatcatttatg

SEQ ID NO: 12983 - DNA, 3000 bp, Unknown
  misc_feature (1)..( 3000): cDNA_ID_3027367_gDNA_ID_2214586_Annot_ID_186647 3000 nt of promoter + ATG
catgttagcacctactagccgttagggcaactgagtacgcaagatattagtgagtatagccagttttcacctattaaccgttatggttagctggtcttgatagagtttcgtatgtctgagaatttggaagtaaacaaacctagccatgttatcacctagattgagatctatcccttattattgaaccatgaaatccggagaaacccccgaagacctaacacttctctcttattgcttaccgtttactttagttacttgtcttttattttggttacttactgcatacaacaaccccgtctctttattttggtcctagcttcactctcttcttaaggatttctctgaactacttctctccttgtgaattcgatcctaaaatactactccgatatactgtgcacttgcagtagtcgtgtggtcattaaggtaaaagcctaaggtgagataaaacatgaatcaagctttttggcgcttttgccggggagagattgttagttccacaagtccaagaactagagtgaactctaggacactttgcttttaatttttgtttttgtttttctttgtttcaggacttaaacaatgaatccaagaaattatcccgatagctactaccctaatgtgaatcacggctcaaaccacttatcccatttctctaccggccactacaagcccgatgcatcccaaatgcatggcgtgacttggcaatcttggtcgtctaatggaggagcttacaggaccgatcattactctaatgatcaatctgccaccttcgttcagaaccggccgcaagctaaccgctcgattaacccgttccaccattgcgtctcatcacctagagatcaacgcgtgggaggacctcactcttctcatccttatggagttgcccgccatgaagatttcagctatgaccaatgatacttgcaagaggtgatgagtatagatgttcatccgaacaactatgcttaccaaactaatgagccctacaaaaatttcgaggcggaagataaactcattggtcatctccaagacttcgttgatggccaccaagaagacgtgaagaggatcggctcaaaaatgtcggagatgaaggccaaatttgaggagaagtttgatgacctcactaatcgactcgaaaatatggagggggcacttgttgagatcaacaacgctcttcttaaccaccaagacgatatccaagaccaatatacgagaatcgtcaatgtgggactcgtcgttgatacggttgagagtcatttagattggaagattgaggagttagaaaagaagctcaataactcaaatgagttttcggaatgagaagcaaccaatcttgccaagaagaagatgagtttcctaaggcccaatcccgatatgaggaggaaacgaaaaaggaaattgaattcctagtggaaaaatgaaaagacctaatttcctattccaaaaaaggaaatcttgaccttataaaacctctagggattcgtccctcgcgtttctcctcaataccaaatcgagcaaaaagataacttagaagaagaagaagtcgtcccttttgaagtagactcgatggccggacacaattctagagaagaaagccttaaaaccgaaaaggaagaagtttgccttgagagacaagtaaaccgattcgaagaactttccgaagaaagtgatgaactcaccaacttttctagtgaagaaggaaaagacgaaaacaagtcaactagaggataatgacacgaaagaagatgtaactttggaggacgtggttaggagacaaggcgaagttgaagaaaaacaagtcaagaatgttgaaaatcaatcacacatccgagcatcgcatagaagggtaaccatggactcttcaaggaaatacgtaaaattacttgataggattcttgatttggataagaaggttgaggacttatcagcgcgcattggagggaatgaacttatggagagcaaagaagaagactctagccctcatgtgctttgtgacgcggtcacaacctaccaagaacttcacgaccttgaagaaggagaatcgacgaaagggatgaggaacctcccgggagaacaagcgtttacaactggctcacccttctaaaggaccggtggcatccacgtatgatagattgggaagacttggagattttaactgagtcgttgctaagctaccacgaggtacacccttttctaaagcttgttcggcttaccatattgaccatttctttcttgagagttgtgaaacaagaagagaaataaaggaactatatgaggaagccctacaccacttgaaaccgttcaacactcttcaaaagatagagagtctgggaagattccttatgacttgttctatacgaggtgttgaattcaaagatgccctatgcgattccggatcatgcatcaacattatgacaaagtagacatcaaagaagctcgggattaaggagctacgacctttggatgtacagatcggacttgcggactcgtctttcacggttcctgaagggatagttcgcaacgtttatgttcggatcggaaggtgcaatgtactgaccgacttccatgtcataaaggtcgagaaaggaagacccacccagctcatactaggaagagcattcctacccatagccggcgctataatggattggcctaatcgaacggtatgcttcgccaacattgatgtcgaagtatttcacgagattgtaccatttaccccggccgcaagaaggagaaggaagtcatgtacgagaactcggaacaactacccgaggaattccaatccaagagagctcgcctagggaggaacaacccgtcttactacgcctagtaagacccaaacgtcgagccaacgacgttaaacaagcgcgctaagtgggaggcaacccactgggttactttttccttaggatttgattttgcttttgcttttgcttttgcttttgcttttgatcatttcagtatttgtttcagctttttataaaaaataaaaaataaatg

SEQ ID NO: 12984 - DNA, 3000 bp, Unknown
  misc_feature (1)..( 3000): cDNA_ID_3027355_gDNA_ID_2214586_Annot_ID_186650 3000 nt of promoter + ATG
cttgtgcctgaagcggtgaaacactaggtccctaaaaagggggatcacaagtaggacgagagaggtctcttgcggcccaataattggattttacagtatatttactagatttagtataataccagctgtcggcatcactcttgtaagtacgactcggcctaatccctaaaatgaaagtgatatcagaagaatcaaccaaggcttgaaggcgtgaattaggtcattaacataaaggtgtgaattccttatgttaagaatactttttgctggccttgcagggacagaaggaatccaaggatcttgccatacacgggttcgccttctagagcctattgttcgtcgtagacccgagagaagaagtggtttagctgccataatacttctccatccaaaagaggggcagttagtctttcctatatgtataggatcactatacctaaagtatcttcccttcaacacccgactaaggagacgattttgaaacctaattagacgccataattgctttgctaataaggcaagattaaattcttccgatgttctgaactctaggccaccatcagaaaagagtgtgcaaagcttatcccaagctatccaatgaatattgttgctttcttcccttgtcttccaccaaaaaattgcaattgcactactaagttttgagcgaatacctttgggaagaagaaagcatgacataacatatgtcggaagggcttgtgccacggaattaataagaacctctttgcctcctttagacaagaattttgatgtccacccatttattcttttttgaaatctatcccccacaaaggaaaaaacttggtttttcgaaccatgaatttgttccgggagtcctaaataggatcccatacccccattcttaaatattcgaaaagatagtttaatggtattccgaatagagctattcacctcatggacaataaaaaattaaagacttgttagtattcagttgttgtcctgaagcctcaccatatgttcggagaatatcgataatctcttttccttgtactgggcctgctttacagaataaaagactatcatcggcaaaaaggagatgagaagtggagggactagctcgtgagatctgaattccttggattaggccatgccactcagcatctttcaactttgctacaagagcttccatacacagcatacacaataacggggaaataggatcgccttggtgaatccctctcgaaggtttaataaaacctttagggatccatttaacagaattttgtaagataccgacgatatacagaagattatccaatctacccatttctgagcgaagcccatcttcaacattaaagcttgtaggaatgaccattccacgcggtcataggctttactcatatcagttttaatggccatgtacttcttcctacaagctgtattcgtgcaaaaagcatgaaaattctcttgagcgacaaggatgttgtcagtgatcaaacgctcagccacaaaggcggattgagtctctgatataaggtccgaaagaagacgttttagtcgggagcttaagaccttcgaaattactttgtaacttagattacaaagactgataggtcaaaattctgacatttttctaggtctttctatttttgggatcaagcaaatattggtctcattcagccgtttatcaaaaaagccggtggaatggaagttttgaacaagtctgataaggccaggccctgtcaggtcccaatattgctgataatagaaggttgtcatctcgtctggaccgggagctttatcaaggtttagtgaaaaagaggacgtttaacttcttctataaagttcgctttgtgagtgttttgttcatgtctttggtcactaacacgggaacttaccagagaactgagtaaaaaactcgaggatttgacgtagaaaaaagagtcttgaagtaatcctctgctaagtgttcgatccgcaactcattatccacccataggccatcttggttaagtaagcctagaattttatttctagcccttctttgtttcgtagaagcatgaaaatattttgtgtttttgtccccaagtaggagccatatctccctacttttaagcttccaaaaaacctcctcgtctatgtaagcctggcagagctttcattttagggcaagtaagtcttcagtagaaaaattctcatcttcgtatggtagatcaagctgagaatgtagttcaagaatgagcttctcggaatttgttcaattggatttttccaaatagaaatagtttgtctacaattcctaatcttttggaatattggaaagccctctccacgagaggagaaagcccatccttctttaacaaaatctttgaatcctggtttatctatccaatgtttatcaaagataaagtgtttataaggacgctgagatttattctaaatggatgctagaaggggtctataatcggaacccctcaattgtaggtactctggtgtacgtttacaagaaaacaggtaaaagacgactacaatcagcgacaaccaacgtagtcgtatatttaaacgacattttggcgacggatttacgactacagtgcgacaactcgaatatttgtagttacatagttgtttacttacgactaacatagatagtcggaacatagtcgacaagtaacgactatttgacgattatattatttaagggagaaggttgtcgttacgtagtcgctatttgacgactatcataccgtctatctaatttagtcgctaattggacgactaatggacgactactttacttagtcatcctgtagtcgtagaaacgtcgcataggagtcatataaagtaggtgaaaacgtgtttcgcattggtaagtaggtacacctaattatttagtggtagtcgtaaattagtcacaaaaattggcctatataataaactttcacgaaactcttctttcaccaacaaatcaaaacaacaacaacatcaaagaaaaaaaaaatttagttagtttattgtata

SEQ ID NO: 12985 - DNA, 3000 bp, Unknown
  misc_feature (1)..( 3000): cDNA_ID_2702702_gDNA_ID_2214587_Annot_ID_135356 3000 nt of promoter + ATG
tttttttttaataaggggagagaaatacttttcttttttcacattgctctcaatatcatgtatgaacaaggagtcaagttctattaacactaaccgtttgatgaggtaaaaggaagagcagtgagattagctccggccttaatggattgtgttggaaaccaggatatcctcaagtttgttggtttgccatctagattttccaatagtcggattgagtcgcacctgcagcattaatcaaccaggcaataatctaaagaatagagatcataattcctaacaaaattttgactcaataaaacgactcaaaaataaggaaaataagagtaagaataagactcaaaaaagaaaaacatagttagtaacttcctcccctagacttaaacgtcactgtccctagtggcattcaaatccggagtaagcgagaaaaataaaagaaaaacaaaaaaaataaaaggaaaagaaaaacaaagaaacattggtgatgatgatgccccagggaatcatcaccaaagacaagggatagtgcctccaccagttcagaacaacaactttgagatcaagagtggtctcatctccatgatccaaggaaacaagtttcatggtctacctatggaagatcccctgaaccatcttgacagctttgataggctctctggccttaccaagatcaatggtgacattgaagatatgtttaagctcagactatttcccttctctttgggagataaggcacaccactgggaaaagactctacccccagacttcatcatctcatgggacgattgtaggaaagcttttcttgccaagttcttctctaacgctcgcaccactagattgaggaacgagatctcaggcttcacacagaaaaacaataaaactttctgtgaagcttgggagaggtttaaaagctacaccactcagggcccccatcacggtttcaagaaggctacctgatcccgaaacttttgtagttagtgtcaccattaatcatgattcattcccaagagctttatgtgatctcggttctagtgtgaatcttatgcctcgttcagttgctatgcgtcttggatattccaatcttgagcctacctttatcactcttgtgctagcagattgttctacccgaatttcggatggaattcttattgatgttcccgtgatgattggaaagagtatgattcctatagactttgtagtcttggcttatgagaaggaacctaaggatccattaatcatagggagatccttcttgcatacagctggagcaatcatagatgtttgacaagggaggatagggctgaatgttggcgatcttactatgcaatttgatatgaacactttggtcaagaaaccgatcatagaagggaaaaccttcttgatagattctttcacttcctcagcttcagatagtatttcagagatggaattagaagacccactagagcgagttttggtctctttcatagaggatagtgcagatttggactgcgaaacttcaacatatactaagctgctagatgagaccgaacatgtgatgaaacttacagttgaagaagctcttccatctgtgacttcaacaccgactcctacttcagattgggatccagcaaaggctcctaaaatcgaattgaaaccatttccaccagggctaaggtatgcttttcttggtgaaaattatacttatcctgttattgtgaatgcttctcttaatcccgtagagctcaccttattgctaagaaagctgcgcaatcatcgcaaagctcttggctattctcttgatgacattgcaggtatatctccagatgtatcatgcataggattcaccttgaggatgagtctaagtcttcagtcgaacataagagaaggctgaatccgaatctgaaagaagtggttaagaaagagattatgaaactgttggaagcagggattatctatccaatcttagatagcagttaggttagtccagttcatgtggttcctaagaagggaggtgttacagtagtcaagaatgagaaagacgagctgattcctactcggacaatcataggacatcggatgtgcatcgattacagaaagctgaatgctgctaccaagaaagaccattttgccttaccatttatcgatcagatgttggagaggttagaaaatcataagtattattgcttccttgatggatactcaggattctttcagatcccgattcatccagatgaccaggagaaaacgacttatcagagaatgcccttcagtctttgtaatgctccagcgacatttcagagaggtatgatgtctatcttcacagatatgatcgaggatatcatggaggttttcgtggatgacttttcagtttatggatcatcatttgaggattgtttagagaatctctacaaagtgttagcaagatgtgaggagaaacatctagttttgaattgggagaaatgtcacttcatggtacagaatggaatagttttaggacacaggatttctgagcatggtataaaagttgatggagctaagattgaggtcatgacaagtcttcaagcaccggataatgtcaaagcagtgaggagtttccttggacatgttggtttctataggagattcatcaaagacttcagcagaatcgcaagaccattgactgctttactctgtaaggaagtcaaattcgagtttacacaggagtgtcatgatgcatttcagcagataaaacaggccttgatcagcgcaccaattgttcagccaccagattgggatttaccttttgaggtaatgtgtgatgcaagtgattttgcagatagagctgttctaggacagaggaaggataagaagcttcatgcaatctactatgcaagtagaactcttgatgatgctcaaaggaattatgcaactatagagaaggagttgttagctgtggtgtttgctttcggaaaattcagatcttatctcgttggatccaaggttattgttcacacagatcatgctgccttgaagtatttaatg

SEQ ID NO: 12986 - DNA, 3000 bp, Unknown
  misc_feature (1)..( 3000): cDNA_ID_1836462_gDNA_ID_2214587_Annot_ID_135358 3000 nt of promoter + ATG
agagtaggaacagatggcttaatacaggaggccgaaacacaagatacttttactccactactaaaacatgatgagtacgaaatagaatcttatcaatccaagatgaagcatgtgtgatacatagaggagatcaaaacatagcaagggttgggactaataactttgagaatatgtacacttcaatgcctgtaagagaggctaactacaatgacgcttttcaaggatacactagcaagataacatcacatattaacaatgatctcacaagactaatgactgagcaggaaatcgaagaatccatatttgcagtggaaccattgaaagcaccaggctcggatggtttcactggcgagttctatcagcatttttggtcgaaaataaaaggctccattattcaagaggtaaacaacgtttttagagaaaacaagctatacgagaatcgtaaccacactaatctctgtctcatccccaaagtggaagccttgtcaccaatgggtgatttcagaccaatagctttgtgtaatgtaagctataagataatctctaagattctgggtaatcaactaaagaaacatcttagaggagtgataatagataatcaagcggcttttgttctggggcgaatgataaccgataacatcattatggctcatgaagtttattatgctctgaaagcaagaaagggtcgagcgtcctcaaacatggcaataaagaccgatattactaaagcctatgatcggttggattgggattttttggaggaaactatgaggcgaatgggatttgatgacaaatggatatcttggatcatgacctgcgtgacattagtgagacactcggttttgattaatggagcctcacaagggcactataaaccggaacgaggtatacgttaaggagacatactctcaccatacctttcattctgtgtgcaaaagtcttatcgcatctgaagaaacaagcagaagctacgaagcaactacaagggataaaaatctgcaacagaagtccttctttatctcaccttttatttgtagatgattcgttattcttcactcttgcaaattatcgatctggcatggcaatacagaatatcctaagtaatatgaggaggtttcaagacaggctgttaatttaagaaaatcagctataacctttggtcgacttgtgaagtcaaatacaaagagacaaatccgtcatttactaggaatcaacaatgaaggaggtggatgtaaatatttggggcttcctgaacagtttgatgaaaagaaatcagaactttttcaatacatcgtggaaaaggtgaaggaaaagactcaggaatggagcaaaatgtttttatcccatggaggaaaggaagttcttctcaacgcagttgctcttgcgattcccgtctactcaatgaatgtttttaagttaacaaaggagatttgtgaaaagataaatggcatataagcgaagttttactggagctcaggcaatgacaaaaaaggtatgcattggttctcctggaatcgtctaagcttgccgaagagagaaggaggtttgggattcaaggatctaaagaattttaacttggccttgttaggaaaacaagcatggaggatcttagaacagcctcattgcctgatgtcaagaatgctaaaaggaagatacttcccagacactaatatcatggatgctaatcaaggtcagaaggattcttttatttggaaatcaattttgcagggcatggacctactaaagaagggatttcgctattgtgttggtaatgggactctagttaatgcgtggttggatccatgctgcccattcacccgccgagaccgccacaaaaaaactagggatgccctagatcagcatatggttagtgagctcttaaactcaacacgcacatattgggatttcatcaaactcgctacttagataatacttgatgatgtggagaatgtcaaaaatattaaagtttgtgcattatacaaagactgacattatacaaagactggcatttagactatgaaatctgcatatgttatacaaacatatgttttgaaggagataatcatgagttggaatcaattatcaacagaagaagtccacacttttgagtttcaattttggatatgagagattcgagcttagaaacaaatatttctaggaagcaaatttttatgaataggaagaaaacacaacaaaccagcggatattctcgtaaagcagcaatgacctcaaggaacaaaatttatctttcataatcatattctttatgtaattcataatgctatgtgtttgtatcatacgttatttcaatattaataagaagctacaattcaaaaaaaaattaaaaccaaaatctacaccaaactttttttttttttttttttttttgtcgtcctacaccaaactttttaaaaccgaaaatacgaacttaaaaaaccaattatagtatactttttttttgttccgttttaatttttgttttatttcgataaatatctctggcgtagattagcgagagaggtttagctgtcgttttacattctctcaaagctctctcttttatagctttccaataacaaatcccaaatctgattctttcagctaaaaatcttacatcaatcaatcgaattgtcaaaaaaagatatcacaacccttcttctgaattctcatttcttaagcttatacacttgaaatctccaaaaaggtaccatttttatgactttgttatctccgttttgtgttcgttgtttgcgattctcaattgggttaaaagggtttagtcgttaaacatttccatcttcgtttttggacttgatgtgaatttaaagttgggaccttttatgttttgatccaaagaaaagaatctgcttaattgttgttttagtgtcagatttgtttcttctttgatgcaggggaaaaagaaaatgagttaggtgaagtttcagaaccatagagacgacgatttgatcgttgcgtaaaccaaatgatataaagcaaaag

SEQ ID NO: 12987 - DNA, 3000 bp, Unknown
  misc_feature (1)..( 3000): cDNA_ID_3027424_gDNA_ID_2214587_Annot_ID_186675 3000 nt of promoter + ATG
aatacgaagcagttgagtataaatttttcgtgccgaattgtccgcttttacatttgcattacaagatattaaacataaagagaagattgtgaattgttccttgtagctttggaaatcctccaaatatgctgaaaatgctaattcttgattgtcggcaccaattatacacttcatcgccgagagtagagcttcaacttctatggagtggagatagagttctacgcagattggctactcctatggttgacgactctccatttgatgagatgcaaaaccacccttatccacaaaacttatcgcttcttttccatgatccatccacaaaacaacaaaatccaaaataaatattattcttaattttagttctctataatgttttaaatagtttgtattaatgtactcttaactaatttatcatctaaataatttatgtttcttttttaacttctaattaatcagttttcatatttggttgcaatggaaaattaaaatataaaagactcctaagttgttaaaaactacatcaaatctcatagaaaataaatatctaagagtaagaaaaaggaatcaagaaggagcattttcgtcatactagaaaatgaaaaagacactgaacctatgtcttgcccgatttggagagtactattcggatcacataattgtcaaataccgctatcaataacagaaaagtagccaatttaatctaaaatagttaatgagatttcaacaactaatatttaaattgattcatattggtataataggagtatattccaataacaaattataaaaatttaatgtactatctctctttgaacatatttctaaatagggaaaactaggaaaaatgatatctaccactgttttgtacatattttatttttttggtaaaaatgtcaatttggacaaacataaacctatactttattttaagttgttttcaaaaaaagaaaatcacaataacatgtagatatacaagaatagacatgttatgaagtgaacttttattggttttattgaaaatgttgattttcttatagataaaattttgtgtaattttgttagaacatgttttctagagttctatgaaagtaagagtgtgtattctacatttttgtacacgttttaacaattttagatttgttttctgttcttaataattcagaagtccgaatatcaaatttctaaaatatttgaaactggcattatacgatttgttctatgctccaaatttctaattacttcataatatgctattgttagaattgtaggggatgtattataataatgattttggaaatttttgctttttttttgtaaaaatcacacgttatgcaattagtgattttaaaatctcatctcaaatttcatgttattgaaattgaaatttatgtaaaatcatttcaaatctcatgttattcaatcatgaatttcttaaaaccataagaaattgactgttattcaaacaaccaaatttgttttaaaaaatattgaaaaatgatttggtgagcctaagccctaaggatacctttttagtgtaaaaataagaactaaacaatcacacctctagaggtggtatttgatttttttttgaaaagaactaaaaacatgtggctaacgaaactaaactattgaacaatctcctctcactacaagaaaacagtcattttgcgaggaacaattacgagggaattgcaggtattttgctacaccacggacgaacgttgctaatccctcgcaaatattgcgagagtctgcttcctcgcaaatattgcgagagtctgagtactttgcaattaacgatatcaaccctcgcaaaccactcgcaataatctcgcaaatctttaccctaaaccctaaaatacatagaagtgatttgggatctttgatttttatttataaatgtaaatctaaatgactgtataatcatacaatttgattatatggtgatgcacaaaaatatattgtatatgtttcaatatcaacatttcatattgaagatgttaaacacttattattcatattattgaaaacacataagttcatcattgatgtatttgggaaaaatgtacatttgaagtttttgagatgaaattagattctaatgtagatatttaacttcctaatgattcagaataactaatccgaataattttaagtagtgttttcttgtattttttcaaattgactcaacaatgcgaggtctttgcgagagatttgcaagtctgtcgtagcagttccctcgcaaatatttaccataaaccttaaattatttaaaatatttagtcatgtttttatttgctgagagtcttattcgaaataggagaatctaaatcagatctgattcaaacactgaatcaaaatggtgagttaattggttgaagaattgcgagggaattgctagacgcaatcgcacttccctcgcaaattttaccctaaaccctaaattattaaaaatcataaattgcgagggacttggtaggagttctcgcaattccctcgcaatatgtggtgcgttttaattggtttaaaaatcttcctcgcaatttcaaagcaaactatgcgagggttttgcgaggaaataaatttctatatatactcgaagacctagtttgagtgaagctcaaaccagccgcatcaaaccctaaccctaaattttttcttcttcttctctgatctcttcggcgccggagctcttcttctccgatctgattccgtcgccgcctctcttcttcttcttctctaatctgttatactcatcgccgcctctcttcttctccgatctaattacggcgcagactctcttcgccgcctctcttcttcttcgatctgtgctccagaaccgccgcggctcttcttctctgactcgatctgtttggcctcaaaggtaacctctgtttctccgatctaagttcttctctcaaatctgacctattcttcttcgatccgatcttacttcttttttcccagatctaacacttgatttgttttttgtgcaag

SEQ ID NO: 12988 - DNA, 3000 bp, Unknown
  misc_feature (1)..( 3000): cDNA_ID_3027434_gDNA_ID_2214587_Annot_ID_186672 3000 nt of promoter + ATG
tattatgagagggtaatgatgatgatgatattgtgttgataatgagtaaattgatgggttgatgaaaccatttggaaaaagattgattacactcaatcggtttagaaattttggtacaagtaagatgtcattttttgttctctaaagtctaattaaatttatctttctggtatggttattcgattctccaataatctatgtttcaattttcaagttttgaaaaacaaacaaacataacttttagctttttatgcttctttaacatattaatcaaatatgcatgtggaacattaaaatcaaagatgataactccatataacatattcttaagaatctacaatgactttaacctcaccaaaattagcacctggtgatttttaactctttttacttttgttttttattggctcttctaaaaagatgttcgtaatgcaaaaaaattagcttccaaaatttataaaagctatatagatcttacttaaaagatttatcaaatgcattgagctcttaatcactttctaatgaattcttttgttttacatatatcatgaatcatgacaaataacattcaatacctacatacaacttaacaaaattacatttaaaaacaaaaaacccgcgacttggcgcgggtttcgccctagtatggataaagaccctttggaagttttacgtttagcggaaaaagaggcacttttatggcaggaagcgcaaattaagcttcatgttgaaagccatggtcatttgaatttcggagctcgatctcgggtaccactacaagaaaaaggctaaattccaaccgccatattagttgttaatttgtaggaattatatgtttccaataaacttagaaaagaacatatatttgttggaatatgatcgttggaaatttgtatttgtcacaaatttattggaaacgtttccatctaataattctataaccaatttgttggatagttctgatattttttttattgaacatttgttggaatttaccgtaaagtttctaacgaattgttccaacatatattttgttggattgtcattaataatttgccacaaatattcaacaattctgaaggtttgtttatgggaaactactaataacatatttgttggaactttgttgaaacgttttcttggaatcgtgtgagaaatatctgacgcttcattttttggaacttcatagaaatatattgataatttaattgttgaaaatttattgatatttttcattgtaaatttgtgaataacttctgataatttaattgttggaattttatcagaaattactttttgaaaatatgttgatatattttactaagtttccaacaaaatgtgtgatgaaccatttatcaacttttgttggaatatcacatgttttcttgtagtgggtgagggatatctcacaggatactaactattcaggttttcgttgttttgttgatggatcatggacagaaagtgatcagttttcaaggtaaggatggtgttgtacatattcatcaggagagtcaccaaccatgggcgccgataatattcgtagaagtctatgtcctctacatacagaagtggaagctcttctttgggcgatgaagtgtatgatttgagtagacaaccaagacgtagctttctttatagactgttcagatttggtgaagatggtgtcttcccaaccgattggccgacatttactgtgtatttggaggaattgcaaaaagcgacaaggacgaattcacaaacttctctttatctttaatttctcgtagtgctaatgtaaaagtgaataatttggcgcggaagatccgcaccgaatcgcatcatgtcatatatgtaaataatatcccccgagattggctcgtttgatctttaattaattttggatgacaaaaaaaagaaatttgaagctcatgtggcgtatgttttaaaaatgctgatgtggacacatagagaaatctcaatgagcttcttttattagtagtagattatttattgtaaattatgagaattgttatataggcaattttactacggacaatttatttcagcccttgttagatccacgaaagacgacacctttttctgtttctccatgctttggatggtcaccttcaattattatctctgcgtagaatcctggcgatcggctataattttacatagttggagatctcctgcacacttgtcttcattgatctgcaaatctgctaataattctcaatattttggatacgtacttcatatatctagatgtagaagcattaatgaactattggtcaaccaatagacaaagggttccacacttgccaaaataaacaacattccaaaataactctctaagaatttgtttaccaaaatagctaagtagcaaaataaacaacatatcaaaataactactaactagcaaaagtagaagacactccaacatgactcactagccaaaataattaatatcccaatagtttaatataaattaagattaatatcaccataaatgtataaattttcattatattacctaaaacacacagaattccatcaaatgttttgacttcaaattttgtatgttattttattgacaaaaaacagattcaaacttatggatttaagaaggaaaatcacgaaattcgaatataatataaatcacgagactcatttgttgtttttaaacaatataaaaagaggataatgcaaactatatatatccattcaaacaacataaatcatatttcagtttctaagaggtttttctcaactctttattgcttactcaacatttcaattgtgtttttgttctcctttctctataaactgatgacaacctcgatgtcgtcactattcaaaacaaaagatctttgattttaattgttatattattcccatttttctatttgatttttcttttctgcatgtaaaaaaaatgagttatacgtagaaacatgacttgttttatataatgcagatttaaattctattgttggttttcttcaatccctgaca

SEQ ID NO: 12989 - DNA, 3000 bp, Unknown
  misc_feature (1)..( 3000): cDNA_ID_3027442_gDNA_ID_2214587_Annot_ID_186670 3000 nt of promoter + ATG
tatacaaaccatcatacagtcaaacacagtacaaggattcatgtttgcaaatcggctataccaagagggtcttaagtgcagctccatttacaaactcaaaaatgtggaatggtgtaatacttcaaatgctatcaaatatctcttcaaatatttcataaaagaaatgttgtagttcaacaatttcaatcaacaaaggcaaaaccaccacctccaatactcaagatacaacaagggttgaaaaggaaaggattgtagttcaagagtagagtattttagatttctgcttgtaggctatgtggcatacacaaaataagcctaaaataaagattttcattatgtcgacttttgactactctttcactactttagttgcaacacatacatttttcaatttacttatcacaatgatgaaactgctattcaaaattcatagctaacaaaaataaacctaatctaactcaaaaattgctcacaacgaaatatcaaaaaattcgttacagaaattaccaactaactacaaaaaaaaaacgaaaataaacaaatcaaaacaaaaacccacaaatcaaataacaatattactaaatggtttcgaacaaccgctaaacaagaaaatcattttttttatttttatcgacgaaattcttatacatttaaaatccatttcaaaacacattttaaatagatatataactcataaaatgacaataaaaaaaattggcaaacaaaagaccatcctattctttgaaaaccaatgtaagagttggcctcaagatacaccatcgcatcagctaacttaaaaagttctaaggagaagcaacatcggataatatagaattcacgtttgactctaaatcatgtagcaacatcaactaaattaatttgaagtcttccttaataaaatatatcgtgcgtagtccggatttttccctagttttgggaatcaaaattaaatgttagttgatggatctcgattagtaaattccattactattggttttgatattactagtcaataatttatttattttggaatacacaagactataaagtataggaatataagtaacatgaacataaatcttcagaatagttactattacaaattaatatgtagaaattagaagccattaatgaaacgatgtcgtgtctttgtaacttacaaaccaagaaaaacgataatgggcttataataataaaagcccaatatatatcttcataagttttgttaacagtctttgtacttaattttctcctcgagagctaagattagaaatgacgaaaacgacgatgacgaagattcccaatcttccagacgatttggaatcggagatactctctaggattccggcaaagtctctaacgaaattgaaaactacttgtaaaagatggtacgttttattcagagatccgaaattcgcgaagaagaacttgggtaaatcagcgagagaggtgatgttagtgatgaatcaaaggttacactcaattagcgtcaatcgccatggaattcacgagggcgttgatccatccatggagttttcaggtaaactcatccggctaagcgattcgaaagacgtcgtagtatctaaaatctatcagtgcgagggtttggtgttatgcaccacatatgggaacaatagacttgttgtttggaacccatgtacgggtcaaagaaggtggaacttgttaccggtataatgatggctatgctcttggatacgttaacagaaaatcttcgtgtagctgagtttgaaatctttgattttggatctgattgtggaagggttattgatgatgctatcacttggggaatattctctgctggtgtgtctttcaatggtaatacttactggattggtggagagaaagaaactggttttttcttgatggattttgatttcacaacagagaggtttgggcgttttcctcttccgtatcagagttatgattatgaagatatcgcggttctatcggtagttaaggaagaaaaactctccttgatgaatcagaatattcatataaattcttcagagatgaagatatgggtgactaataagtttgatgaagccaaatacttgtcatggagccagttcttagtagtggattttgataaatttacgttaccaaatttgaacagcgtgataactttcttgttggacgaggagaataaagtggcactgtgttgtgatacagacatggaagatgaagagaggaccaaaatctatattgttggagtggatctttgtaaacaagtctttaaagaggttacaaagggatcagttcttaattggccatgtttcgtcagttatgctccaaatttggttcacattcagaaagacactcccaaagttaaaaagaaattgagagcaaaggaggtaagtctaatggatcaccttagtttctttttgcttttccttgtggtcatgtttctttgaacgagttagtcaaactttgttcctcttctttgcttttgaaattgattggtggtgatcttatgaccttactcaaataagttctgtttagattggatgctgattgagaaaaacagagcagttcccgaagattaaaacatatgagacttcatgattcatagcacataaggatagtgttcttgtcaagcaaatcaaagagctttttgatatgtatatatcgttgttgtatatggtctcgggttagaattctctttaactggatctctctgtgtgtgtgatgttttacaggcacggactagacgcaaacttggcaagaagccttaacgcaagcaacgtgaaactcaaatccaaggcatatccaaataatatggtggagtaaaggaaaacacaatttttcagtattgatcaacaagtttgcttgcaactatgcgtgcagtcttatactaattgactattatacactctcgtctctatttataccaacttctaaaccctaatttatgtttgcagtattgtcgctttcttcctaggaaggtcagacgagaaatcatcataagataaacaaacaatg

SEQ ID NO: 12990 - DNA, 3000 bp, Unknown
  misc_feature (1)..( 3000): cDNA_ID_3027463_gDNA_ID_2214587_Annot_ID_186664 3000 nt of promoter + ATG
agttctatcagcatttttggtcgaaaataaaaggctccattattcaagaggtaaacaacgtttttagagaaaacaagctatacgagaatcgtaaccacactaatctctgtctcatccccaaagtggaagccttgtcaccaatgggtgatttcagaccaatagctttgtgtaatgtaagctataagataatctctaagattctgggtaatcaactaaagaaacatcttagaggagtgataatagataatcaagcggcttttgttctggggcgaatgataaccgataacatcattatggctcatgaagtttattatgctctgaaagcaagaaagggtcgagcgtcctcaaacatggcaataaagaccgatattactaaagcctatgatcggttggattgggattttttggaggaaactatgaggcgaatgggatttgatgacaaatggatatcttggatcatgacctgcgtgacattagtgagacactcggttttgattaatggagcctcacaagggcactataaaccggaacgaggtatacgttaaggagacatactctcaccatacctttcattctgtgtgcaaaagtcttatcgcatctgaagaaacaagcagaagctacgaagcaactacaagggataaaaatctgcaacagaagtccttctttatctcaccttttatttgtagatgattcgttattcttcactcttgcaaattatcgatctggcatggcaatacagaatatcctaagtaatatgaggaggtttcaagacaggctgttaatttaagaaaatcagctataacctttggtcgacttgtgaagtcaaatacaaagagacaaatccgtcatttactaggaatcaacaatgaaggaggtggatgtaaatatttggggcttcctgaacagtttgatgaaaagaaatcagaactttttcaatacatcgtggaaaaggtgaaggaaaagactcaggaatggagcaaaatgtttttatcccatggaggaaaggaagttcttctcaacgcagttgctcttgcgattcccgtctactcaatgaatgtttttaagttaacaaaggagatttgtgaaaagataaatggcatataagcgaagttttactggagctcaggcaatgacaaaaaaggtatgcattggttctcctggaatcgtctaagcttgccgaagagagaaggaggtttgggattcaaggatctaaagaattttaacttggccttgttaggaaaacaagcatggaggatcttagaacagcctcattgcctgatgtcaagaatgctaaaaggaagatacttcccagacactaatatcatggatgctaatcaaggtcagaaggattcttttatttggaaatcaattttgcagggcatggacctactaaagaagggatttcgctattgtgttggtaatgggactctagttaatgcgtggttggatccatgctgcccattcacccgccgagaccgccacaaaaaaactagggatgccctagatcagcatatggttagtgagctcttaaactcaacacgcacatattgggatttcatcaaactcgctacttagataatacttgatgatgtggagaatgtcaaaaatattaaagtttgtgcattatacaaagactgacattatacaaagactggcatttagactatgaaatctgcatatgttatacaaacatatgttttgaaggagataatcatgagttggaatcaattatcaacagaagaagtccacacttttgagtttcaattttggatatgagagattcgagcttagaaacaaatatttctaggaagcaaatttttatgaataggaagaaaacacaacaaaccagcggatattctcgtaaagcagcaatgacctcaaggaacaaaatttatctttcataatcatattctttatgtaattcataatgctatgtgtttgtatcatacgttatttcaatattaataagaagctacaattcaaaaaaaaattaaaaccaaaatctacaccaaactttttttttttttttttttttttgtcgtcctacaccaaactttttaaaaccgaaaatacgaacttaaaaaaccaattatagtatactttttttttgttccgttttaatttttgttttatttcgataaatatctctggcgtagattagcgagagaggtttagctgtcgttttacattctctcaaagctctctcttttatagctttccaataacaaatcccaaatctgattctttcagctaaaaatcttacatcaatcaatcgaattgtcaaaaaaagatatcacaacccttcttctgaattctcatttcttaagcttatacacttgaaatctccaaaaaggtaccatttttatgactttgttatctccgttttgtgttcgttgtttgcgattctcaattgggttaaaagggtttagtcgttaaacatttccatcttcgtttttggacttgatgtgaatttaaagttgggaccttttatgttttgatccaaagaaaagaatctgcttaattgttgttttagtgtcagatttgtttcttctttgatgcaggggaaaaagaaaatgagttaggtgaagtttcagaaccatagagacgacgatttgatcgttgcgtaaaccaaatgatataaagcaaaagatgcaatcgagaatcgtcggattagctccggcgttttctctcttccctaacctaaacacacctcacaaaaccttcactttccatcaaatcttagttctcatcatcacattcacagcctacgcttcctttcacgcttctcgtaaaccaccaagtatcgtcaaaagcgtccttggtccaccttctcttaattcatcttcaattgataatggctgggctccgtttaacggaacccaaggaaccaagagacttggtgagcttgatttggcttttctttcttcttatgctttgggtatgtattttgctggacatttaggagataggattgatttgagatactttcttgtgtttgga

SEQ ID NO: 12991 - DNA, 3000 bp, Unknown
  misc_feature (1)..( 3000): cDNA_ID_3027479_gDNA_ID_2214587_Annot_ID_186660 3000 nt of promoter + ATG
aaaggaaggagatcttatagcaattataggacaaagtgcgatctactccctcgaaacgcccggctcgtgaatcaataaagacgtcaagctgcaagatcatccaagtcaatattaacatgccagagccatcccgaacagtcggtatcggaagagaactagagggggagatgaaggaaaagctgattgccttcctgaaatcaaggtcgtccaccttcgcttggtccacaaaggatatgactgggatcgctcaaaaggtaacctgtcacaaattcaatatggatccgacttttaaaccagttcgccagaagcgcaggcggttgggatctgatcgtgccaaggctgttcaaaacgaggtcgaaagactgctgaaggctggtctgatcaaggaagtccaatattctgaatggctagccaacccggttgtagacaagaagaaaaacgggaagtggagagtttgtgtcgattataccgatctgaatagagcgtgcccaaaagacagttatcctctcccacacatagaccgcctcgtagaggcgactgccgggaatcagcttttgtccttcatggacgctttcttggggtaatatcagatcttgatgcataaagatgactgtgagaagaccgcttttatcatagatcgcgggatctattgttatatagtcatgccttttggcttgaagaatgctggggtgacttaccaacgattggtcaatgaaatgtttgccgaactgttgggagtcacaattgaagtttacctcgatgatatgctggtgaaatctttgcaggcggaagatcacatgaaacatcttaccgcgtgttttgatatcctcaacaagtacgagatgaagctgaatcctactaagtgcacgttcggagtgacatctggcgaattcttaagatacatagtcaccgaacgaggaatcaaagccaatccaaagcagatcagtgcaataatcaaactaccgtccccctagaacaaaagagaagtaccaaggctgacaggtcgcatcgcagctttgaatcgctttatcgcccgatcaacagacaagtgcctttctgtctacaaacttctacgtggcaataaggatttccatttggatgagaaatgtgaaaccgccttccaggagctcaaatcctaccttatgagcaggacgatcttggccaaacctgaggttggtgagactctatatatatatgtctcgatgtcaagttcggcggtgagtggagtgttagtaagagacgatcatggtaatgaaaaactggagaagctagcattggcagttataaaggctgctcgtaagctctgaccctacttccaatcgcattctatagtggttttcaccaatcagccactttgaacggtacttcataacccaaaccaatccgagcgaattacaaagtgggcgatcgaaataagcgagtatgatgtggagtttcgttcccaaccaagcctcaaatcacaagtcctggcagatttcataaccgaactatctccatgtgtgatcgatgaagtccctaaagaaaactggatactctacgcaaatggctcttcatcactacaaggttacggtcttggaatcctactccagtctccgaccagggaggtgcttgaacagttgctccgacttccattcaaagcatccaacaacaaagcgcagtacgaggcacttctcgctggacttcgcctcactgaagggattggggccaaacaaatcaaagcctttagcgaactcaactcgtagtaagccagtttagcggggacgaaagaatgcgagcttatctttcgttggtccaagatatgtcaaaatagtttcacaagtttgacctgattaaaattctttggagagataactcttcaacaaatgccttagccgctctagtcttgtcgagagcataagcaaaccacgtatcaaactaccaattttgacatgcgtcatcgtggatcctataacgaccatggatgtagatgccgacgcaaccgacacgccatatatcgaagtagacttggaaccttcagcaaaccgacacgtctacatcgccgactttgtaatctagctcccgttagcaaacctggatggaaccaactctaataagaaatggctcctccacgtcgacggctcctccaaccgacaatgacaaaagtaggaatacaactcacctcccccactggggaagtcatcgaacaatcgttccgactcagattcaacgcatcaaacaacgagtttgagtacgaagccctcattgctggcattaagctagcccaaggaatggggatccgcgatatacacgcccatagcgactcccaactcatcaccagccagttccacggggaatatgaagctaaagacaagcgcatggaagcgtacctcgaactggtcaaaaccttgacccaacagttcgaatcatttgaattaactaggatccccagaggagaaaacacctctacagacgccttggcagctctcgcttctacgtcagatcctttcgtcaatagaattatcccgctcgaaggaatagaacacacgagcatcgacctaacggtcaaacatgctgggagggaaaccttggcaacttacaacttcacgcgagtaacccgaagcaccactgccgcagccagagctctcgcagcagctgcggaggcaagtgcaacggaggaggagccagagcttgaaacccccgaacaacctgccccgtacaaacctgaaccctagaacgactggagaatcccaatcatcgattacatcgaaagagggatcacacctcccgacaagtgggagaccagaaaactcaaagcccagagtgcaaggtattgcatcatggaagggagacttatgaaacgtagtgtcgcaggtccctatatggtgtgtacctacgggcaacaaataaaagacctcatgaaaagcatgcacgaaggacaacgtagcgtcgcaggtccctatatggtgtggacgtaccctcgccctcagattcaaaaagcaaggctacttctggccaacaatg

SEQ ID NO: 12992 - DNA, 3000 bp, Unknown
  misc_feature (1)..( 3000): cDNA_ID_3027483_gDNA_ID_2214587_Annot_ID_186658 3000 nt of promoter + ATG
catgtgcgataagtgccaacgacacgcacctattctgcatcaacctcccgaggaaatatcctcgatatcttctccttacccgttcatgaagtggtccatggacgtcttaggtcccatggaagcttccggtgggaagtagagactaaaaaacctgctggtcctcaccgactactctaccaaatggattgaggctaaagccttccaacaggtaaccaagaaacaagttgaggacttcttgttggaaaatatcgtatgccgtcatggcataccatatgagatcgttaccgataatgggactaaccttacctccggaaaaatcaaagcattctgtgacaagtggaagatccgtcttaccacgtctacccccaatacccacaaggtaacggacaggcagaagccgccaacaaagcgatacttaacaacatcaagaaaagacttgattccaaaaaatcaatgtggtcagacgtacttcacggagttctctgggcctaccgaactacacctcgcaaatcaacgcaagaaacaccgttctctctcgcctatggtttagaagaagtaatcctcgtcgaaaccatagtaccaagcgtgagaaggaccgccagtcctgctaactcagacctgtacacgcaaatgttacagtacaacatggacttcatcgatgaacgcagagatcatgcagtgatccgagttcaaaactatcaacaagctgccgcccgctactataactccaatatcaaaattcggagattcgaagtgggagagctcgttctacgaaaagtgtttaccaacacgaaagagctaaacgccagaaaacagggaactaattgggaaggtccctatcgaatcaccgaggtggtacgtgacagcgtctataaactcgaaatgccatgcatctcaagaaataccacaaataggtactcaaaaataatcgaactacgataaggcttgatcccttggcagggtacgtaagcaactccccccaagagcgcagccaccatttcaattgaactacgataaggcttgatcccctaaccaggtacgcacgcagttccccctgcgaacgcagccaccgtcttaactcttccgtttgaaacagtttcttcaacaaggaaaacaaacattacatcttccatcaaagaaggttagctgctcacctaacagttcaaccacccctcgataccaagaaggtcccttccaggtgaccagacaccagatcgtcgtttactttacctcatttgtactcaacaattttgagataagaataaaagaaaattttgatactcaatatcatgttttgcaaaataatcgtttccactacgatttaaacctcattcgtaatcttacgatacccaaagcccaacatccgaatgttggtggatccactttgtgatctcgcttccaaaaagtcaacagtgaaccttacctataaaaacacatcacttcgacatcatcggagctcacctactacaaccatatctaactccttccttcgctatcaacacataacatactaaacaaggaagaaacgaaggtttcattcgcgatctggcgataccacaagcccagctcccaaaatctggcaggtcccttgtgtgacctcccttcaacaggttcccgagataaaccactcaaacttactcaagtttgaacctacgaagaatataccatatcatatccgaaataacttggactttaaacaagtccaattattattcggaacatgaacaaaacgaggtgatcatacaccaaaatcgataaagtatcaacacacgaataaaagacaaaaagtacttgttaaaagggataaaagccttcctaggcatcaaagtacttaactgaacaaaggataaaagccttcctaggcaccaagttcaaaaagaaacaaacaaaaggatgaaagccttcccaggcactatgtccgaaacaaaaaacacaaaagcctaaaacgaggagcgtaagtgatcactccttcagttccccggccggcgtggcaaaaacagtaccagaaccctccgcgagacctctaggaaatgcatctttgttgctcccgaactcatccaagccgattggcgttccttgcttgtcgacgtccatcggacctaccaccgacatctccaaaaccggcaggatatccaacttacttagagtgacgtctgatacctccttcgatttgcactgcgcctccaggccatccagctccgcttgcaaccgaggtctctccacggtcaaatcgatagcagccttcgtgatctggtcgatcaaagccaggttcgactccacctcggccgcttgaccttccaacactgtgtactccttcttggcgacccacttttccttgaacccagctagcaacctcgaatacgcaatggccagttcaagctcagcatcgtgaaccgccttctttgctccttgcgcagtcaaagtcaggtccatcacccttttggagagctcctccctcctctgctccaaacgatgaatctggtttctcgctgtctgcttgtcagcctgcaatcccccgatttccatctccatgagcccgatcttctcagcataacctttctcgagatcttttgttggagctggattcccctccaggaatccactttcgaaaataccaaagaaagcccacaaagcccaccaagcccaccaagtagaggacctacgcagctgatgagcccacatacgcgaatgggtacttgggcctgataagcacggtcacctaatgaagggagataagcgaataacaacctaggaactaacgaggagatattcgcggagcagacctgatatctcggaaaagacgtgccgaatatccaggagaatctccgcagatcccggacctgacggagctacctatataagggagcaaggacgacttgtaaaacacattcaatccagctttacattcacacacatacttctagccctcctttctcataatctcaattacaaatctctactccgcgacctgccagcgaactggccgagttccacacaatg

SEQ ID NO: 12993 - DNA, 3000 bp, Unknown
  misc_feature (1)..( 3000): cDNA_ID_2710154_gDNA_ID_2214587_Annot_ID_135360 3000 nt of promoter + ATG
tcgtgtggagatggagagggagaaaaaaataatttaatttcaatggcatgattgtaaattaaatgttttggtgaggcttgacaaatcaatcaaatagtaatctacagaaaaaatcattattttgctaattgtaaatattaaaattactaattctctaattatgttgagaaatggttacttatgcaacatctcataaaatttgtgatcattcttttgggggtttggttgtaattgattatttttttttagtatcatttttaggtggttaaaaaaattttcgtaaataataaaccgactaaagctgagatatgtggattctatgatttcagattatgattcaggagataagttttgaaactttgttattgaaaaaatagaacgggaccattgcatgagatgcatctcgtgtaacagtgttatacgatacctctcataaaaaaggatagtcaaccctttaagtaacacgttattcaattaccataaataacaacttgccaagatacctctttttcctcctaaatttactagaggaaaccaggttacgcccataaatgtttatatattttttgtagaagcattttaactttgtacaaaaaaattgtaaaacttgtttttcttaaacattgggagaatctgtatcacttagactaaataatttgattttttatatttttgttgactgtatagtttatgaatccaaaatgacatgacaaaaaaaaactaatacgaaggagaaatattatttcaattgcttctttatattttaaccttctttcattaaattttgcattatttctcatatagtttttatataattcactgtctccggcgctgatgtagcagttgctcgccggcgtcgaacacagtcttctctttgttgttccgctcttctcccaaaaaatcaaaacaagtctagtctcaatcttttcaagcctctagtctgtcatcttcgtctccttccatctttaatctcgctgtcgcgtcttgccaattgtagatctgttagaatcttttctctgaagatctttggctcagcgtaccgggccgacgtactttgcctcatttctgggagaaccaacagctacttcgttaccggctcatttttttccgtttcttccctagccacgcgtttcatcttttctggttaaagccggtggttgttgtttcaccgaccttcctttcggtgatctctgccatctattgatctcaatggttaatgatttgttcgcctctgtcacccgccgccgttgcatgttctcgacctcgtttgtattaggtcagatccctactatacaactttggaagaagactttagtttgggcatggcccatcttgggaccttttgggtggtgtagaggcccgttaagttttttgggctgctttcttttggcctgccctaatgttttgcaatgctcattatttgcacccatcactatcttgggagaccttcgtctctccctttgctacatgttatctgccgcctgtttcggcactcaacggttcatcggatacttctccgggttccatctgcttataccggatacttcttcggcaagcccattttgcttccgatcgagaaccacatatgttggtttggaacccgtcaatcttcggcgaagtttgctcaatatggaatgataaggtacactaagtgtatgtttttttttatttgtggtatatgtttttttttttggccaaaaaataataattgaaacttttaattaatgaaatctgaagatgacgtggcgtatggagagagtgttttagaaacgctgatgtagacacgtggagaagcttcaatgagctttttttattagcagtagattattgattgtaaattatgaaaactgttatatatccaattttaccacggacaattccttccaaccattattagatccacgagagatgacaccttattcttcttcttcatgctctccgttattaaattcacgagagacgacacctctttctccttctccttcttcatgttcttgatgatcaccttcaatgatcctctctgcatagaatcctggcgatcgtctataattggagatcgtctataattgcctccattgatctgtaaatctgctaataatttgcctccattgatctgtaaatctgctaataatttgcaatatcttggatacgtaccccagatatcttgatgtagaaacattaatgaagcattaatgaagcattaatgaagcattaatgaagcattggtcaacaaatagactaagggttccacacttgccaaaatacctcaatagcaaaaataaacagcattccaaaataactctaagattttttttttaattttttttttaccaaaatagttaagtagcaaaataaacaacataccaaattaactactcactagcaaaagtagacaacactccaacatcattcactagccaaagtaattaacatcccaataatttaatttaaattaagattgagtcaatagcaaaacttaatcaccttagatatataagttttcattatattacctaaaacgcacagagttcaatcaaatattttgacttcaaaatttgtatgttattatattgacaaaaataagattcaaacttatggatttcataaggaaaatcataaaattctaataaatgaggataaaaacatgagacttatttgttgttcctaaacaatataaaaagagggtaatgcaaactatatatatatatatccatccaaacaacagaaatcatatttcagtttctgagaggtttttttcaactctttattgcttactcaatgtttcaattgtgtttttgttctcatttctcaataaactgatgagaacctcgttgttgtcacgattcaaaacaaaatatctttgatcattataattgttagtttttccatatttctaaatttttttctgcatgtaagaaaaatgagttatacgtagaaacatgacttgttttttatgatgcagatttatactcgattgtttgtcttcttcaatccttaaaa

SEQ ID NO: 12994 - DNA, 3000 bp, Unknown
  misc_feature (1)..( 3000): cDNA_ID_2994483_gDNA_ID_2214588_Annot_ID_135363 3000 nt of promoter + ATG
tataaagcaattcataatttgtgaacttgaccaagattttagcacgatcctcgcttcgcttcttgtctcccttgtgacgcatatctaatataaacataaattcattatgtatcatgtatgtatgatcttagttctatattgacgcaagaaaattcaagtatttgttcacttcgtgctacctatgaatgtacataaattttttttaaaaaaatatttgttactaacgatcatataagatagtattaagttattcagaaaacataattaaaatagaaattgaaggtgtaggtgtgtggtttagtcatcgatatagccaaccagtgacaaccacctcgactctctttgacctaattatttgaccactccttccactttacatcataaaatctgaaaccacttaccatctctcgtcacatagctagcagacgatcgtcttcattatgtggttgtgactctcattctaatgtaatcctggtaaaaatagcatgcgagtgtcttatcgatcctcgttgtttatatgattaaatcatttattataaaataaacaaaacacaactaatattttttgcattaaaaatttaaaatattttaggaggagtgattgtttcgacgaaaatatattttatatagtatgaacatgaatgagtaaaaggtaactcattttggtgtgtgtgtcaaattttgattttaagttttttttgtttgtttgttaagtgtatcaacgaatctctagttctagctttgataccaactgaagtagcggaagttttaatggatagaactagacatccgttgattcctcggaataccagaaaactagaattttttggatctgttgattcctcagaataacagaaacgagagaacgtaaggaattcgttgattctcttcgaataccgaatcctacatctttttataaccgttgaaatctttcaagatctaccgaaagcaaggaattagagaatactcttctctgaaaaggtaaaagcttaattttattaatcaattaactgaatacaattttaagttcaaaagtcttaattataataaatccaaaattttagaaaattcataaaacaataaataaaaattatctaaataattaaataaaaatatgaggaaataataaagacaatttgaaattatccaaatatatactgcattaggtagcatgcggcttgcaagactatagtatttgttttagaaactataggtctattagctagacagaattaagagctatagaaaagttgttaaaattgataatgcgatgctttttcacataactcaagaaaaccaaatcaagttccgatccatcattgtttgtcgaccaagggatgatcagtcgataggtccacgtacgttgttgtttaaatgaaaatagttaacatggatgtaaatttaataagtaaacaatgaaaatgacaaatgaagtagagaagatggagaaaacaggaccaagggcttgtaaaagaattgccaaataaacaacaacgtggtcctatcaccttctgcttctccctacgcaccaaccagtcaaccatactcaataggtttcattacaagacaaataacacactctcttttgtcttttctcttttttcgaatgggaaacactgactagctttgtttgtatatttaaatcgtttctaacagagagagcgtggcgaagtgtgaacacaaacacctagaaagatctgagagtcaattcttctgggtgacatatgcatgtgaactgtatgaagacgcgttttggggtttatcgtttaaaaatcattagatatgtgactgaccaaagtgttaatcaaagatctgcaccaacaccttttacatatactatattctaatacgtagaggcagcgtagaacactctagaagaagtactaggtgaattatgatcgatatgccattcatctgagagcagagaatggaactttacgcatgtttaattaaaacaactttcaaacttgtcttaaaatatgaaaattactagttcctactctgattaagataagattggcattatattcatattcttgtacctaatatataattgaagcacttgaacatatttagtcatatagtcttgaattttgttgttgtttttccctttttttgtggggtcaaactgagttgctgtaaatttgaacatacatatgaatatgcatttaaattgtggccaacagttttagaaaactgttatcaaatcaaagatactttaaaaatacaaaaaagtagtgtaagatacaagaaagaaaaagttgccactttctcatgtcgcatatatataacgtttctcggaacttgcattttctctcttcttgtttacaccttcctcgcctgttacgagtaacaccaatatttggacttattggatggttgccttaataaaaaggaaaaaaaaaaagaaaaagacccaagaacaccaaagctgtcgtgggctcttattgtttatctgaaactaagccctattactattgggcccaaaaatcaattacgtaaaagagtttgcctgttatataagttgtttactattgtggcccaacagataaaaaagggaatatccggcccattctctttcatcacactccttgaagaggtgataggtcatgtaatttgattaattaagaaaaacgattgagttagacgaagaggcaatggtaggagaaggatagtttgggtagacgaaacggtagagttttggttattctcagattcttgttgttgagagactgatgaactactagaaaaaattaccagtatctccctcaaggttaaaagcgtcatttacggtaaattggggaataaaatggtaaagagaaggaggctttttggtggtgggagtaggtgatgccaaagtagacgactactaatagtagtaaacaaaacctttggctttaacactctcctccaaatcccagatctctctctgtctctgtcccgcggagtccccgagagattgatcaccatcacttttgtaccttccttgtactacctatg

SEQ ID NO: 12995 - DNA, 3000 bp, Unknown
  misc_feature (1)..( 3000): cDNA_ID_2710222_gDNA_ID_2214588_Annot_ID_135365 3000 nt of promoter + ATG
ggatatctcgtgtggatgactactggcaccactggcaagatgtcttcgcaggagctctcattggcacccttgtagccgccttctgctaccgtcagttctaccccaacccttaccacgaagaaggatggggtccctacgcctatttcaaggcagctcaagaacgaggagtccctgtgacctcctcccaaaacggagatgccttgagggctatgtctctgcagatggattcaacatctctcgaaaacatggaatctggcacttccaccgctcccagatgatcctcctctcttattatttgattcattatttggtttttcattttgatttggccgtcgtcgtgagattgtgaatggtgtagctacatactgtatgtgtattcaaaactctacttgtaccattacatttttgtaaatccactcttcatgaaattgacgtttttctggtgtccgagaggcttgggtcgctcgaataatctcgtccaatagactaatacggctctagtgaacacggtatttacatgtttgtgatctaaactgaaatcagttatttcttaattcgtaatcattcttgggttaacattttctcttataatctgatggttgaagatggcaaagccattgttagcatagccatagctggttcaatcatccacaacactaaattactcgagctctccacatgcgtaatctctctttctctctatttctcccttcgtttctctcattcttcttcttcttttaatttctgggtagctattattttagtgtagaacaaagtttgacacttgtgcttacgcacatgcgctgccaactatgctgcaggtattaaatcagttctgaaaatattgaagcacaactggaaaccgtttcttttgtgcactcaagatattaaaatggttctctgtttctgaaaatattggaacagaactgaaaactgtgtttttgtcatgctagcgtattgttatattgtgttttattgagcaaatgatgatactagcaattcaaatttcatctcttctctttgttattatgaatttcatgcttgtattggaagacattattttgcaaaaatttgatttttgtttactcaaggacccattgtttcttaaccattggagtagaaatttgttaaagactcttattagtttcttaacttacaaaaagcaaaattttaataaaaaaaaaaaagttaaggatcatggttaaggacctaaccaatggggatggtcttagcttctgatctcactggtctttgttcgattgaatcaatccaagtttcgtaagtggtgatggtaggtaatcggagcagcagcgcatgtaaccatcggcagttgtcgaaagcttgtatagtcacatacctccctcatcgtctcttctcagtgtcgccaggtaaatcttctcaatcgtttcttttgtatattactcatagagtcgtgcgctgtctctccctgagaaggttcaatcgatttcttccgattgatgattgatgtatcataatcagaacaaaggttatatttctgaattggatgtgtctctgaaattatagcggatgttgtatgtatgggaacacaagagaccaatgatgatgctaatgtttgattgtcatcattgattaagtgaactaatcaagcagaaccatgatttgttttactttgttggtgctagtggtttggggctatctctgtttctaattcgtatatatgttatggaggttaagaggactcttcaagctttatgggcacttgggtttcttggttctttggctacttgtgcagcccttgctagaccagccggtgataacttggttcattatgtcgttgatcatccatctgctgtttggtttgttggtcccctttttcaaagaaggtaaatatcttgcttctgcataaggcttcagataatgatttattgttcttaatcaatgagcatatatgatttatgtttgtggtctacgaaattagtgtatttttagatgtgttatgtaatgttgaacaacatcactagatttgttttgtgtgtctcatgttagaggatttttggcttcggtttgtttgtttctttcttctgaaacacttttgtgtcaagtctttaatcttctctgtctctctaatgttatgaagaaggagagttcaaagattgtggttatataatgttttagcattacgagtggttaacaagagttagttaatgtgttataaattctgttgcacggatgagagtctgataaaatggaattcaaatcagagaaaccaggttcagtttttcctctcaatattgcatcaaatcttttttagtttgttttggatagcaaatctttgattgttagtctcgagactaacatgattttgtggatcgtggtaacataaccacaaagttgtctattttatgatttgaacattctacacagtcatcctcatcagtggcaaattaaccaggtttgtgtatcaaagagtaggccatgttctgagtatcttcaagaagaggatgatgtttttttgtatagtttttgtctttgatatgttttcaaatgaatcttgtatactttgtcatatttattgtcatgaatctttgttattcaaaatgtgtttatcaaaaatgtatcaaattttttgtatagtttgtcttctctatctttcttttcaagcaatctaaactcaaataccaaaatattttttcaaatttgtctttcttaagaattcctactattggacatgaatatttttgagagtccctaagctagtccttagctttatatttgtcaaaatttatattagaaaattcttaaggattccttaaggatcttaaccattggggttgcttattagtttttttatattacttgaattacatatttatttagtttaaagaataaataataataaaaagacagtttggaggggtatgtaaaaagtaatataacagaaaaataaatatcttgtctgaatcagagagagagctctcaacaaccaaagctttggactctcaggccaggaagactatg

SEQ ID NO: 12996 - DNA, 3000 bp, Unknown
  misc_feature (1)..( 3000): cDNA_ID_2710168_gDNA_ID_2214588_Annot_ID_135369 3000 nt of promoter + ATG
tgggacaaatgaccaaaatcttacccccagaaaatggataaatcttacagcacaagtgcccatttataagctgctctagttcttgttcttcagtaaagtgggtttcagactcataaggcacctcagactcggtcaagccagagtcaagtgtcccagaaacttggcatgccttggccatagcctaagataatgaccagaaaaggttttaacaactcagtccatgatgaacctcagaaaacaatgcgtttggagaatgtggaaattttggattaaaactggcctagaagaatatatagtctaaataatacaaaattatgaaaaagaaatgtctgcaggtacttgtttgtaataccagtaaccaaactaacttgtcactattcctaacaaaactagagaaaggaaaatcagatagcaatggcctaggcagattagtaccaggttgtaattagcttagtaacacacctggatcagtgcacagcttgacaccttatcttcttcttctcggctccgtaagttctaaagttttccacaataagaataacatacattgagtagttgatagaaaagagtaaagcaatatgggagagagaaggttgcagcaatcaccttagttagagtgactgaagattccaaaatccggtcggatgctctcatagacaaaaagaacctatactctcgcgcaacaaacaaaaactatgagtgacagaaagaataaagggccatgctagagaactagcttattgtgatagctttcatttcaagcaaacaagtatattactataaagagcaggaaacaaaattgcataacctgtgatctccacgcttaggacgagaagttaccaatgatcccgtaaacccgacaccgagaaccggatatcctatccacaagattaaggaagttacaccaatccacattactatattccaggacttcttgctaacaaaggatggtgaagtgaagaaagagagcaagtacctggtttagagagcttaagcgcccgattgtaggctaacaaggccatctccttggccaatgcttggctacagtgttggctcggaacctaaaagagagcgaacgaaaatcagctgattaatggagagaagagaaacatcgattgctataatgaaattgagaggtttatgaacaaaccctgccgagtaattgaaccatagatactctcgaataaggaaccacggactcgagaagcgtgttcgacgctccaggaaccgacatcaaccaacctaaagcctgaaagagaattcaatttcgatcactcaaaagcacagagcaatcacatacttgtgtatatacgaatcaatcataaagagagagagtgaaaccagagaggcaccgccgcaaagatagacgacggcctgcgtcggagatgagtgaatggcttcgacgacggtacggatcgcagcgtctcccattgtttctctcggtttcgtctcctcccattgccgtgccagcaaaaagccaaattaagccccccaaagtttccgtaatttcaatttatccccaacagtttccgtaataacaattcatgcccaaacgtttccataattacaatttatgcccaaaataattttatattgcactaaaacccaagttgtttgatttactagtatgtagcctcggagtcgtcgccgttagtccgtgaggagaaaataggcccactctggcacactctctctgggtttaggtttaggtttttttggggctctctatcctaagaaactaggagacatcacacttcaccaagtctacttatcgacaattttatcgtatcaccataacgacaataagggccggactaatgtttgtacacatgtcctctccttttacccttttaaggctttagctaaatctaaaccacatttataatcgtttattatatgaatcttcttcttgcgaaaaaacatgtcaagctactattctaagtaaaataagaaagatgagctgtgatttatatggtaaagtaagatataaaagaggtagtactagtactgtaaaagcagactcgaggaataaagaaagcaggaagagcgtggtggtatcttgtggcacctttcttctctagtaaactccactgttatgtttgctctctcccaatcgtaactagtttgttcaatgctcatttgaaactacacttgttactacttgttactacacttgctacactctattaatatgcatcacttggtattttatggagtttcgtgctagagcaacatcatctaagaaataaaaaatgaatgatactactgtagtagtaatatattgacaagatagattaatagaaaaggacaaacactgtaaatgttacctacattgacacttgacagatcaatcaaaggaccccaatatattacttttcggaataaaacaacaatcatgacaaaaggtattacaagatgtaactatttgaataaagatatctgcatttgtaacattttgtatataggagagattacaaagatattgggtctgattggtaaccaaaagctggacaagttttttacctgttagctgaagctattagctttatcggaatagtgcaaaactgttagaagaagctgtataaaaaagctgtacaaaaaagctaaaagtaaaactttttgtaacacttttaataaagtttttatgatcgattcaaaactgtataaagcttaagtttgttaccattcaaacccattagattagtggtcaaattagcgtatggattacttcgccatggccttctcttttctccaactttcacctctttctttggtcatttcttttttttttgttaattctcttctcccaatgcaaaaacagagctctctctctctttctctctactttttgtattctttctttctcctttttcttcaacgagagtatctttttcactttactcttcactccatcaatatcacactcttcttgctactatctctctttgctttgtacaaagccaacactcgtctttttgttctaatttgcatctgataatg

SEQ ID NO: 12997 - DNA, 3000 bp, Unknown
  misc_feature (1)..( 3000): cDNA_ID_2710208_gDNA_ID_2214588_Annot_ID_135372 3000 nt of promoter + ATG
gatctttttagtaatatagaaaccaaaaatttaattataaaaatttatatattatatttaacttattggttgatatattatttttattttacatttattttttatttatatatcatcaaacttattttttcttttgtaaaaatatggaataaccaaaaaaccagtgtccaaactggaatcaaactaaaaccaaaccgaatcgagatatatatggtttttatatggtttcaatatttataaattcgaaaaccataaaactgtataaagcgaaccgtaaccaaagcgaattatgtatggtttctatatggttatagttttagtaaaactaaaaaattgtaaaactaaaaattttgaatcgaaaccaaaccgaaaaaccgtaagtccattcctgagcaaaaccttatctaaacaaaatgaagagctggatagaagtaatgagaaataaaattttgtttgcaaaatagacaaataaatactcctatttgaaaagttatattttgtattcatataattttaaattttatatacacctatttgaaaatatagagtataaaataaattaaaatggaaataaatcaaataaaaaataatatatttctaattacaaattatctataaccggatatagctaaatatcaacaaatgttatcatatttctgcatgcaaatgttaaataaatcaaagcgtattaataatagattaataatggaatagaagatatttttttttttttactgaatttgtggcatgaataaacagaacacgtatcgtcatctctcatgcgaacatgccaacaatggttattgtatgtttaattaagcaatggttattgtttgtttaatttagagttaggactaaaaaacatgccaacaaaaaaaaaagttgagaagagatcagattaaatgcaagtttacgacccacacgcgcccacttttaaaattttatgaaaaacggcaaatttctgcatgggttagtccacagatttgggggaggtggcgtcgacgcgctcatgctgagagtgggtaaaagacttgcgttttgcagttcaataaatcacgcgcttcacttttgggccgacttttatattgttcaagtatccattgagattagtttccatacgattttaggcctacgtattttggaaaagcccaataagagcacaatgtaatgctttaatattcattagcggtgatagcatttgcgtacatgaagcttaaactgttatatttgcagagactgttggatgtttgacaaagtctgaagctgaataagtcaagcgtttatttaggagttgaataagtattttctgttgcagtttgtttccgtttttatttcctgcaatctctctttcagttgttgtaaggcttttataaaagccattgttcttgttctgtttcaatacacgaatcattcagactattctctttcattaaagcaagtttaaggttctgttttactttagagacttgtgaaataaccagcacaatttgatcattcggtactactattacaagattttcactaaccctaattataggtagaaccctggataatacgattacagattctaatcagctcgtagtataatgacagtcgtaaatacctaacaaggcttctctgtcacaatatacaaatattagcactctttaaacgcttcccatgcaactctgcaatgcgattccataataagaatagaatgcaacacaatactttatcaatcaaagagtaattgcactaaataaaatgtcttgcgagccaagactttcatgcgggttgagaagtcaatagttcgtgtattatgaagtaataaagtgttagggttaaaattattgatctttttagtaatttagaaaccaaaaatttaattataaaaagatattatatttaacttattcattcgtaaaaatatggaataaccaaaaaaattgtgttcaaaccggaaccaaaccgatatgtatatggtttttgtatggtttcaatatttataaattcgaaaaaccataaaaccataaaaatcgaaccgtaaccaaaacgaattatatattgtttctatatagttatagttttagtaaaactaaaaaaaccgtaaaaccaaaaaatctgaatcgaaaccaaaccgaaaatccgtaagcccatccctaaacaaaatcttatttaaacaaaatgaaccaaaatgtagagctggatagaagtaatgagaaataaaatcttgtttgcaaaatagacaaataaatatttaattaggaaattggaaagttatattttatatttatataattttaaattttatatacacttatttgaaaatatattgaaagtataaaataaattaaaatggaaataaataaaatgaaaaaataatatatttctatttacaaactatgtgcgaccggatatagctaaatatcaacaaatgttatcatatttctgcatgcaaatgttaaataaatctaatcgtattaataatagattaatagtgaatagaagataatatatatatttttaaatgaatttgtggcatgaataaaaagaacacgtatcatcatctctaaatgtgaacatgccaacaatggttattgtttgttaaattaaacaatggttattgtttttaattaagagttaagactaaaaagcatgccaacaaaaaaaaagttaagaagagatcaaattaaatggtgatttattttaattataaaatcccgattgagtatggtctatggagattatattgcaggtctcctttaagaattaaggaattatcacaacacaaccaaaatgtctcttgtggatcaaatacttggcgatggagcaggttacatcattatcaaatacttatcatttttaaatatgaatccatgcacaatcctttcacttagtagaatatgattaagacctgacattcttgtagaggaaaacaaaatctattcaaagaagagactaaccggctttaccttacgattaataaccaattgggaatgttgttgtagtggcagatctatg

SEQ ID NO: 12998 - DNA, 3000 bp, Unknown
  misc_feature (1)..( 3000): cDNA_ID_2712929_gDNA_ID_2214588_Annot_ID_135375 3000 nt of promoter + ATG
tctgcaaatgagtcccatatatcaccaagcacaaaataaggcacaagtttattataatcatcatctgctcttctttctcgtagcaatgtctacacagagattatcaccatcaccatcagagaacaacacagacttagattaaaaaaaaaaaaacataaaatagagattgtaataaaccttggataaaaactgagccggtacggatggtgtgaccgactctaaaaaccgatctagattactggaagataaatcggacggctcgagttgttgtttatgcggagaaggagctgatgatggaacgttagagacgtcgctctgagctctacggagctgatcgatgcgctgattggccctgcgagtttttgcggaagtgtagaaaggatcgtcgccgtgtctgcctctcgtcaactgaaatccagcacccaacatctccgagtagtcgtagttgagtttttacctatatatctatatatctatctaagcttaatttagttgatttagcgtgaatatgtgtttgtctccgatgagacggcgaagaagcttggtcgaatcggagattccaaagaaaggggtaaaaatggatcgaatgaaggagaattgatagaacaaaaaccttctgatgatatctaagctccgattaaacaggcaaaagattagtggaagaggaaaatctgaagaagagattcgctgaaatggagagagatttggtaatttcaaaaaaaggggtcaatgaagagagaaagacgattggttagtaattggagggggagagacaaaaaccattgaataacacatgaatccctcataagttagtgtttttacattttggtccttttcattttgatgattgattacagttttacccgaaacttctttgtaattcagttatacgcttacttataaacaagttaatcatacggtaatgcaaggtattttagactgctcagatgcataatgtagatggtgcataggaatgatttggggttatgaatgtaacattttaaaatctgatgagaaatatgtgactatgggaaatataaaggggttaaacattggcaaaagccaaaggccatatgtatattaggaggctctttaatttaatggttgatactcgatgcttgcttgctagatgctgacaagattataaagaaataaaaaagaaaggctgtaaaacatttggtctttctttttttgttcatagataagcttcacaatgttcaagagtaatcaaaaactatactaccattgaagattcgactaatgcatgtacaccaactacattcatcattcattgacaatgacataaacgtatcagaacatatatattcatgtatttagtaacacttatatgagattataaggagttttttgataagtgaaatgaatgaattttcacatattattgagcacctgactctgcattctgcaataggcggctagtttttatcagccacataagtagtcttttattatttgaagatatgcacatgaccaacacattatagtgttctttttgcctggcttcgataggtccacaaataatgggtttgatagaaaacaattcttgcataatgtgggggattcgcctagctagacatgaagcatttttttggagtatataaatggggattttagcaatactatgattagtatttggattatgtaatctgtgatacttaaacacattgcctgcatataaatccatatattatttaaaatatatcatttttgatttttgacagaaatcatagagattacggaaacagataaaagcacactccagaaaattagagacaaatattactattcaaaaagattcagatcgctactaagtgagggtcgccaaatcgcgagtcgaaacaccgattttgagtccgcgaaattcggaaatttgcgtggttgccacaataccgaagtactggaatcctcatcgtgaatggaatctctatatgtaatgtttcagtgtagtaaaattcaggtcttagcatttgctttctagatttgtatgtctaaaataagtgttaagcttgaatgtttgataacagtatcgaccataaatctcccatctaagccgataatgtgttttgatcatcattgtgaattttaaatcagtgaaccataagatagcccaattgggcccaaataatgttgtctgaataaagcccattatcaacagtaacggagttcaaagagtgggtaagagatgtgcgacgtcgttcaggagcttctatatcacaaatcttccttcattttctcagtggaagaggagggaagctttcttctgtagatcttcgcttcctctctctatctatctctgttgagaagaagaatcgaaactttgaaatctgtgagaggaggggttcatagttcgattggatttgatgtctttggtgcatctgcttttgttcgccggccttgtaatcgccgcttcctcttcttccccgggctcgcgcttgattctccgggaaatctccgatcagaaagacaaagctgttgaattgaacactaccaacttcgattcagtccttaaagacacccccgccaagtatgccgtcgtcgaattcttcgctcactggtcagttcttcgattgcttttcacttttcacttaaatctccacttttggttggtgggttttgcagtttatctactacctacagagtttggtgctggatctagcgttgggttctcttgcaagtgtgttcttataggaaaagatttgaactttatgatcctattagtgtgcttcttctctaatcattgctactagaaggctttatattttcttcagttactagtttgggcgtttactgatgcgtgtatcgttttcaattgattctaggtgtcctgcctgtagaaactacaaggtaacataaactattcaaagcctcaactttggagatttccgttgcctaaaaagtgttactcttatgcagcctcattacgaaaaggttgcaaggctcttcaatggtccagatgcaatacatccaggaatcgttttg

SEQ ID NO: 12999 - DNA, 3000 bp, Unknown
  misc_feature (1)..( 3000): cDNA_ID_2710192_gDNA_ID_2214588_Annot_ID_135380 3000 nt of promoter + ATG
agcaaagaacctaggaaagagatttagctatgggctatggcccaaccaaacccaacccaaccactgccggttcagtatttgtgatttaactaataaccgaaaaaacatcaaaccagaccagaaaaagccggtacaatgtctctcgacatcagctgactcaaaattagcaaatgtttgatgaatcgttcaaaatccccaacccttaatttcctcctaaactttctcctcctctgaagaagaagaagaagaagaagaagaagaaatgacgcactccttcaccgattcttcctaccaacaattccacgatggcgaaactcctcgagacctttccttgtgttccctccaccgaacgaggccgcggcattttgatctccggcgattccaaatccgacaccattctctactgcaacggccgctctgtcttcatccggagcctccgccaactccaagacgtccaagtttacggcgaacatggctatgctgttaccgttgctcgctactctcccaacggcgaatggatcgcttccgctgatgtctctggtactgttcgcgtttggggaacgcacaacggcttcgtgctgaagaacgagttcagagtccttgctggtcgtgtcgatgatctccaatggtctttcgatggacttcgaattgttgcttccggcgatggaaaaggcaaatctcttgttcgatccttcgcgtgagtttctcctccacttcttcttcttcttctttcctgattttgagattcaatttcgagtccttggtaattaggcaaacaatttaggttttaatgatgactttgtagaatggaatgatctctagggcttgatcaatttgtgtttgttttatatatgtagatgggactctggcaatacaatgggggattttgatggccattctcgtagggttttgagttgtgccttcaagccaacgagacctttccgaattgccacatgcggtgaagacttcttggttaacttttatgatggaccaccttttaagtttcactcttctcacaggcatctttcttcttctcaattcatatatgtctcttagatattaacagtttgttttcttgactaatagtaccatctgctacacagggagcattccaacttcgtcaactgcatcagatattcacctgatggtactaaattcattaccgtaagctctgacaaaaagggtatgatttacgatggcaagactggagataaagttggagaattggcctcagaagatggtcacaaaggcagtatctacgctgttagctggagtcctgacagcaaacgggtaattgttgttaggatatcaatgtgtggccaagctatgcaatgtttagtactgatatttgatgagtttttaggtgcttactgtgtctgctgataagtctgccaaagtatgggaggtagctgaagatggaactattggctctgtaattaagacattgtcgtttatggaatctggtggagcagaagacatgcttgtgggatgtctttggcagaatgatcatctcattaccgtgtctcttggcggtactatgtccttgttctctgcagatgatatggataagcctcccttgctgttatctggacatattaagaacgtcacttctttggctgttcttggggaaaaccagaagacgattctgtcttgtagctatgatggtctcattgtcaaatggctaaaaggggttgggtacagttgcaagttacaaatgaaagacaccaaaatcaagcgattagcggctactgaatctagcattttcatatctggatatgataatatggtacaagttctgctaacaaaacaattgttcaatgagatatgggtttggactgtgttaaagtcaatgttacatcgcatatgacatcttcacttcttgacaggtttggagaattcctttaaccgacaacggatatggagctgcagaacatgtcgatataggccatcagcctctggacataagcatagccgttgattctcccgaagccacagcactagtctcgtttgattccggagttgtattgctcaatggtctgaacattttgagcaagatcgatttgggttttgctgtggcagcctctgtgatctcacctgacgggaaagaagcgattgtaggagggcaagacgggaagttacacatatactcagtctcaggggacaacaacctcaaagaggaagcagtcctggagaaacacagaggtgctttgacagtgatacgttactctcctgacttaacaatgtttgcttctggtgatgccaaccgcgaagctgtagtctgggatcgcgagaccaaacaggtgacgtgattagagttgttcttgtatgtcttatatgttcaatcatgcttaaacgctaacctggaagtgcggtttttgttttgcaggtgaagctaaacaacatgttgttccacacggctcgtataaacagcttggcatggtcaccaaacaacaagatggtagccacagggtccatagacacttgcgtcattgtatatgaagtggacaagccagcttcaagtcgcataaccgcaagaaacgctcatctcggtggagtgaacgcagtcgccttcattgatgattgcaccgtagcaagttccggagaagacgcttccgttcgtttgtggcatatcgaacctcagtgacttgtcgttataagctttttttttaaccgtccttgaaagttgtagtctctatatattaatttgacaatggcttgtttgtattaaagcttgagtatctcttatcatgaaatgcacacgtgtctaaatctatatggtcaaatttactctgttgtgctgattagtgccgagtcaaaggttaattaagtattgagggaaaatttaaacaaaggttaaataattagaagaagagataatgtttggagccttggttggttcttacttgttactttgcttcgtacggatttgaaggctttacctcaccggagcttccaagtagaagacgacactgagtcactgacacagggatacaaattatg

SEQ ID NO: 13000 - DNA, 3000 bp, Unknown
  misc_feature (1)..( 3000): cDNA_ID_2710188_gDNA_ID_2214588_Annot_ID_135381 3000 nt of promoter + ATG
atttctcttaaattgtactaccactatttcaacaagatggtactcgtgcgcatcacatgcaactattaagtatagcttgtagattcatgtttatttcaagagtatatcaccttgttattcaattaccttcttttctgccacgttgaaattttagaattagggtttggatggttatgatggttaaggcggacaaaatcgtcaatggatcaaacctttttttatttaccattcattaattatagtacgcagtggtctggataaaaaataatagaagaaaaccgcaacggaccatctacggaccgtttttacatataaataaatttgatccgcatcgatttattgtccgcccaaaaatgaagtagactgaatagcagacaaattaaaccgttttgtccgctgcatccattcaaaatcttagactcgctaaaatatgaacaagacaaaataataaagcggaggtaagaaagaaaaatatgccataaactccaaaattgtattttacaaatacctaacgttctttagattatatcgagggtcgctagtatttaaaaggaaaataacagtgataaaagtgctaacttttgtgggaaatggattctaggttgaaaaaaacaggacttttgtaagcaattttcaacttaacaacatcatgcggatgcgcggtacaagtcttctactcttgtggaccatattaatgctttgatttgattgatataatacgcatgcattataagcttaatgggttggttaattatttgcgataatcattttgtcttttgcattactatattattactcgattgctacttttttacgttgatcacggaaaattaacggtgcatgcttaagacaattattatccatcatttataatttagatgcaccttttatgtcacgatgaaatctggaaattgtactagtcaggtacatttctaaactcacttttaatcttttatactacggtcactcgtgtctaatttcttaattatggtctggtccgtccactaacgaggttgtggacctaatagcaagtgtctagctagtgatacttaacagatgttacaagaaagaaagaaaaaagtccaaaatgatggtctcctttgcaacttggaaagctataaacaatgacataacagctgacacaatatctccacatgtacgttagagagggtttccataaatcatcactaatcatagtttaaatcaacttgacggtccgatccgtacaatgttaaaagtcagtcggaaatatgtagctttgaatctttgtttttaatgtttaggctacagttattgactaattcaaaagatttaccatgaacttttgatcactacatacaataataatgtgcctattgtctatatatgatgtgtctaatgtgtaataatttgtctactgattagaagtcaagagttaagaaacgttcaaagaacgtggtaagaccatgaagataataattatgaacaaaaaaaagcaagaccatgaaggttacgttagttaaacaaggtacgtcacgtaatcacgtttaagtgtgatagctacgtgaaaaccatgtggcctttatattttttgtatgtaagctcgcaatatcatttcctgcgaagttgccttcctcgtccactaatgacgaatatatatacattcatttgaaatttttgtcgtcaatattggtcaataacctaagtatatatatattccatttttattgttattaatacgatattgcacacaatttgtgtattagtagtataaatattatgtattgactgatgaatcatatgtacatcgtggttcaaattaaacagctcgaatacacattatcaaaacgtgctttatccatatttgtcaaatttgtgtcttatccgggggaaataaataattcaatttccaagtctagttaattaaatttcaaaaccttgttaatctccattgatgacccatccgataaccaaataaaatggattgcgaatgaaccaatcatatacgtacagattactttctatgatgaattaagaaaccaattatatcaatgtgtgactaactagtcaaaaatgatcaaacgtgtctcaaaagtatatatttaatgctaggtagtgtgatttaacaattgagagaacaaaaacaaaaaacataccaaatgatagttccggtttatatccattcggttatcaattcgtatccattcgattatcaattcggttcagatttttatctattcggtttcggtttgtatccattcggttatcagatattttggttataaagtttagtatccattcgattattttgaaattttggttaggtttcggttcggatcctgttctttcggttttaaaatttcgtatccattcggttattttgctttcaaaattttcgtacatttcagttatttttagatatttcagatatttttcggttattttcgattatttttactattatatatatatttcacatatttttaattatttaatatagaaataactaatatatttcggatattttcggttatccaaatatttcggtatagtaccgattcgactttagttctttcaattatagaatttagtattcattcagttattttaaatttttcagttcgattattttactttggtttgggtttgatatattcagtttggtttatttggccaggcctaacaagcgagaagagaattggtagctgaaaagagcaaagaacctaggaaagagatttagctatgggctatggcccaaccaaacccaacccaaccactgccggttcagtatttgtgatttaactaataaccgaaaaaacatcaaaccagaccagaaaaagccggtacaatgtctctcgacatcagctgactcaaaattagcaaatgtttgatgaatcgttcaaaatccccaacccttaatttcctcctaaactttctcctcctctgaagaagaagaagaagaagaagaagaagaaatgacgcactccttcaccgattcttcctaccaacaattccacgatg

SEQ ID NO: 13001 - DNA, 2408 bp, Unknown
  misc_feature (1)..( 2408): cDNA_ID_3027530_gDNA_ID_2214588_Annot_ID_186703 3000 nt of promoter + ATG
tcgcctgcagctttcagtgtctctaaagcttcaacaaagataggatagcgtaggacaactccattttctttcatgtacacaagaactcgagtcatgaaagatgtttccccaaatttcaaggctttcgctatcagaatattgcaagctgctttatctggctgcacaccaatttcttgcattttaaagaatatgtccaaggcttcctcacattttcctgcaaaatcaaacgaagaaactaacacatcatcatcaacaaggctacaaaacattcagataccagaatcatctacataaagcaaaagttttggattttcagctaagcattttaacaaacacttagtgtgcaagagaatgaagttgacctgtggcgacaagatactccatcaatacagtataagtgtgacaattcggagaaacccgcgaccgtaacatctccttatacacctccgtggcttcttccaccctcccatcagcgaaaagcatcttcatgtaagcagtgtacgacacaacggtaggttcgcacccattatctctcatctcctcccacaacctcattgctccatccacatcaccggagcttgaaacccagtgaatcagcgatgtataagtcaccgtatcgatcaacacacccttctccttcataaggtgaaaaacagagtacatggattgaatccgaccggcttctccgaagatatcgagcatggtggtataagtgaagtggtcgtgtttgaaacccttgatttgagcagcccagttgaaaaagagccaagctttctgcatcggaggatgtgctttcaagacacggttgataatgtgagaatcccatctgacgccgagatgtggaagctgttcttgagcagagtcccaattggagtacttgaggatgttatagatgttggatacaatgtctcttgtgtaaacactgggatctggtagggtctgtgttttcacaagtttgggtttttgggagaatcgcttggagttggtgggttttagacgaggaagagagtgaagtagcttgacggagctccggcgattggagaattggattggggtattgcggaagatgctagagaagcgcatgaagctttgcccagagagataaccaattctaaactccaaccttgcagtgtattagaaagctttgtttgaataagacgccgttttttattcaagtaaaatttcaaaaatctagattcaaagaaaaaaattcaaaaatctaagcaaatctttaaccacaattataaagttagggtttataatttgacttaggacctgggcgttcgggtattcgcttcggttttagttggattccgattccttcggtttttgagtgtagaatccatatatgaaccgaaacagtttcagtttggtacgggtttggttctagttctttcggttatgaagtttgggatctattcggatattttatttcagatatttcggatattttcgagtatttttttggatattgtggtgttatatatatattttcaagtatattttggtattttaggtatttttgattattcaatctaaaaataactaatatttttggataatataatcatatttcggatatctaaaatatttttgggttcggttcctattattttggttctagaatttaggatctatttaagtattttaccatttcggttcggattcgggttcggttctttttgcttcggttccggttcggttctttcggttcagttattatgcccacgcctaatttgacttgtgttttactcgcttatctgtccacttttatcttcttgtgaaattttcaagttacaaaaacaaatacttggcaccaaaattgtgtgaattagttagttaatgatcaaatggttaaataacacaaagagttgtataatttatgtccaaaaggtattacaatttcgactctttcgagtttggaggagtcgaatcgtggatacatatatgtatgagaagagagacaataaataaaagaatgtggttgatcaagcttcaagggcaagtaacataagtgtgggaagaataaacttgtgaatgagaaagagggtttagtttgttgtgacatggagaaggctgtgaaggaggaactggacctcgttggagcttattctgcaaagcaaaccttctacctatatcttccttcttcattctcagccttgacgttgccgatgttcctcttgatcccaccaaagctataaaacacaacatcactataatgaatttccacatgatcctcatgataactcggccttgtaacgcggggatgaatggtctagtggttgattagtatgaggaaacgttgagttagctaataatgaatcttttgagggaattaagaaggatgagagataaaagttttgatggaggaaatatataaagatacatggagagggagagagacaatg

SEQ ID NO: 13002 - DNA, 3000 bp, Unknown; identical to SEQ ID NO: 13000
  misc_feature (1)..( 3000): cDNA_ID_2710188_gDNA_ID_2214588_Annot_ID_186698 3000 nt of promoter + ATG

SEQ ID NO: 13003 - DNA, 3000 bp, Unknown
  misc_feature (1)..( 3000): cDNA_ID_3027548_gDNA_ID_2214588_Annot_ID_186691 3000 nt of promoter + ATG
ttgaaggttagaaacaacaaaggccatttctgagcattagtttttaaatttgaagttacctggtatgatataagagcataaaagatgataataatatatatcatcatcttagtatatagtatctacaccatgctttcggttctagtagagaaatgaacgcacaaaccttatcagcaaaaggttcacggatgtatggaaggtctctttcaagatactcaaacatcaaacgaccttgagagcctaaaggttcgccatcatcactggaagagtcttcctgatgttgatccctcaatgagatacagtctactctagcagaaacccgctcggaatcactatcgctgctaacatcgctacttgaatcccgaaaatcactgtcgctactatcaccaggacgcctgccataggaaccgtacatgacataatgaaaaacagcttgttatactataatgctgctatgatgagttcacaaagaattaagaaccttgatttaagagatgaatccaaggcatgagaatgagcatagatttgaatggctgacaaagaagggacatagtattggataacacgatccttgttgttattcaaaacaagaggcacaccggtgccgtaagcactccactctgcaaatgagtcccatatatcaccaagcacaaaataaggcacaagtttattataatcatcatctgctcttctttctcgtagcaatgtctacacagagattatcaccatcaccatcagagaacaacacagacttagattaaaaaaaaaaaaacataaaatagagattgtaataaaccttggataaaaactgagccggtacggatggtgtgaccgactctaaaaaccgatctagattactggaagataaatcggacggctcgagttgttgtttatgcggagaaggagctgatgatggaacgttagagacgtcgctctgagctctacggagctgatcgatgcgctgattggccctgcgagtttttgcggaagtgtagaaaggatcgtcgccgtgtctgcctctcgtcaactgaaatccagcacccaacatctccgagtagtcgtagttgagtttttacctatatatctatatatctatctaagcttaatttagttgatttagcgtgaatatgtgtttgtctccgatgagacggcgaagaagcttggtcgaatcggagattccaaagaaaggggtaaaaatggatcgaatgaaggagaattgatagaacaaaaaccttctgatgatatctaagctccgattaaacaggcaaaagattagtggaagaggaaaatctgaagaagagattcgctgaaatggagagagatttggtaatttcaaaaaaaggggtcaatgaagagagaaagacgattggttagtaattggagggggagagacaaaaaccattgaataacacatgaatccctcataagttagtgtttttacattttggtccttttcattttgatgattgattacagttttacccgaaacttctttgtaattcagttatacgcttacttataaacaagttaatcatacggtaatgcaaggtattttagactgctcagatgcataatgtagatggtgcataggaatgatttggggttatgaatgtaacattttaaaatctgatgagaaatatgtgactatgggaaatataaaggggttaaacattggcaaaagccaaaggccatatgtatattaggaggctctttaatttaatggttgatactcgatgcttgcttgctagatgctgacaagattataaagaaataaaaaagaaaggctgtaaaacatttggtctttctttttttgttcatagataagcttcacaatgttcaagagtaatcaaaaactatactaccattgaagattcgactaatgcatgtacaccaactacattcatcattcattgacaatgacataaacgtatcagaacatatatattcatgtatttagtaacacttatatgagattataaggagttttttgataagtgaaatgaatgaattttcacatattattgagcacctgactctgcattctgcaataggcggctagtttttatcagccacataagtagtcttttattatttgaagatatgcacatgaccaacacattatagtgttctttttgcctggcttcgataggtccacaaataatgggtttgatagaaaacaattcttgcataatgtgggggattcgcctagctagacatgaagcatttttttggagtatataaatggggattttagcaatactatgattagtatttggattatgtaatctgtgatacttaaacacattgcctgcatataaatccatatattatttaaaatatatcatttttgatttttgacagaaatcatagagattacggaaacagataaaagcacactccagaaaattagagacaaatattactattcaaaaagattcagatcgctactaagtgagggtcgccaaatcgcgagtcgaaacaccgattttgagtccgcgaaattcggaaatttgcgtggttgccacaataccgaagtactggaatcctcatcgtgaatggaatctctatatgtaatgtttcagtgtagtaaaattcaggtcttagcatttgctttctagatttgtatgtctaaaataagtgttaagcttgaatgtttgataacagtatcgaccataaatctcccatctaagccgataatgtgttttgatcatcattgtgaattttaaatcagtgaaccataagatagcccaattgggcccaaataatgttgtctgaataaagcccattatcaacagtaacggagttcaaagagtgggtaagagatgtgcgacgtcgttcaggagcttctatatcacaaatcttccttcattttctcagtggaagaggagggaagctttcttctgtagatcttcgcttcctctctctatctatctctgttgagaagaagaatcgaaactttgaaatctgtgagaggaggggttcatagttcgattggatttg

SEQ ID NO: 13004 - DNA, 3000 bp, Unknown
  misc_feature (1)..( 3000): cDNA_ID_3610384_gDNA_ID_2214588_Annot_ID_186687 3000 nt of promoter + ATG
gtcgtagatgagaagcttttcatcgacagaccaataataagctcgaagactagcaatgttaggatgttttagtttccctatggcttcaacttctgtctgaaactccttgaatctctgagaccctccttcacccaatctccgtacggccagtgtgagcccgttctctagaaccactttgtagacaattccgattccgctcttccccagaacgaaagctgacgcctttagcagctcctccaggttaaacgcaacctgagcgtcgaggggaacaatgtcgcaatgctccacgttttcagatggcgtttcggattcgtctttacggaaacacagacactcagaagcccttttcttggattctttctcgactccgaattggttctcgcggttacaagcgcagaactttgagtagcagtaagtgaaaagcaaacccacaaggcagataccaaacacgtcgcagagaacaatggcaatgacggcgcttttgctcaaaccacttgatttctgtttggtttcagagttagtactatcagaatcctcaggtgggttgttgcttgggataaaagggtaagaggcattgaggccaagttgatatccttggcaaaggtccttcaatggaggcccgcatagaccagtgttgccgataaacgctgttggtcctctgttcataagagcaccggtttgaggaatgggaccggagagattattgaaagtgagatcaatgtaaaccttttcaggaagatctccaagggcaggtgggattgagccggtgaagtgattatgagagaaatcagcagttccttgaaggttggagaggtttccaatgtcgctggggatggagccgttgaattggttgaaggcgaggtcgagtttctccagagagacgaacgctgagccaaacccatcaggcaaaggaccagacaagttgtttctgctgacatcgagtgttttaagtctgttgcattgcagaatcgaaagtggtaacgacccgttgaagagattctgtgacaaatctaaggtctgaagaagcttcagcttaccgatctcttccgacaatgacccatcaaaggaattgccgtaaaggactagactttggagtccctgaagatggaaaagctgaataggcaacgacccataaaacctattgctccggagattcaagtgacggagactggagagaaaccctagagacgaagggagagaaccgtaaagattcttccttggaatgcttagagacaccaccctgagttctttgcaagttacaccgttccacgaacaggcgttctcgtctgatgagttccaattgttaagagaacctgtaggatcatcgtgaacgctttgtttaaacgttaagagcgcaaagccttcgtcgtttaagccacttatgacagtcacattgcagagaagagcaacgaagatgatcagcgaggccaacattatcagatgcaaattagaacaaaaagacgagtgttggctttgtacaaagcaaagagagatagtagcaagaagagtgtgatattgatggagtgaagagtaaagtgaaaaagatactctcgttgaagaaaaaggagaaagaaagaatacaaaaagtagagagaaagagagagagagctctgtttttgcattgggagaagagaattaacaaaaaaaaaagaaatgaccaaagaaagaggtgaaagttggagaaaagagaaggccatggcgaagtaatccatacgctaatttgaccactaatctaatgggtttgaatggtaacaaacttaagctttatacagttttgaatcgatcataaaaactttattaaaagtgttacaaaaagttttacttttagcttttttgtacagcttttttatacagcttcttctaacagttttgcactattccgataaagctaatagcttcagctaacaggtaaaaaacttgtccagcttttggttaccaatcagacccaatatctttgtaatctctcctatatacaaaatgttacaaatgcagatatctttattcaaatagttacatcttgtaataccttttgtcatgattgttgttttattccgaaaagtaatatattggggtcctttgattgatctgtcaagtgtcaatgtaggtaacatttacagtgtttgtccttttctattaatctatcttgtcaatatattactactacagtagtatcattcattttttatttcttagatgatgttgctctagcacgaaactccataaaataccaagtgatgcatattaatagagtgtagcaagtgtagtaacaagtagtaacaagtgtagtttcaaatgagcattgaacaaactagttacgattgggagagagcaaacataacagtggagtttactagagaagaaaggtgccacaagataccaccacgctcttcctgctttctttattcctcgagtctgcttttacagtactagtactacctcttttatatcttactttaccatataaatcacagctcatctttcttattttacttagaatagtagcttgacatgttttttcgcaagaagaagattcatataataaacgattataaatgtggtttagatttagctaaagccttaaaagggtaaaaggagaggacatgtgtacaaacattagtccggcccttattgtcgttatggtgatacgataaaattgtcgataagtagacttggtgaagtgtgatgtctcctagtttcttaggatagagagccccaaaaaaacctaaacctaaacccagagagagtgtgccagagtgggcctattttctcctcacggactaacggcgacgactccgaggctacatactagtaaatcaaacaacttgggttttagtgcaatataaaattattttgggcataaattgtaattatggaaacgtttgggcatgaattgttattacggaaactgttggggataaattgaaattacggaaactttggggggcttaatttggctttttgctggcacggcaatgggaggagacgaaaccgagagaaaca

SEQ ID NO: 13005 - DNA, 3000 bp, Unknown; identical to SEQ ID NO: 12996
  misc_feature (1)..( 3000): cDNA_ID_2710168_gDNA_ID_2214588_Annot_ID_186685 3000 nt of promoter + ATG

SEQ ID NO: 13006 - DNA, 3000 bp, Unknown; identical to SEQ ID NO: 12994
  misc_feature (1)..( 3000): cDNA_ID_3027572_gDNA_ID_2214588_Annot_ID_186678 3000 nt of promoter + ATG

SEQ ID NO: 13007 - DNA, 3000 bp, Unknown
  misc_feature (1)..( 3000): cDNA_ID_2707172_gDNA_ID_2214589_Annot_ID_135387 3000 nt of promoter + ATG
tcatgtattaaggtaccttaactctgatcatttgaacagaataattcttgatttggtaaaccaatactgagctttagctttaccgtatttttttgacagaaaatcacaattagtaaacctctttccgcaattttgattctacttttttctttgcaaatactgatctcggatagtcaggattcaactggtcaagataccaactcaatgttactaattcattttctttgacgtctctaattgatttctttctttctatgataagcttacgtgatcagtccctctttatatagaccatgaaaccaaacccttaagaagaataaggagtctacatcaaggagatctcaaaatcgaataggcttttaaattcttcaaacataaccaaattacacatctatatcttgaccaaattgcccaccttcattttgaacccagagagagagagagagagagaatgaatcaagttaccaattgtttgaataaagtatttgaacgtatatatgttcctatcatatggtctagatcactgacatatgtagtgatgtgtcttaacgagttacttacttgtgatgtatatatattacaagtggatatacatatgagtttttttctgcggatccgagaagatctttagatgctttttgaggattcaaagtacgttattcctataagaagcaaagatgtgaggcttgtgtagcatcatggtctatgattccctttatgtgaaaattttcctaaaagacttgtttggatcagtttggtccatttgccattttttgttggctgattttttttaatgttcctatatacaaatttatatccgttttgtgaatattacggtgaactagatgataatccaaaattgtatgaatagactttttattttttctataattaaaactgaattattgtggtagagagcgatatgaaatcgctgtgcggctactttatatcataaaatacttttttttttgttgagaaacatgttgcttaattagtatatggtcggattcacaacactttaattttgtaacaaatctatttattttgctctgaaatcatatatatctcacgttctactttctccgagtttcaattttagatgcaaacataaacctaacatcataaagactgtacaacaacccaagaattgaagattagagacgacacctacataaaaatcgcaaaagtatgttcaatgtgataacaagtaaaacttttatctatagagattattgtaaagaaccaagcttagatcattgcaagatgcaagactcatttttaacgtaagtattattcatcaaactcttagaacgagattgatatatagcatcatgcacattaactatattatataacgatctaaaatcataataatcaatatgaccgcattattggagatatatagatcaatctcatccacgggttgctctaaaccatcccatgaacggagcaaaacccttctttaattttgtcttcttgaccgaacaatctctctcaaaatccttctctttcttgtttctctcctcttcgtccccgacacttgacatcacacgtgtcagcaaaggcgagctcgcgaatgtcactagtctcctcttttccaactcctccgtcgtcacaacctcttcttcaaaatcattagacgtcatcgtttgatgctgttccacgaacttgagttcctcaatctccggattgtctaggcgactcgacctcgtcctgctgagccgttgtatctccttcttaccaagttcgagttcttgtgttagagttttgattctgttggagaggctggtgtttagttgtagtgttcttgtcagtgtttgttttgtctgctcaagctcgagtgttagagatggtagtcttgatagagaactcggagttgaatttgtttcctttgtccgtatctgaaaccgtcaaagacatgtgatgtaaaaagtaaaaactatacgagccggaacgtatcaatttattcatatatacaatgcccattcaaaactataaatgtatgtgtacatattttttttttttcatttggttgtgttgtatatctagtcaatagaaaatggttacaaatatatctgacatattaattagtttatatatacagtatatattatgtatatataaaatattatttcaaaatagtaatctttgtgatgatattgaagtattgaacattgtttattttcgttgtgataatatagaacattgttacctctctaagcctagttgcatagatctctccggctaaaactttctctccgaacatggccaccgcttctttcaccgacccaaacgctgcttttgtctctatctccgctcgaccacttctccaaacgtttcctctctccattactatctgcttaattaattatgcgtataccttccatcaatattacatcacacaagaattagtgttactttttgtgtcttatacagtaatttggagggtgttagattcttggcgttcactacacttgaatttggttaataaaaattataatgatggcttttgctcctgtctaattaatattcgttagctaaatgtgaccatcttgataacaacacctctcctaaaataaaataaaatgcacacaggcctcttgaaattatattgggccgaaaattttggcccattaaggaaacaataaaactgggcggtacaagtcggcgatctcgcccgtgaatcctctcggagttcacagaactcactattcaaagagagtcgtcacagagaaacaaaaatgagagggaaaattgcttagagaagcatcatcttccatagtcttcctcctctaattcgttagtctttgttcaaacgattctgggaaactctccagaattgtctctagtttagtagcttttgtaaaaaaccttcgctaaaattccacttgttttgacctagtctggcacttgtacggtgcgtttagagatcgtcgcgtcggtgatcggcgaaagagctccgccgtgtaaattatttcgctcagctctttgttcaccatg

SEQ ID NO: 13008 - DNA, 3000 bp, Unknown
  misc_feature (1)..( 3000): cDNA_ID_2710240_gDNA_ID_2214589_Annot_ID_135392 3000 nt of promoter + ATG
tctagtactcttttgtcagtgtggattctgtgacggtacacttgtaaattctagtattaaccaaacaagggtaatatcggtatttaagcagccaattaaagctcttgggccgtttaaaattcttaaaagcccattaatttcgaaacgccacctgtcgagacataattgggtcagaggattttaacggtggaagatgaagaagcttatctttttgcaaaatcgtttcttccttcattcatcatagcttcaaaatcttaaaaacaacaacaaaaatgaaaagtctccactttttagctcccaattcaacgattatcaatctgaagcaacaatcttatacaaaaaccaagttccagttgcatcgtagcaacagaagaactctatcgataaactgcgtaaacagtggcggtgatgaagagaagattactcagccgttggatggagtggagataagattcaaaagaggatccagaaggaaaatgagggaagagggttcaggagaaggaggaggacaaagcgggaagaaaaaagagactgttcaaaagccatgggaagagatgacattgaatgagaaggcattggagctttatgttggagagaaaggtttgttgttttggctaaacaaattggcttacgcgtcgatatacattgtcattggaggttggatttttttccggtttgttggaccggcgtttaatctttatcaactcgatacaccgcctcttgatcctaagaacatcttaaagggttaagaaatgctttgtagctgtgtctgcattctctgttccaaaacattttgaggcttatatattcaagttagtttcgagtaatgtgtagccatgtctcactagattaagatacacaagagaacaacactcttcatgaattttcaagattgttctgttggagttatgtcctgatcaaggatatctcgtgtagtcttgcacctgacatggaaaagaaaatatttttttcttcggctttttgtttaccttaactcaatgcaaagaatcagaattattaactgaaaaaactagattaaaactcacctattgcactctgctcgtgatgcataattgtgattcttgcaatttgtacacatccagtcgccatcacgccattgtttcactctaagaaatcagacaacacaaagaattgggaaggttgcaaaagatcacgccattgttctagcgtttagaaaacaagaaaacaatggagaccagagatcaatacagtaccccattccaagtaaagcaggtgttgagtgttgttgtagaaacgggagaggaagttgccaatttgagacccttcctaggctcataccaggaaaagatgcatatatcgctgactgtgtttgcatgcttgtctgcacaacgagccagaagaaacagaggttggttaagcagcaagtaaaattgatgaatgtactaatcaatttatgcgctctaactaatccttacatatccttgattcagtcttttgctatcccattcatgagccaaagcttctgatgctaatctctttgtaccaagggctgcaacccaaaataaactttcccatattaaaactcgtgaaaggattatcagacaccttcgggttatataagattgcacgcgcatcggtcttagacaaaaaccttacctagtggagctatttcattgcactttttgcactgcagagacatacaaaacagaaatgagtaaaacaacaagccggaatctgcaagtcggttttgcattgtgaacccatttcctcacctgtatacgagaggaataattgtgaaaaccacatctgcaaatccagtcaccactcctccattctttatgaaccgaagcttgatttgtagcgttagagaatgcgagtaaagaaccaggttgatcatgtgactcaggtccacgggtgaagtaatggagatgagtttgaagagaagctccagggatagcaagtgctgacaatgctgctacttccttagattgcccacatttcttgcacttttctcgtgatgcataattgttgttagtacaacctattgccacaccacaccacaccacacacccaaacgcaaaacgtagaacgaagaagatacacacgcacgcacaccacaacacacccaccagcaaattccatataccacataacacagaatacacaaaacagctcaacctagttataagtaaatcccctaattcacaattccaatctaatgaaacatcaaatgtaaaagggcatttgaaagttgaaggatttgaactcagaacttacgaattagatcaatcctagttttcattcacaattcaatctaatgaatccgcaaatggaaaagggcatttgaaagttttaaggatttgaactcagaacttacgattctgatcaatcctagttttgcttctagttcattagcacaatctgggaagctataaaagaattgaattgagataggagaagaaagaacgaaccagtgcagatccaatcgccgatacgaggaagccacttagagtttggagaagtattattatccatgataagacgaggctgcttgcatctgttacagaatgatctaaacgcataattcctgtttctgcatcctaaacattcccagtctccttctcttccgtctcccatttcttcttcccggaaaaactccagtctccggcgacgacgactcactctttttcgttcagagaggagaaagaaagagaaagttgaagaaagctaaagctgggccacatttgttgtgaagtgactaggcccattaggcccattaatttcttcagagaaaatctctttcgtccttctcttcgcaggtggcaatcgttacttactgacatacatcttcatcagtgatttttgggtttgaaatttctctagatcgattttggatttagatctctttgtttctactgcttttcatcgttggatctgcgttttgcaaagggagatacagaaaggaatagctttgaattgacaaggtttctctctaatccaaccgaatctcaagcttcc

SEQ ID NO: 13009 - DNA, 3000 bp, Unknown
  misc_feature (1)..( 3000): cDNA_ID_1977060_gDNA_ID_2214589_Annot_ID_135393 3000 nt of promoter + ATG
tttagagaattctggtttcttatgagttaatattgatattggatctttgatctctctctctctcggtttcagaatgtgtaatccggatgttgaatctgaaccaacctttgaatccaagtggaactgcgaacgaagaagtttacaagatcttgatttacgataggttttgtcagaacattctatctccattgacccatgtcaaggatctgcgtaagcatggagttacactcttctttctcatagacaaagatcgacaacctgttcatgatgttcccgctgtctactttgttcaaccaactgaatccaacctccagaggatcatagccgatgcttctagatctctctacgatacctttcatctgaatttctcgtcttcgatccctcgtaagtttcttgaagagctagcttctgggactcttaaatctggttctgttgagaaagtctcgaaagtgcatgatcagtatctggagtttgtgactttggaagataacttgttctcgctggctcagcaatctacctatgttcaaatgaatgacccatcagcaggggagaaagagattaatgagattatcgaaagggtcgctagtggtttgttttgtgtgttggtaacgcttggtgtggttcctgttatccgatgccctagtggtggacctgcagagatggtggcgtctttgttggatcagaaactgagggatcatcttttgtccaagaacaatctgtttactgaaggtggcggtttcatgagctcgtttcagcgtcccctcttgtgcatatttgataggaactttgagctctcggttgggattcagcatgatttcagataccggcctctcgttcacgatgttctcgggttaaagctcaaccaattgaaagtgcagggagagaaaggaccaccgaaatcgtttgagctggacagttcggacccattctggtcagcaaacagtactctggagtttccagatgtcgctgtggagatcgaaacacagttgaacaagtacaagagagacgttgaagaggttaacaagaaaaccggaggtgggagcggcgctgagtttgatgggacagatctgattggaaacatccacaccgagcatctcatgaacactgtgaaatcgctcccggagttaactgagcgaaagaaagtgattgacaaacacaccaatatcgcaacagcgctcttaggacagatcaaggagagatctattgacgctttcactaagaaagaaagcgacatgatgatgaggggcggaatcgacagaactgaacttatggctgctctgaaaggcaaagggacaaagatggacaagctccggtttgcaatcatgtacctgatctccacagaaaccataaaccaatcggaagttgaagcagtggaggcagcattgaatgaagctgaggctgatacaagtgcgtttcagtatgtaaagaaaatcaaatcgttaaacgcatcttttgcagctacatcagcgaattcagctagcagaagcaacattgtagactgggccgagaagctttacggacagtctataagcgcagtgactgcaggagtcaagaatctgttatctagtgatcaacaattggcagtgactcgaacagtcgaagctttaacagaaggaaaaccaaacccggagatcgattcttaccgcttcctggacccaagagctccaaagtcgtctagctccggtggtagccatgtaaaaggaccgttcagagaagctatagtgttcatgatcggtggaggtaactatgttgagtatggaagtttgcaggagttgactcagagacagttaaccgttaaaaacgttatttatggagccactgagattcttaacggaggtgagttggtggagcagcttggacttttgggaaagaagatgggattaggaggtccggtcgcttcaacgtcattgtctggtggtcactgagtgttactcactgttactttcttttttcttttggcttttgagagtttttttttattaatctataaaatataaatccccagtggtgaattatttaacaaacagtttacagtctcgttataacattttctacagaacattttaaggtgtgtttataactccattagttaagattgttaaatggtttttgtcataatctttgaaaaagtaaatgacaattagctaggttgtcattaataataaaaataaataaaaaggtatgaacaaaagtctgaaaaagaaatttgtaatctaacattactaatttctaattaacattttttatgccatttagtacagtgtttttccaaaataaaatatactcctatgatattttgcataagaatatattatactaaaaaagagaagaggaaaaaagcaaaaaatcaaaagaaaaaaaaaaagtaaaggagcaacaaaagcaaagcaggtggtccgttcccatttctctgtaatttgtcttcgtctctaccttccatctctctcacccactctcctcggaaaccacagcgacggacggacggacggacgataaaacttttgcctctaatttgctcctacaaatctggaatcagccggagcgaatctcgaagcttatgatctcgacttgtgaggatcctcttttccttttctttttcttttgtataataataattatctcatccccgatcgatttcgattttcatatggtttctcgccagaaatgatcgattctctcgtttatttcaatagcctcagatgattgaagatgataattcaacagttaataacgcttctcttttttttagtggctttgtgttttgaccagccaatctaaatcactggtcacctttgttttgatctctgttttgttgaatttttgtttcaaacttaaacgaagctaaaaggctaatgggttggtcttaattctgaattttgagagagttttaaaatcatcttttatgagctaagccatgtttgaagctagatctgcctttaactttggttttggttttaaacttttttgtttctaacttgttgtaggctgaagaggctggga

SEQ ID NO: 13010 - DNA, 3000 bp, Unknown
  misc_feature (1)..( 3000): cDNA_ID_4255088_gDNA_ID_2214589_Annot_ID_135396 3000 nt of promoter + ATG
gaggaagaatttgggtttgaccatgatatgggtctaaccattccttgtgatgaagtcttcttcaggtctcttatctccatgtttagataaagcccgatatcggagacagattattattcttgaagaaaagatttctttattggaaagaaaatttgaagccgagatcagtaaatccaaaaacaagaaacaaactcattttttagggttgtctgattaagatgcaagaacatggctaaaaagcttcgtaggcattaacccgtttgtggtttttttctttgctaaatttattagtcattttctcttttaaatattttgttgtagttggggtggggtgggagactttttccctcaagtcaacgtaaaatgttgatcgatgatcttgagaggattagctagttaacttctaaaactttattggttaagatcaatcaagaatcctcaatagttttggtggtttgtgctaacgatgtttatgtgttatcatcgttcgagttaaaatccgcgtaatatataatgttgttttataaaaaaaattagtacatgaatggtccaacaattcataactcacgttcttaacctaatttgtgactaagactaactaatcatgtgtaaacagctttctatttcttcgaaaaatttagaattacaaagacatagtttcgtatgacaaagtatcacggtgtccatcatttgacaaaagtaatgatagaaatattacttagcatctttataaaagtaatactttctcttttactaagatacaggttacgagattaatcataaaacactcgagtcataaaacaatttgttttgttttctttcaacacaaaagttttgctatacgtgtattcaatatttatttgtcggtgtgtcaatcaccgtaatttgactcatttccttttacatgtagacgtagcaagtagtatttcaaaagattttatgtgtatatatcaattatattgagtcagatttttgtgatggatcattatggtcctaccaaccagagtccctacatatacttgtatctgtgcgaatttatagttgttacctaagctacaaaaaaaattgaagagatcttccgtaatatagatgaactaatttgatgtcccattatgtttctcgtaaaagaagaaatacatgtgtatttgacaagatggtacatagaccgctaaaccatcatgtcctaacaaagtagattggtatcatttgcaaaatatgtcacttaacattaatgttcttcattccttaataccagtctacttgatgagtctctcctctttttgatgagctagtctcgcactttttttcatctctaacttttgtattttatgaaatgttcatagactttattcaaggcacattactatcatatatctggatttaaattgccataccgtattcacgagacaatttatatgtaataacaatttaaaaaatgcattgtctgctcagaagctagcttgcccatattgtgtgttcttctaacaattttttattgtttcttctgagggtttttgcattaaatatgttattgttgacatcatagatgctagtggatatatcatcgacgacgaactcgagttgcttaataattatttccagtttcatacatcatcatcatattatagaacatatacctttatcatatgtatctcaaaaatctataatcagcttgatattaacttattctaaagttcaaatcagttttaacttttaagaaaatattatgagttttctaatttgattcggttttcgccgggttaacctgaaatcggaatctggattggacaaagtacaaaccgtgggttagtattagtaacatccaatttgggcttgcccgtatttgtctgctcagaagctagcttgcccatattatgtgttctccaaagaattgtttattgttattttggagagggtttttgcattaaatatgttcttgtgttgacattattgattattagatgctagtgatataccatcaccaaaattagaattgcattatcatcattttatatatcaatctatatatttatcatatgactcagactatcatgagacgcattttttttaagtattatgaataatataccacttgttcacgttttaacgtttgaaaaacatgattttgctactttttacgattcaaagtatttattaagaatttacgttcttgaaaagtgattatactgtatatataactataagtaaataaaacttttttcgacgaaatttctgatgataaataaaaggtcggatatatttgactttttttttttttttaattattttttgacgataaatttttcgttgaaaaatcatcgaaattttcgacggattccaatgatcaaaaattcgtcaataatttccaacgatattctgactaaactaaatctgatgaaatatttttgacggctttccaaccaaaatatttcgttgtgacttgtcaaaaatccgttagaatactaagcaacttttcgacagattttcagcaaaaatattcggtaatataacgtgttaaaaatatgataaaaaaaaaaacttgatgaatctactaaaactaaattttcaatcatatatatctattattcatatatttcattcattttattatttttctcttaacaattatttagttattctggtatcgtgtaattatattcatatgatttattctgatattgattcggttagcatccggataaatctgggttgggctttttaacttggtttttctaagaaaaattctaatatgatttggttagcatccggattagtctagtttggtaggcctgcctttgtgattcttaactcggtcttttgtatgggtttgaacaattactacaccatttagattcttctgacccatatcaaataaagatccacttaggcccattagggttagaacaaacatgaggttgcagaataaaaagggttcattttcctcactctcaagttggatctcaaaaccctaatatctgaacttcgccgtcgagagcatcc

SEQ ID NO: 13011 - DNA, 3000 bp, Unknown
  misc_feature (1)..( 3000): cDNA_ID_2710254_gDNA_ID_2214589_Annot_ID_135400 3000 nt of promoter + ATG
ggtaaaaatgctgcctagcaaaaacatagatcatgaatttgaattccaaaattaccggatcctctcaacctttggcacctcattgttgtgctgccaattgagtgaaaatacgattacacgaaattaaacaatagtgtcataattggaagttggtcgtcgaaccaatggactgatgttttgtagacaagttcaggaatatgagataaaggaacatcgatcagctttcgcaaaggagactctttgaacaacttcagccatggaaattgtactccggaaatcgctctcccaaagttatcgagaaatcgcaatagttgaacctccaactcaaacgcatattttttctataaccaaacagaacaaacaaaatatgatagtttttatttagcaaaaaaaaatgaattttgatttatggattatccatctagatgagagttacacatcgcatgcatcgactgacttaccgatcatttcgaggaggtaagccgcaagatctgaaggatcgatagacactataggcttcatctctttctttgggttttgactttttactttccttcgccttcagattttcattcctcacctccacattagcatttttctcctcaaatgaacggaaaacgtcctcaccggtaggttggtttccactggccgcctgatccgctggttttcgcttccgaatgctcttcgaggacacgactttcttccatccatggtcgtcgacgtgggagttacatttagaagtctcacatacattgtactcgatcggttccattaccttttctaaagtctctcacttttttcgttgttttttgatatttgttatcactctctctagcctctagcatacttaaaccaaagtggacgacgtgattttatcgaaggaagaagggtttttcataactttgtgacataaacgttattagggttattctttatctttttattattagatttgaatatttttgcttgtaaccacttatttcattaaaatctgcatcttttaacatttatctttttcagataattataaaaaaaaattcaagaaagttatttaaaattaaatccctttgacataattacaagaaagttaaactagaccatatgttttaaaattgaatacctttcacataattacctttaaactacataattagaaaaaaagtttttagcttatttgtcaatcaaagatcatttaaaagcggtttgccaaaaaaaaaaaaaaaaaaaaaaaaaaaaaaaaagatcatttaaaagctacataagcccacaccatctacaaatacaaactatgattaatgaaaaacttatacaataccttattcttgtaaatatattttaaatctttaccaaatcacaataattctatttgcacaccgcgaaaatatctgaaaggcttgcttccattaatcggtaataattaataatttttaaaagtcgaatcccatatttagtgtagaaatattgttattattatttttgaatactgtgagaattttagattaattcataaatatttacagctagcgtgtgtaacaaaaacaataaaattgagagtgaataaatatataaaaccgggaaagattaaaaacaataaaagccaagaggagagtgacgtgaatgaatgaatggggacatggtactgaaggccacgcgcaatggaacggtccacactctctcctcctcacctttatattcaccaaatgggatcgtctttctcattaattcgtcttctttcttcttcttcctctcttcaccacttctctcttctttctaattaagttgttctcaccagtcaccaccattgatcttcctaggttttctttttgtttccgtcacatactcgatcaattataattatatattcggctgcgaagatttacaaggtaaacttaatatatcaacaaagggatttcaagcacatattagtataatacttacttatacgtatgtgtgtgctattttttctttttgttacgtatgtgtgttctctggacttcgagtatggatcatttgtaacttttgagcatcactaatttctcttttttgatcatgtttttaaaaaaaatatatatttttgctggttaatatatgtatgtagcttttcctacatattgagatcaaacgttaaatcgattctggattcatctttgaaaaatgtttaaagatcaggaacgtcaaaatcagtgtaaatcttctgtcgttatgtcataacaaagaaattaaacatggggttttatgaatctctaggtttgcatcgtcccctatatagatatattttttggatgaacaagctttttttgtttgtatactgctagggttatcctagcctttagtatatttatgattataataaattgatttcaatttaaaaaaaaagaaaaaaaaagagttttgagaagaacgccgttcttgatgatcattgccgccatttactaacattaatgtacaacagaacagcatcattataactccccatgtccgtttgttatgatcgcatctcatcttgatttcttcaactcaaaacctaaatttcatacatgtaaatatcattttacgtatgtatgcatgtatataaattaataaaaatatgtaacttattgatcataattatgcatgttatgagagagtttaaatggtgagcaagtgggaattcaccacgaaatgagttttatatatgcttatatctcataacattttgtcaactatctctcgagtactttataaatgattttgttagatagcactctatgaatgataattatatatttttcttcttattcttcttatttgtcttcacaaaatttagcttatgtttttcattatagctctaatatgtcgccttccactatcccatgttatcatttgagatcttctgaaatcatatgttgtgatctcaaaaattatatataagtatagacgaaaataagagaatatttccgtacatgtatatttatattattgttcattttggtgtttcattttgttggtgtagaaataatg

SEQ ID NO: 13012 - DNA, 3000 bp, Unknown
  misc_feature (1)..( 3000): cDNA_ID_2710260_gDNA_ID_2214589_Annot_ID_135403 3000 nt of promoter + ATG
ccatatatttacatagaattttcaaaaattttattatcttattaatttatcgatttgtatcaatttttacactagtcccaactcggaaccagaaaaatttattaatttatagaagttattaatttatcgaatattaatttatagaggttatactgtatttctcttttatttgggttgtatttcttctttttttactgagtttgagatttaattttaataaaaattatcagtttgataaaaaaaaactaaaaatataattttctttataaactaataaaattaagtttctcattctagctaaaaggcttagcttaatattattatgaatattattcatctttcctctttcaaaaaacatatttttcatcttgattatcatcggttgcaaccaaaacgaaaggctaagtttcatattcattttactcccaaaccaaaacaaatagaggtaaataaatttttcgtatttcgtactggagctttaatgttaattttaccatttgttttcacccaaaaaaaaccacctgaatttcttgaacaaattcacaaggaaattaaatttgttttctgggttttaatttgtaacaaaatatcacctggttttattaaactagttccattagttaaaattaaaaattgccggtattgttttgttaaatattttattttgataaaatcctctgatctctatcattcgaagtcaaagctgttttgttcacgtaaaactgcatgtgtgatcctatatattgtatattgataaatacgtttaacaatgacaatctagtgagatagctcatgtcacatcgacctatgatcaatggattacttcagtttgataatatgtttgtatgtgatcacgaattatatattatataccaatcgatttttcattgttttatgtactataatttgatttcagctcactacatataatatttaaacgtgacatgttcatcttttttcgtcgtcgatcgacatatcaactataagattagtcggttgtacgtataaatcttgaccttttaccatggatttgtcctataaaagcttactagagactagagaccagaacgcattaatattattaggtctatcttctatcacttcatagtgtttctttaacactcatgttttgcaagtgtcgttttgtactattggaaaagattattgttataaaaaaaaaaatgaaacaaaactctaaaaaatcagttaatcttagttataaaacattatcctgctagaaatcattgcaactttaataaagtattgagtcttgaatcgttatgtccacttcgtttattttatataaaagtttgtcaactaattaatagctgattttttttttcttttaagagaaagaagatctcgaaatgagaattaaagataagatatatggttaggtagcgagtagaagaccaaagcaagaaactacgaccacgacatcttgcacataagaaaaaaaaaaagtagttcaatttcattttcgctttggtccactttattatttaacaaaaaataatatctaataaattacattaatataacagtccgtgttagactaagacacgaagcctcccccactaaatcgacgcaaataaaaataaacaaatggtggggttaagagtttaattcgagctgtggaatttttttataaatatacaaaaataataatatttaaaataatatatattacgataacaaatttttatgtcaatcaattatattttaagaatcttctaaaatcaaatattattgaactaataatttgaataataattttaattccactattattgaaaatattcatatcattagtttttaagggtgtatagtgaaaaaattcctcaatttcaaatatgttaatacaaatttccctttttaaaaattatcatgaaattggacaaactatatttatattgaaaaagatatataaacttatacaacacaaattgtaaacaaaaataacatgatgttcttcaataaaattataaatcatcaaacctaaactctaaaattgtcaaagtaaaaaacctaaattgacgaattctaatttattatagcgaaattctctgatgtttgtatgatgtcgaagttgattatgagagattttgtaaaattttgtgttttaattttaaccatagtttatctaatttttacgacaatgtagaaagacaggattaagatatttgaaaaattgaagtttttttttataaaatatataattgaataatttcttatagaattttagaaaaaaattttagataaaattaaaaaacacaaatgtaattcttttatgtagaatttggggaaccagactacaacaaatcataaatttctctaaatttacctaaaatcatattaaaaattaataaatcattatgaatcttaaattacttaaaatataaatttgaaaatactcctctaactcagagatcaattttttctaatgcctcgtgatttttttgcatcttgtagcttagtcacctatatatatttttagtggtaacaagattctctgttaaaaaaataataaaaattaaaaataataatagtttattttatgggaaaagacgcgagtggctcccaccagcctcaactttgcccacgtggaaccagccatatgcgcggcgtttagacaacaaaaaaaaagcgtgttgtttctttctctctctagaaagtcaaaaaaaggagacagacaaccaaacactgccttgtcacatctctctctctcttgcttttggcgagtaacgagtaagtccattttccatgtgcccactgtgtcttctctccttacacgccaccatctcctccacctcctcctccctcccttctccaattcccaattctcctccaaaccctagggttagggtttccacgattgcttcaccttcccttctttttttaaaacctcagatcttccgcttcctcgttcttgtctttttgttgagctgagaagcaaaaaaaaagtgttctttggcttcacgaggagccaacaacgaatcg

SEQ ID NO: 13013 - DNA, 3000 bp, Unknown
  misc_feature (1)..( 3000): cDNA_ID_2710264_gDNA_ID_2214589_Annot_ID_135404 3000 nt of promoter + ATG
gcttgtgttaagcgtactgaagcattcttcagatcgagatctaaatggaattgtggtaagttgttcaatttttatctgttttctcttctttgagatggttcatagtgatgaggatggttttttggtttcaggttggcacatatgtactacttgtcaaaaggattcgttctacatgtgttatacttgtccgtattcagtttgtaagaggtgtgttagaagctcagagtatgtagttgtaagggagaacaaaggattctgtggaatttgtatgaagactataatgcttattgagaatgcagctgaagctaacaaagaaaaggtatgagaatcctgtctacattttgttactttctcttactcgcagtactacaaggttatttgtggaacttgaggtctgttcttgtaatgtcgctttgtttttttaatgtggattctttcttctagctaaatgtattacatgtacattttctaggttcaggttgattttgatgatcaaggcagctgggagtatctttttaagatttactgggtttctcttaaagaaaagctaggtttatcgttagatgatcttaccaaagcaaaaaatccatggaaatcttcttcttctactgccgctaagcgaagaactactagtcgggttcatgaaaaggatgatggaaattctcctggggttatgaaaatacgtcgtgctaaagtaaggaaaatggatgctgtttctgtgagtaatttgggtccttctttggattcaaactgttctttgggtgacagacttccacaattgactagtgctgctacttgggcaaccaatgagcttttggactttgtggggtatatgaaaaacggtgatatttctgtcttatcaaagtatgatgtccaaactctcgtgctagagtatgtgagacggaataatctacaaaactctcctcagaattctgaaataatgtgtgactccaagcttatgagattgtttggaaaggagcgagtggacaacttggaaatgttaaagcttcttgattctcacttcatcgatcaagttaggtctccagtcacagataattcagccggaggagtcactgaaactatgtcttaccaggttaatgcgggcagaagctgtgataggttaaatacatctgaacagcatcaagaaggggaatcacagcaattgaacgggcacagtattcaagttagaccttccagttctgatagcagaaaccatgcagttgtaaaacctgacacaagtgccactctgtccaataagccaattgatggtttggatacaaatatggtatggttatatggagatccagatgggaagattcatggaccattttcgttatataacctgcgacaatggaattcaagcgggcatttcccaccagagctgagaatatggaggttgggtgaacagcaacacagctccatacttttgactgacgcattaaatgggcagttccataaaacagggttattacagaatcattctatccccaagcaggaagtgacagctactatagctaacgatcaaaacaggtctgtggctgttcctaaaatagagagtagaatacttgacttcagccccaactcagtgtgcactgaccagagtgttatttctagcagtaacagtgtcatcacaaggagctcggatgtgagtaacaaaagcggaaacaattgtagccacgccgtgccattggatttttctctttctaatgaaagggatactgtgggttttatctctctctgggacaaaagaaaagttgaaagttctttgcttgtacaaagcccaataagctgttcactctcgctggctacattacctagaaactcaaactgctctctgccaccacatgaaagatggagtgctggtcagacagatggaaacagtgcagcaacgactgcttgcaatcaaaacggtagtcttagcggctcagctgagaaacaagtcacggctacagtccagtcatgtggacagaactggaatgctgcaactccaagcagtgcttcaaatgtgtgggattcgaactcgggtttgacgtctttcccagacaatcaagaaatagactttttagatctctttagtccaactttcaaattcaactttgcatctactaccactgattggcaacccattgtggctggacctgacgaatgcgacgaatcagtctcagatcttttggcagaagtggaagccatggagtcccaaaaacgtcttccttctccaacttcgacattccgtggtcctgaagaattattaatccggcactcaataaacgatagcttcagtcccgcagaaggacatagcccagcactagatgtaagcaaaggtgactccatgagctccacaaacgatcttcaaatgcattcacgatctaacagcaccgtgcatttttagtcgtgggctcgggttcacatagagagaaatcataacctggggcacaggttaccatagatcatccaatgtcctagattcgtctgatcgatggtggactatgccctctttcttctctttttttttgcaggattattacagaacataaataaatggcagaatcatcagcaaaaatgaaaaaaaacgagtggtgcatatgtagaagatgtttcttcgcggtatttttgactgcacccattgttttcttcagtatttaggttttgtaacgttgtcctgtgttaagatttgcacagacatacccaacttctgtatcttttttttttacattgtttgtacttaggaacaagtataaaaatgggaagaaattgttgtccatggatgtaatcaaaacatttgtagggatcatatcatcttattattctatatatatgataatgatagtgtaacgtttcattctttttgttttgaatgtttcaaatctatttatatcatgacaagtgtaggctccagtttattctacttgtttttggaaaatgagacgaactctattgatcgtttctggatttggaaactttttgttgtttcttcgatttcgtttttgttgatctgagttg

SEQ ID NO: 13014 - DNA, 3000 bp, Unknown; identical to SEQ ID NO: 13012
  misc_feature (1)..( 3000): cDNA_ID_3027601_gDNA_ID_2214589_Annot_ID_186737 3000 nt of promoter + ATG

SEQ ID NO: 13015 - DNA, 3000 bp, Unknown; identical to SEQ ID NO: 13011
  misc_feature (1)..( 3000): cDNA_ID_2710254_gDNA_ID_2214589_Annot_ID_186734 3000 nt of promoter + ATG

SEQ ID NO: 13016 - DNA, 3000 bp, Unknown; identical to SEQ ID NO: 13010
  misc_feature (1)..( 3000): cDNA_ID_4255088_gDNA_ID_2214589_Annot_ID_186729 3000 nt of promoter + ATG

SEQ ID NO: 13017 - DNA, 3000 bp, Unknown; identical to SEQ ID NO: 13009
  misc_feature (1)..( 3000): cDNA_ID_1977060_gDNA_ID_2214589_Annot_ID_186725 3000 nt of promoter + ATG

SEQ ID NO: 13018 - DNA, 3000 bp, Unknown; identical to SEQ ID NO: 13008
  misc_feature (1)..( 3000): cDNA_ID_2710240_gDNA_ID_2214589_Annot_ID_186724 3000 nt of promoter + ATG

SEQ ID NO: 13019 - DNA, 3000 bp, Unknown
  misc_feature (1)..( 3000): cDNA_ID_3027620_gDNA_ID_2214589_Annot_ID_186723 3000 nt of promoter + ATG
cgtccgtccgtccgtcgctgtggtttccgaggagagtgggtgagagagatggaaggtagagacgaagacaaattacagagaaatgggaacggaccacctgctttgcttttgttgctcctttactttttttttttcttttgattttttgcttttttcctcttctcttttttagtataatatattcttatgcaaaatatcataggagtatattttattttggaaaaacactgtactaaatggcataaaaaatgttaattagaaattagtaatgttagattacaaatttctttttcagacttttgttcatacctttttatttatttttattattaatgacaacctagctaattgtcatttactttttcaaagattatgacaaaaaccatttaacaatcttaactaatggagttataaacacaccttaaaatgttctgtagaaaatgttataacgagactgtaaactgtttgttaaataattcaccactggggatttatattttatagattaataaaaaaaaactctcaaaagccaaaagaaaaaagaaagtaacagtgagtaacactcagtgaccaccagacaatgacgttgaagcgaccggacctcctaatcccatcttctttcccaaaagtccaagctgctccaccaactcacctccgttaagaatctcagtggctccataaataacgtttttaacggttaactgtctctgagtcaactcctgcaaacttccatactcaacatagttacctccaccgatcatgaacactatagcttctctgaacggtccttttacatggctaccaccggagctagacgactttggagctcttgggtccaggaagcggtaagaatcgatctccgggtttggttttccttctgttaaagcttcgactgttcgagtcactgccaattgttgatcactagataacagattcttgactcctgcagtcactgcgcttatagactgtccgtaaagcttctcggcccagtctacaatgttgcttctgctagctgaattcgctgatgtagctgcaaaagatgcgtttaacgatttgattttctttacatactgaaacgcacttgtatcagcctcagcttcattcaatgctgcctccactgcttcaacttccgattggtttatggtttctgtggagatcaggtacatgattgcaaaccggagcttgtccatctttgtccctttgcctttcagagcagccataagttcagttctgtcgattccgcccctcatcatcatgtcgctttctttcttagtgaaagcgtcaatagatctctccttgatctgtcctaagagcgctgttgcgatattggtgtgtttgtcaatcactttctttcgctcagttaactccgggagcgatttcacagtgttcatgagatgctcggtgtggatgtttccaatcagatctgtcccatcaaactcagcgccgctcccacctccggttttcttgttaacctcttcaacgtctctcttgtacttgttcaactgtgtttcgatctccacagcgacatctggaaactccagagtactgtttgctgaccagaatgggtccgaactgtccagctcaaacgatttcggtggtcctttctctccctgcactttcaattggttgagctttaacccgagaacatcgtgaacgagaggccggtatctgaaatcatgctgaatcccaaccgagagctcaaagttcctatcaaatatgcacaagaggggacgctgaaacgagctcatgaaaccgccaccttcagtaaacagattgttcttggacaaaagatgatccctcagtttctgatccaacaaagacgccaccatctctgcaggtccaccactagggcatcggataacaggaaccacaccaagcgttaccaacacacaaaacaaaccactagcgaccctttcgataatctcattaatctctttctcccctgctgatgggtcattcatttgaacataggtagattgctgagccagcgagaacaagttatcttccaaagtcacaaactccagatactgatcatgcactttcgagactttctcaacagaaccagatttaagagtcccagaagctagctcttcaagaaacttacgagggatcgaagacgagaaattcagatgaaaggtatcgtagagagatctagaagcatcggctatgatcctctggaggttggattcagttggttgaacaaagtagacagcgggaacatcatgaacaggttgtcgatctttgtctatgagaaagaagagtgtaactccatgcttacgcagatccttgacatgggtcaatggagatagaatgttctgacaaaacctatcgtaaatcaagatcttgtaaacttcttcgttcgcagttccacttggattcaaaggttggttcagattcaacatccggattacacattctgaaaccgagagagagagagatcaaagatccaatatcaatattaactcataagaaaccagaattctctaaatttccagattcctaaaaacaaattaatagatcgaacacaatctatgaagcaatagaagaatcatcgcagaaacttgagattataaagagataattaccagtctgtttctgacggagattgagagccatggaagcttgagattcggttggattagagagaaaccttgtcaattcaaagctattcctttctgtatctccctttgcaaaacgcagatccaacgatgaaaagcagtagaaacaaagagatctaaatccaaaatcgatctagagaaatttcaaacccaaaaatcactgatgaagatgtatgtcagtaagtaacgattgccacctgcgaagagaaggacgaaagagattttctctgaagaaattaatgggcctaatgggcctagtcacttcacaacaaatgtggcccagctttagctttcttcaactttctctttctttctcctctctgaacgaaaaagagtgagtcgtcgtcgccggagactggagtttttccgggaagaagaaatg

SEQ ID NO: 13020 - DNA, 3000 bp, Unknown
  misc_feature (1)..( 3000): cDNA_ID_2686045_gDNA_ID_2214589_Annot_ID_186719 3000 nt of promoter + ATG
ttttattttggaattgggttatatggtagatgtattttaatcaatatttagaatatttataaaattttattaatatgttgttttgataagagttaaaaacttcagttttttaacaattgtctaatgtattcgtggtatagtgttacttaataacaattataaactgtaaaatataaatattttataaaaataaaattagcaagttttaatatatattacctttaaaaaataaatcgtcccgcgttatatcgcgggttaaaatctagtcgatttatatttacaagatcttaggttgaaaataacatacaaactaccttcgtctataaattaaatataaattggcataatatctggaaaatttcttacaatcaagtcatgacgattgacgaatattgaaagctcaaacactaatgttgtacgttgatgaactaattaaaaattcaataaatgctctaaacatataaacagtgtaacgtaaggtgtaaatagcgaataacatatgacagactgaatataaggctcggatcgtagaggggaccatgttccaaacccaattttcccccattaatttccgggaaaccaaaataataaaagctaattataaacgttttcatgaaattagggcaaaagtacaaactgaaactaatgatgccctaaatgaaaatgaaatctctgcaataaagaagagtggctttaggggccacgtagacattagttacaaaagctctgcgtcttttagccctctgcctcttcaacagtactttacgacaatgaaaaagatcgtgatgcgtaaattaagatcccctgtttctcactgcatgctcgttaccgtacgtactcataggagtttataaatcaaagggcctatagagagtattctaagtagcaaccactacgtaaagttttaccaaaaaaaaaaaccagtatgtaaatgtgaccatatgttcatgtagttgcttgtgtacatctttttttttttttttaacttcaaactttatgctttattatagtgaagaagtataatcctcatggagtgtacatctatatatacactgcatacgcatgtagagtaacaagacattctttgtttcttgtcaaaagacattcacaatccaactagagatatgattttatcatttgttagttagtttatagtttggtgacttggtgtaatctcctagttggataaaaatattggaccgttgattcgatagaaatgccaaacgacattacaaatcggatatatcgattggatggaatccaaaagtttatccaatataatcgactaaagttaaaaaatgagtaatccaccagtctaactaaatactttctttaccaacaaaaatttgggatacaactgagtttatttaggtgataaaagattataagacttaaccttttaacaaaaaaaattttttaagacttcaatccttagattgttttccaaatattaatagttacaatagttagtttgtaaaacctatttttaattttccgatactctttgcacgttgtgttgaatccgagaaatcatgggggctatataaacaaaactatactatgaaatagccaagcaacttcagtgatcggatctttggttttttattttaaaaaaaataaatattttatcagccgtatcttcagggccattccccataaaaactataatagcttctatgaaatttgtagattcctaaaaaaatctttatatatcttttatatacaatatgtggctgttacgtagaacaataagactatacaaaagttgggtattgttccttttcaattacaaaagtcatattcactaaaacaaagcccttcaaactttttaaaaaaaatgaataaatcacgcatttatacaaaaagatccatccatgctcctataaattcgagcatataattaactaaagaatactcaacatgttcataagtacacctgtcttcacactcgtttcacacattgtaattgacataaattttaatatcttttaaagcaaagcataagtaaaattatatagagtatttcttcaacacatttccggacgatatcaccacgaaaaatatcctatatcacctatgtgtcatgactcatgaccataaggaaggaaaaatgtatttttatgatcaaacggttttcactttttttattattcattctagaaaaaaattataatcgttttctttcattcctacgatacaataattcataacgatcttttagaatttttgttttgttttctgtgtgtatgggtaaatatctttcatacgtagacagatacataacaattaaagctggtgaagtaataattgtgaagagacagagaaattgaaaaaagagagtttgtttttcgtctaagtaaataccgatgatgccctcacctttctaattccctcctttgtccctttccattttcatgtttatttctaacttctctgtccctttcaatccttctccaccagatatcctctgattcgatcccccacaaattttttcataaaaattattattattctcactaaaactctcaagagtagtttcgatttttcctctgaataaaaaaaaatcaaataatatatttgacaagagaatttccttcctaaacataacattttatttgaatgttaattcaattgattatttttctttcttatatccttttctttggcaaaatttatttcttatatccaagcacatttttcaatagggttttgtatgtatgaaatcatatctacatgcataaaagaataatatagtgaataactgattttctagaatattgtaaaaccttctttttgggtccccatttatatatataactcaataccttactatctctctatatatatataatcttctctctcacacaaaacctaaaatctctttactaccagcaagttgttttcttgctaacttcaaacttctctttctcttgttcctctctaagtcttgatcttatttaccgttaactttgtgaacaaaagtcgaatcaaacacacatg

SEQ ID NO: 13021 - DNA, 3000 bp, Unknown; identical to SEQ ID NO: 13007
  misc_feature (1)..( 3000): cDNA_ID_3027627_gDNA_ID_2214589_Annot_ID_186717 3000 nt of promoter + ATG

SEQ ID NO: 13022 - DNA, 479 bp, Unknown
  misc_feature (1)..( 479): cDNA_ID_2709642_gDNA_ID_2214590_Annot_ID_135405 3000 nt of promoter + ATG
aagttataaaccacagaaagaagtcaactaagaatctaccagaaaaaaaggaatttctttaaataagatgactgtctttctatgaatgaaaacagctttggtcacacataagataggaaactatttctagatagtttcatgccaagtttgtcactaaattggtcaaaatatattggcaagtttaacattttcgcataagataataacatatacttatatttttttaagaactaatttgccaatcaaaagtagcaataaagtgaagaaaaaaagtctaataaagtgtagaaattaatcaaattttaagtcctaaagttggaaaaatggtaaagaagcactcaaaaaaaaaaaaaaaaattgtgtatgtgtgggccgaatttgagaaaccagtgacaccaataaaaacctcatctttcaatctcacacaagtatttgtgcctactcatttcctccaaacgtcaaacatagcagcagccatg

SEQ ID NO: 13023 - DNA, 3000 bp, Unknown
  misc_feature (1)..( 3000): cDNA_ID_3027649_gDNA_ID_2214590_Annot_ID_135409 3000 nt of promoter + ATG
attaaaggcggtggtcttggctgaggtgtgttgcagggcggtgattgcagagatatagcttttgatgtgactgagggtcgaggatggggagttgaattgatttctgtgtttgattgttttgctggtggttgagatactggttttggctgaggcgttttgctgcgtggttgatgtaaaggacgggcttctgttgtgactgagggtcgaggaagggcggttgaattgatgatatccgtcttggattgtactgctggttgctgagatattggttttggctgaggagccttgcagcttgattgatgtaaaggaggggcttctgctgtgactaagggtcgaggaagggcggttgaattgatatctgtgttggcttgtactaaagctttctgaggtattggtcttggctgaggcgtgttgctgtgtggttgatgtaacagacgagcttctgctgtgattgagggtcgaggaagggcggttgaagtgatatttgtgttggattgtgctaatgcttgttgtggtattggtcttggctgagacgtgttgctgtgtggttgatgtaaaggacgagcttctgctgtaacagagggtcgaggaagggcggttgattgcatctgtgtgtttgattctactgctgcttgctgagatattggacttggttgaggagtgttgcagtgcgggagaggagctgaaagatttggaggtgtagcttccgctgctgtgactgagggtcgaggaggagcagttgaattcataggttcagctgctgtgactgagggtcgaggaggagcagccgaattcataggttcagctgctgtgactgagggtcgaggaggagcagttgaattcatatgcctgttagtttgcactgcttgctgctgctgcgttgaatgttgagagctcctgggtgctaaaaaaagggaagagaattagtgtcgctgtttagctcatttgctttatccaattatactcttcaactttacctcttacggtagcagtatcagtggctgcactcttcactggacaagtagacttgtaagcattcgccaagagactgttcataacaaccaaactccttaacgcttcattcttcttcgcttgagcgttatacgcagcatctacctcttgggatttcctatcatactcactgcgtgcttccgccatcttcctctcgagttcagccttcaactctaatgtctgcttacaaacaacgagacaatgagcagagaggacaggaaaccgaataaagatagattaaccaagaattagaaaaagactaaccgtctcttcaaagcttttcagtaaggtcccttgttctctgctcagcttctccagctcgtggtcacatatgtcactgaacgaagataaatgtaaccgaggactctgtcccatatgattgttgggaagagacgtaaccgctgatgcattgactgttaatctgctatgtaagacgttaggaggctgaacaccaccttcaacgacatcctctgaatggttaactacacaacgatcacaacatacaaaaatcttaacattctagcacaccaactataattaaagcatagcgatcactatcaatgggcagatcctgacctaaaggagtcgatgtagaagtccaatgctccgctgctgttgtgatattttggacgggaactgacgaagatggtggacaacccgtaccttgagctctctgtagacgaaaaatctaattcgtaagcacaataaacgatctgaaaccaacaaagagtaacagtcgttttcaagaagcagcaagtaacctgatctgatctagcagaaccttgaatatctaatatagaggcatggtctggaaaacgactcgaaaactcttgaaccaaaatggcatcagcatcatgacttgttctattactttcttctctaatcaacggcgcttcctctacattcaaaggtaactctaaggaagcagctccggaaactgaaaccggtggcatcactgtgtcacaaaccatatcttcagtcaaaacctcaggtatatttgctgaagacaccattccaggcccatctagttgagtactacccgatttactctgcgcttttggtaaagaatctgtaacttcttgagtttccattggaaccataacatcaaattgctttcaccagtgaagaggtttagctacacatcataacatatctcagtctattagagaaaacaaaaccaagctattcaaatttacaatctttgaagaacacaaacacactaatcaccgagaagttgaaaatgagagtgacactttaacaatcatagtagcaaaacatagaatcaacgaaattaaaaccatattatatataaaaatcgtaactttattcccaaatttcatatatgctagattgtgaagaaccatttttttcaattcgattttgaaataaaaaagatccgtgaaaataaaattgcgagttattgtttgagaattgaaagagaagaaaacccagaaccgaaaatagacttaaccctaccttaaaatgaagaaacaaatgtcggattcaaggttcttcttcctcgtctacgtgaagtccaggttaagaacagttaatagaatcaagagacatggagtatttaattaagctgtgttgggccacatttattaagctgttttgggccttcggcccatacctcaatttcgattgggtttgttgatataacatatacatatgttttttttattttttgttgtgtcagtttcgaacagtgtttgttttgtcattctccctcaacaacaatgcccgtcaagtggtaagctttgatccaatttcgttttccaaaatctcgatttttttcgtttctgttctgattactcttccgattcttgtatttgggttttgtttttttctagggttttacattggcaaccaaaccaaggatcaacagtaagcagccaaatcctaaacgaagcaacacaatgtgtagagagcatcaatggtgtgaaagaaggaagatggaaagcaacactcaactattacaaacccatg

SEQ ID NO: 13024 - DNA, 3000 bp, Unknown
  misc_feature (1)..( 3000): cDNA_ID_2710285_gDNA_ID_2214590_Annot_ID_135410 3000 nt of promoter + ATG
ccttcgaaatcttcaaccttcagagaacaaagatgcaatggaaactcttgtcattacgagattatctacgcggacaaaacctattccaagggaatcttggcaaccgagacggtcacgataccttccacttcaggagagccctttgtgatggctgaaacaaaaattggttgtggcctcgacaacacaaacctccagtactcagggtttgcatcgagttcttccggcattgttggtctaaatatgggacctttgtcgcttatatctcagatggacttaccctacccaggtcttatctcttactgcttttctggtcaaggaactagtaagatcaattttggaacaaatgccattgtggcaggagatggaacggtagcagccgatatgtttatcaagaaagataatcctttctattatctaaacctagacgcggtcagcgttgaggacaacctgattgcgacattggggacaccgtttcatgccgaagacgggaacatttttatagactcaggaaccactctcacgtactttccaatgagctactgcaacctagtgagggaggcagtggaacaggttgtgacagcagttaaagtacctgacatgggcagtgacaacttgctttgctactactcggacaccatagatatctttcccgtgatcacaatgcatttttctggcggtgcggatcttgtcttggataagtataatatgtatctcgaaacgattaccggaggaatcttttgtttggctattgggtgtaatgatccgtcaatgcctgctgtctttgggaacagagcgcagaacaattttttggtgggttatgatccttcttcaaatgtgatttctttcagtcccactaattgttctgctttgtggagttgaagaaacaaaccaagagattctcttttctacattttcatggttttaacttcagttttgtttcgatttatttgtactgtcactaaaagcatatgacatagacatgtttaaatgaaaaaatatgcgaatgagttacacaattaatcgaaattcaaatcacaatctgctataatctcaagttttttctggagtttgcaacttgttctatcaaagtcttttataagttcattttttctcaatgcttcttatagataaacatgaccaaagaaagaaatcactaatattgcaaagcacataattttacctagaaatactaagttatgttttggtttagcctctcacagcttgaacggtagcaatcatgtgagccatcacgagagcgtaacgaacagctgtgtgttgtggagtgtagatgtctccaagtccaaactccccaaagttgagatctatgttcacaaacttacccggcaacgaccttttagccagagcttcattccatatctccaagaactcctccatcaccttttgtgccttttccattgatgatataggaagatactccacctgcaagtaacaacacacaaactcaaaattgagattacaagaaacaagacaatcaccaaaagggaacagctccatataccctttaggtgattagattagcattgagactatagggatttaagaaaacaaggattttttcatcatcattgtgattacacgaaacaagactaaagaaacttgtagatgcatagtcaacaatcaacaatgttcaattttcatcatctgtcttaacatcataaacagcatcaaggatcatcactaaaagatattacaagaaactcttttaacaagaaaaatctgtagaaaaacaagattttcatctttaaaattaatcaccactgttcagtgttcatcatatctgtcttaaacaagaaaaagctggaaactttgtttacctccatgacaatgcctctaacattctcagaatgagtaggaacaactttaccaactctcaacctaaaatcaccaagctgatactgaaacccatcaaagtaaagagccactttagatttataagactgaagcttctccataatcaactgaatcgaagaatcagcttccaagacaatcctctgcgtcctgataatgaaatagtacttattcggctgatccgcaagtgaaatccctagaaaatcacgaggaaactccaattgattcgcttggtcttttaacatgggtttgtaatagttgagtgttgctttccatcttccttctttcacaccattgatgctctctacacattgtgttgcttcgtttaggatttggctgcttactgttgatccttggtttggttgccaatgtaaaaccctagaaaaaaacaaaacccaaatacaagaatcggaagagtaatcagaacagaaacgaaaaaaatcgagattttggaaaacgaaattggatcaaagcttaccacttgacgggcattgttgttgagggagaatgacaaaacaaacactgttcgaaactgacacaacaaaaaataaaaaaaacatatgtatatgttatatcaacaaacccaatcgaaattgaggtatgggccgaaggcccaaaacagcttaataaatgtggcccaacacagcttaattaaatactccatgtctcttgattctattaactgttcttaacctggacttcacgtagacgaggaagaagaaccttgaatccgacatttgtttcttcattttaaggtagggttaagtctattttcggttctgggttttcttctctttcaattctcaaacaataactcgcaattttattttcacggatcttttttatttcaaaatcgaattgaaaaaaatggttcttcacaatctagcatatatgaaatttgggaataaagttacgatttttatatataatatggttttaatttcgttgattctatgttttgctactatgattgttaaagtgtcactctcattttcaacttctcggtgattagtgtgtttgtgttcttcaaagattgtaaatttgaatagcttggttttgttttctctaatagactgagatatgttatgatgtgtagctaaacctcttcactggtgaaagcaatttgatgtt

SEQ ID NO: 13025 - DNA, 3000 bp, Unknown
  misc_feature (1)..( 3000): cDNA_ID_2710289_gDNA_ID_2214590_Annot_ID_135411 3000 nt of promoter + ATG
tgaacctatgaattcaactgctcctcctcgaccctcagtcacagcagcggaagctacacctccaaatctttcagctcctctcccgcactgcaacactcctcaaccaagtccaatatctcagcaagcagcagtagaatcaaacacacagatgcaatcaaccgcccttcctcgaccctctgttacagcagaagctcgtcctttacatcaaccacacagcaacacgtctcagccaagaccaataccacaacaagcattagcacaatccaacacaaatatcacttcaaccgcccttcctcgaccctcaatcacagcagaagctcgtctgttacatcaaccacacagcaacacgcctcagccaagaccaatacctcagaaagctttagtacaagccaacacagatatcaattcaaccgcccttcctcgacccttagtcacagcagaagcccctcctttacatcaatcaagctgcaaggctcctcagccaaaaccaatatctcagcaaccagcagtacaatccaagacggatatcatcaattcaaccgcccttcctcgaccctcagtcacaacagaagcccgtcctttacatcaaccacgcagcaaaacgcctcagccaaaaccagtatctcaaccaccagcaaaacaatcaaacacagaaatcaattcaactccccatcctcgaccctcagtcacatcaaaagctatatctctgcaatcaccgccctgcaacacacctcagccaagaccaccgcctttaatctccaaccatactccaacttcttatcaaccagcttctgctccaccagtgcatggtatagcgcgaaggaccatggcacctcatttaagatcatctcgagctcccaactctgctgctgcaccatcaacatatccaaggttggctcaagaacaacaaaagcaacaacaaaagaagtcaaacagtagcttggtctatctctcagatgacgactagtgacaaatctttgggagtatataacatcagtatatagtttttgaagtttctcttaagggaatatataagttcgagaggccctttaaaacatttgagaatgccttgtacgaaggatcatttcgaatactaattttttggagaatatcaagtaagttaactaaaatatttttcacaaatttgcagtttaatcaaaatttatttacataattctgttatttttactctataggaattttcaaaatactttttttctccttacttcgagttttgaaaatatttttcatgcagcgaatctctgatatcaatttagcgccacgtggcacgtgacataccccgatctctaataaatgaactctttttaaaatcgcccccctcgatacatcagttcactagtttagtgactccactcgaccacaaacgctaacgcaaacgcagtcgcgtggactcctctgtttatttcgcgttttagatttcttaattctcattctgatttgactgtggaaagggattcgtttctccttcaaggaaaaagttttatctttgctggaaactcaactacaaacgcggttttgctccatttcgcgtttgcgttttagctccaatgctggtactctctgttctactataagctgtagcaagctccaaatcctcaaaaatcgacattgttgcttcttcatattaaggtgggtttctcattaaatatgcgttttcaattcatttccctacatgtatgaagaaatcatgaaatggggttccccaaaaacttcaccttttacttggagagagcatcattgaatttgtgggacatgattctttccatcaaaaagttagattttttcggtcaatggtggaggaaacaggtcctacaatcgaaaaccggttttttaaaccggtttccgacaaccgacaccgggaattgtgagtcccacaatcaaaaaccgggttttaaaccggttcctgacaaccgacaccggaaattctgggtcctaacaaatttcaacagtttgcttcgaccaacgttttgcttttccttaaaagcaaagtcctttttggctctatctaatttggtttgtctataattttggatcaagaatctacaatgtcaagttcataaagaaagagtcatgtgagctaagttacagtatcatcatatagttcttgttaagattcacaaaatctaatatttatcaattttggtaaagtttaagatgttttgattataatataaagattttgccattagtaaacagtttaaagttaagagcttttcaatgattctgcctctttgattactataatggttgaaaggtcactctcagatttgcaatgcccgtttctttctattggtggttggtctgttttcattccatttattattgtatttgccattctttgactaatcctatactcaatcatttctttaatcacattattttagtaatcaatatccttcaagatgctccattacttctttttaatatcctcttgtctgcaacttccttttcttgactctgtagttcttacttcaacttcaccactttgcagggtaatgtaatctatattagctctcttgtttggttcttttagtgttttggttgttgtgttatgatgtttgttgtctgtatgtgaaaacatagccaactaactttagagggaactaaagattttgcagaatcagatgagtgacaatggatctttaaatgattgatgtggaccgtatatctatcgctatgagtttcttgttttctcttctaactctgggcccttttaagaattggagactcttgaccaaatcatagaatgtttttggttcatagtgggtgtaacagagttagaatcttttcgatgtctgttcaccaactcattcattcacattacactgtagttttacctgtgaattctataaaaattctactctacttgtaatctggtctaatctaaacataacttgtttcaggttttagattcttgcactcttggaggttgagcttagttcgacatgaaggtctttatctaatctccactcgctggca

SEQ ID NO: 13026 - DNA, 3000 bp, Unknown
  misc_feature (1)..( 3000): cDNA_ID_3027649_gDNA_ID_2214590_Annot_ID_186760 3000 nt of promoter + ATG
aaaaatattttcaaaactcgaagtaaggagaaaaaaagtattttgaaaattcctatagagtaaaaataacagaattatgtaaataaattttgattaaactgcaaatttgtgaaaaatattttagttaacttacttgatattctccaaaaaattagtattcgaaatgatccttcgtacaaggcattctcaaatgttttaaagggcctctcgaacttatatattcccttaagagaaacttcaaaaactatatactgatgttatatactcccaaagatttgtcactagtcgtcatctgagagatagaccaagctactgtttgacttcttttgttgttgcttttgttgttcttgagccaaccttggatatgttgatggtgcagcagcagagttgggagctcgagatgatcttaaatgaggtgccatggtccttcgcgctataccatgcactggtggagcagaagctggttgataagaagttggagtatggttggagattaaaggcggtggtcttggctgaggtgtgttgcagggcggtgattgcagagatatagcttttgatgtgactgagggtcgaggatggggagttgaattgatttctgtgtttgattgttttgctggtggttgagatactggttttggctgaggcgttttgctgcgtggttgatgtaaaggacgggcttctgttgtgactgagggtcgaggaagggcggttgaattgatgatatccgtcttggattgtactgctggttgctgagatattggttttggctgaggagccttgcagcttgattgatgtaaaggaggggcttctgctgtgactaagggtcgaggaagggcggttgaattgatatctgtgttggcttgtactaaagctttctgaggtattggtcttggctgaggcgtgttgctgtgtggttgatgtaacagacgagcttctgctgtgattgagggtcgaggaagggcggttgaagtgatatttgtgttggattgtgctaatgcttgttgtggtattggtcttggctgagacgtgttgctgtgtggttgatgtaaaggacgagcttctgctgtaacagagggtcgaggaagggcggttgattgcatctgtgtgtttgattctactgctgcttgctgagatattggacttggttgaggagtgttgcagtgcgggagaggagctgaaagatttggaggtgtagcttccgctgctgtgactgagggtcgaggaggagcagttgaattcataggttcagctgctgtgactgagggtcgaggaggagcagccgaattcataggttcagctgctgtgactgagggtcgaggaggagcagttgaattcatatgcctgttagtttgcactgcttgctgctgctgcgttgaatgttgagagctcctgggtgctaaaaaaagggaagagaattagtgtcgctgtttagctcatttgctttatccaattatactcttcaactttacctcttacggtagcagtatcagtggctgcactcttcactggacaagtagacttgtaagcattcgccaagagactgttcataacaaccaaactccttaacgcttcattcttcttcgcttgagcgttatacgcagcatctacctcttgggatttcctatcatactcactgcgtgcttccgccatcttcctctcgagttcagccttcaactctaatgtctgcttacaaacaacgagacaatgagcagagaggacaggaaaccgaataaagatagattaaccaagaattagaaaaagactaaccgtctcttcaaagcttttcagtaaggtcccttgttctctgctcagcttctccagctcgtggtcacatatgtcactgaacgaagataaatgtaaccgaggactctgtcccatatgattgttgggaagagacgtaaccgctgatgcattgactgttaatctgctatgtaagacgttaggaggctgaacaccaccttcaacgacatcctctgaatggttaactacacaacgatcacaacatacaaaaatcttaacattctagcacaccaactataattaaagcatagcgatcactatcaatgggcagatcctgacctaaaggagtcgatgtagaagtccaatgctccgctgctgttgtgatattttggacgggaactgacgaagatggtggacaacccgtaccttgagctctctgtagacgaaaaatctaattcgtaagcacaataaacgatctgaaaccaacaaagagtaacagtcgttttcaagaagcagcaagtaacctgatctgatctagcagaaccttgaatatctaatatagaggcatggtctggaaaacgactcgaaaactcttgaaccaaaatggcatcagcatcatgacttgttctattactttcttctctaatcaacggcgcttcctctacattcaaaggtaactctaaggaagcagctccggaaactgaaaccggtggcatcactgtgtcacaaaccatatcttcagtcaaaacctcaggtatatttgctgaagacaccattccaggcccatctagttgagtactacccgatttactctgcgcttttggtaaagaatctgtaacttcttgagtttccattggaaccataacatcaaattgctttcaccagtgaagaggtttagctacacatcataacatatctcagtctattagagaaaacaaaaccaagctattcaaatttacaatctttgaagaacacaaacacactaatcaccgagaagttgaaaatgagagtgacactttaacaatcatagtagcaaaacatagaatcaacgaaattaaaaccatattatatataaaaatcgtaactttattcccaaatttcatatatgctagattgtgaagaaccatttttttcaattcgattttgaaataaaaaagatccgtgaaaataaaattgcgagttattgtttgagaattgaaagagaagaaaacccagaaccgaaaatagacttaaccctaccttaaaatgaagaaacaaatg

SEQ ID NO: 13027 - DNA, 3000 bp, Unknown
  misc_feature (1)..( 3000): cDNA_ID_2991219_gDNA_ID_2214590_Annot_ID_186767 3000 nt of promoter + ATG
aattgggcaagctttcaagtgtacaaagtcagagtgcgattacttcttgcacaagtcatgtttcgaccttcccggtgagatccatcacaagtctcacacaaatcaccctttgaccttgctccattctccaccgaatggcctatccacttacacgtgcgatgcgtgcggtgagtatggatctgctttcacttaccattgctcagagtgcaaataccatgttcacgtgggatgtgcgtttgtccccgagaacgtgaagcgtgaagatcacgaacacccactcactctactttacaacacaccatgcaaaggtcgtaaggacggtgtggtgttcatatgtgatgtttgcgaagtagatgtgtcggagaatctttgggtgtattactgcaaagaatgtgactatgggacacatgttcattcatgcacgacaaatgaagacaatgggccaaaaaaaggaggagaagaagaaggagaatcaagctcattatcgacttcaaggataaagtcattaatggaggctgaaaaagagatgagagagatggcgataatacatcaactacagttagatgctcttgacgcagcaggtagttatgtcggttcatgggaaccaaggagaaaagattattggtaaatgatgaatcttgggaggaccatcaaactttgtttgaattatattcttttgttttcattctgatatcgttctttctttgtatggtttgcaaattattatttttcatgtggcttgttgtaatgttatgaaataaaaatagttatatattttgctgtttgatttatattcaccgattctgattgatgcttatatattactttgtttccatcgcttctaaatgtcaaatgataatattctaagatcatagcaattgagatcacatgcttaaacaacaaacaacgacatttttttcacgaatccagtcttactattagaggaataacgaatcaagaaaaggttgttaagagagaaaaagaaaacaaattcattctcattcatcttaattgggaccggaaagattacattggaacctcttatatagtaagagatactctaaaactgagataagtaaacaccacaaaacaaaattaagagattagggtgtgtttgggatttgcactgagcttggaacataagagcacacaagtgggtaacaaaacttgtctctagattcgccaagatccactttactcaagattccattatttccaatgatgtaagcaatattgcgagcgggaaggtgacatttgtctattatctctttatcaagaacaaccgcgaccttcttctcctcgtcaacgaagaaactcctaccgacattaggaaaccaaaaaccagcgactggtttcatatcaacagcaaataacaagttgctccacgacactgcattaggctcaatcttattagtaatccatatctcgacgacggatgcccggtgaaacagcaccgcaagctgctcttctctaacactagcaagcgtcacagtatctccaaatacggctcggaaaggcagaggcagacgcggttcaaatcttgaaatcaaaggatagtagaaaatcagggtgatctagtgatggtagaccatgaaatgggatctcttctagggcataccagtaagtgtttccctttagagacacgccactgtgtttgtacaaaatataccagtctggagtgaaatcatcaatgacctcccatgaattggagtataaactgtaaatctgaagctcacgaattcggtccctactggtctccaagtactcattcacgaatctcaagattttgtgattctttttctcgtatccgagagcgtacttcacgcacttgtggtagatagaatttctaggtaattcgatataccttgtttgtcccaaataagggttccaaacaacaaccctagaagagtctttgtctctgtccttgttgatgcataagaataaacccttggcagtgaaagattttagatattttgattccatctgcattgagattacctataggatctatagacggagagagtagatctacgctcatcaaggaaactctatagtccatcatcatcaccacctcaattccattcctctgtttcttctttaaaaagctctcacttttcgttatagtgttccactttttgcaggtcaatcgcagtttccccagagatttcaccggaaccctagagagcacctcctcctccatatcaattggaagatcgaacatcttcgaatcgaatctcccaaaatctctctctcttttccgtgtctatcaatccatctcttcacgccctcttttagtgatataacttatctttttcaatttgggctttatggtaatgggtcaaggcccattaaggggtctcgtttagaactcttgattaatgtctgaaataagttttatacatttcttcatttggagagtcatttcgcagagacgacgcatagcttcttcacttgtcagctctcaacgtttctcacctgaaatttcacttctgcttcgtcttctcgagccggatctctaatttgtaaagctccctctctctttcttcttgttcttcttcgtctccttctacactgatggatcgttatttagctatttagggttttgtgagttgcattaactagagtaactcgcgaattcttctcctttgccttgcgatttggggaattttttagctccatcagccaattttacaattttgtatgtatccgtggatttatcacatgaattgtggacctctgagttttttttttttgttaggttcttctcgctttagttttgcttttaggtacataaattttcctcctttatgatttacttgctcttgggctattttcttttatttgtttggtatggagtatggactctagagtttagtttagtttttttttttgggcacattggttggaattagtcttgttttattctgaattgtgtaatcaatatctgcatgcttgtggtgatgcagggaattcttatgtgatggtgtaatttaagttaag

SEQ ID NO: 13028 - DNA, 3000 bp, Unknown
  misc_feature (1)..( 3000): cDNA_ID_2710271_gDNA_ID_2214590_Annot_ID_186763 3000 nt of promoter + ATG
aaccactctaagttggaaggtaaataggagcgtatccttatcgactcttgatgggctatgcagccttttgcttctccactaatgaggacttaatacgatatagaggtgatacatcatatattcctacacacatgtttgggaaaaaccgagtctaagtatgaaaatttcaaagatgttatatccaacataatcatatgttttgctcatatgtttttaatactaagaactattttctatagtcttgattacttaatattagaatttagaagactagaagttttcatgccctatgagaataagcaaaatgctaaattttccggctacaatctacggtattaagtttgaacgaactattttcaatcttttgcaaagatttttcaagatagttgaagttaaccaaaatctttgatcgaagagagtcgtcgttccatatggtaagtttatacattgtgactgattttacaaatgtttaggaaaagtaattgggtagtatagtaacatcattacatcaacatgttggataatcgaagaaagagaaggtgggggatgatgggatcaatcaagaaaagcccatatggtgtgttccacagactggacgaatcaaacccatttattccaaatgtaaccgtccattaattgccaacccaagctttgtctcttaatttattctttactctataaaaatgaaccaaataagaattataaggaaaaatatcaaaagcattttcagaggaaagttttatactcttactgcattgttgcaattacatatgggtatgtacatatagccggtcctgagttttagaaggtcgaaaactagagaaaaaaattagagaggcgacaaaacattttttcgatgactagagaaatgacatgaataataaaatttcgatgaagtgaacaatatcgtatacgtttactaaaatgaattttctttgcaattcatcttcaatatataaatatgtgagtttccagtagaaacgaattaaaatgcaaaactgatggattttttatacattaacaagtgtggaaggtgtatccaacttattttagttttgaaatctgtcattttgctagttcgagactacattgaccgattcatcttatactattgtaatagcttaaatctcaatataatatgcaaatagtcttcgtattttgaggggtgtttggcatttttttaaaaaattttttatgacatgtgaataatctaacgaaatatacagtggtgcaattaaagcaatctaatccgatgagtaaatacgtcgagatttgtgaccaaattattactatcgtaaacgtagtttcggatagatttaatgaatagaagacaaatatggtttgctataggcgacgaagcaaatactataacacttgaacaaattagttaaaacatcatcaaatgcatgtatgtatcaagggcctagggattgattcaattcaccaacacaacacttacaaagagtcatctaaaacatgagggaaactggaacctaactttagcgtggactaaaatgctctataaacaagatgtatatctagaaagaaacaaacaaagtaaaactaatcagtagttcgtaaaaattggaaccaaattaaatatttaagagaaacttgaaagtcaagcagtgtggtccgtgcaagaactggtacaaacacatggctggattccaaaaaacgagtcaactccttggatcttacaaatccaccatcttattaatttttgaactctatgttactactattagtatacatgtccatgtactgacacacatacacaaatattgaaggagatatgtttttcttttatagtgattggctttttttgtaacactatattgttaaagtgtgatttcgaatcattgagttaccagtgactaaatatcaaaccgaagattttttgaatcggttgatgtttttgatcttgtaagtgaattttcctaatcgttaatctttacctttgttatatctctacattaataagtattcttgagatgatactggattccgttctagtggagacatatgatcattcacattcactaatatttcccttgttcatttctaatttgagtatgttcttgatctcggttcatcgattctccaccttcttcaattgcgcgcgatcggtttggctaattggctgtattctattaaccttcaatctcggcttcatcttaatgccagtttctcaacatgaggtgtgtatttcattacattaatcaacaaacaaattttaaattaatcagatttatatttaaatggacaaactctttctttctttattctattttttttcatccaaaaaaaacaacaacttgtttttatcatcataatttggctttgtactttatataaattacatatgtgtaaacaactatattagtaccacagtagctacgttttaaaagtgtataaatcatgtgatccgtacaaaaaaagttccactttgtccacacacacaccattgcactagaaaccttttttagcatctctttctaacatttttctttcttttgttctttttctctcaacacatagtctctttctggtcctacttcttattcttacagcttcttttgttggtgttcttgtgtcggtgccttaatattcaactttcctttttttgttttcacatcgaacatttcccctaaaagtaatctctctatctgttggagggttttacggcttttttgcttgtagtctaagcaactaaaacttttttccataaaccagattcatctcatctaattcctctttaaatcatactttaagcttctcttctgtaatcttattgctaatcatttcttgatattattatgcggatttgatctttcgtacagttgtctacaaacacacgtgtctgatccaaatatgggtttcgctttcttcccttttcttctggaaaatttaatgttcccaagttggcttaaatggttccttcattgataaagtcagaggacttctcgtgaagtcagaggatttgataaagaagaagac

SEQ ID NO: 13029 - DNA, 479 bp, Unknown; identical to SEQ ID NO: 13022
  misc_feature (1)..( 479): cDNA_ID_3027674_gDNA_ID_2214590_Annot_ID_186751 3000 nt of promoter + ATG

SEQ ID NO: 13030 - DNA, 3000 bp, Unknown; identical to SEQ ID NO: 13028
  misc_feature (1)..( 3000): cDNA_ID_2710271_gDNA_ID_2214590_Annot_ID_135412 3000 nt of promoter + ATG

SEQ ID NO: 13031 - DNA, 3000 bp, Unknown; identical to SEQ ID NO: 13027
  misc_feature (1)..( 3000): cDNA_ID_2710293_gDNA_ID_2214590_Annot_ID_135414 3000 nt of promoter + ATG

SEQ ID NO: 13032 - DNA, 3000 bp, Unknown
  misc_feature (1)..( 3000): cDNA_ID_2710297_gDNA_ID_2214590_Annot_ID_135415 3000 nt of promoter + ATG
atagtagacagtatacacttcataagacattctggctttaactgcacccttatggttgccatctgactaggcattgctatcagaagaggagaatctactgatcatcaatcgacttcaccaagttcttcgaccatttgttctgcgtcggctgaaacataaggttcataacagaatgtctcctttgtgttactttaatatgttagagatatggaaggatattttccaatgcaattatctcagttactttaagttttatttaacatactattttattttggtaggttgaaaatgagcttcccgaaaagatagagagattgatacgctgtgaggcttctgcttatcagaagctgttgatgaagagggttgaggataatttgggttcgattggaaatgcgaaggtgttgttttatgctctaggtgttggtagttttgcgataatgttgagttatttttttagttattttcttttgtttacagtctcgtgcagtgcacaactcagtaatggagcttcggaatatttgcaatcatccatatcttagccaactgcattcagaggaggtaatggttttcatttatctggaagtgttattgtaaatgcaatgaagcactggttagcgcactatggacaaccctaatgaagggcatttcacttttattaggtcaataacataattcctaagcatttcctgcctccaattgtaagactgtgtggaaagcttgagatgttggatcggatgttgcctaaactcaaagcaacagaccatcgggtaatgatttctctcttttccctcatggtaataggatagttgtgatgattcaatgctcttaaagacgaaagcttattattgaagttgggctaagtgttttcaagtagtgtgctagagtaccttgcattgcgttcgcctctggaggattaaagtgtctattacgaaaagtttttgaaattatgttttgattggatgaagcattactgttttttttccctttatttggttgcttacttgcttctatatcacttcacgcaaaacatcaagtcctcaactataagattttctgttatttgtgaaacgcacatatatattagaatttgtaacttttttgcatttttaccttaaatttaatactgaagcttataaatggttgttacttttatttatggtatgcatgaattcccacaggttcttttcttttccacaatgacaaggcttcttgatgtaatggaggattacctcaccttaaaggggtacaaataccttaggctggacgggcagacatctgggggtgatcgtggtgctcttattgatggtttcaacaagtcgggttccccatttttcatatttctgttgaggtgatgtatcatatatcatggctggctttctgtagttctaatctctatcgggatgattcatgttcatttttaatagatttagttatgttcctaaatactacaagttgtaaactcttttgggcgttcagtacgactgatatgtatttgtatgtgattgctgaatcattcatggaatttcagcattcgggctggtggagtaggagttaatcttcaagctgctgatactgtgatactattcgacactgactggaatcctcaggttagacctagcatttccatatgttaagttatagttgaatactgtggacatcaggccggacttgaagcagcatttattatacatttcaggttgatctgcaagctcaagctagggctcacaggattggccagaaaaaagatgtgcttgttcttcgttttgaaacggttagttttttatttattgtgctcaaggaaattaaacatctgaataaatgggttgatttgtgattggttgtaacttttaccctggtgtttttagtttatgttgtttcatcattgggctacataatgtagtgttgctgtcctaaatctatggctgttcaacatgacttatgaggcaaatagaacagtgcagtactcttgggagatactaattgtttcttggctttttccctttcaattgacgcgttattatataattaagctgtctgaactgtttgtttgtctttcgtccttaattatatcctaaggtgaattctgttgaggagcaagtcagagcttcagctgagcacaaacttggagttgctaaccagagtataaccgctggcttttttgacaataacacgaggtgaatcgagagacatcccttttatgcttcaagaagtttcaactaccaattctctaaaaaaattcttactttgtaacagtgctgaagatcgtaaggaatatttggaatcccttttgcgtgaatcaaagaaagaggaggatgctccagtattggacgatgatgccttaaatgatcttatagctcgaaggttaatactcttttgcatcgttttttatacagaataatttacttgcacaaattttaattttacaacagcctatgcatacgtggttttaaaataatcctgatagtttggttcctttgcactatgataaatctagaaattctaccaagattactgccaacaatttgtacaaagtattttactttctaactgtaaatatttgtcttctatattattttctattttcatagcatctactgttttttcatgtgttctgtgttaattgatagcttggcttcctttttaattcttagatgacaatctttttacatttccatgcatctcgattttcttttaactttcttgcagatctgacatttttgttatctttctagggagtcagagattgatatctttgagtccatcgacaaacaaaggaaagaaaatgagatggtatgcttgttcttattaactttattttcgggttatatcgttttatgatgtttatttgaaaaagatatggccgtgcaggaaacatggaataccttggtacatgggccagggtcagatagttttgcccacataccatctataccctctcggcttgttactgaagatgatttaaaactactatatgaaacaatgaaactaaatgatgtcccc

SEQ ID NO: 13033 - DNA, 3000 bp, Unknown
  misc_feature (1)..( 3000): cDNA_ID_2712990_gDNA_ID_2214591_Annot_ID_135419 3000 nt of promoter + ATG
ttcgagtcttgctactgcgatttattagcagatttgcagattaatggagacaagtgtgtagaagatctacaacgaagtacaattatagtcgttcgccaagattctacgcagataattgaagatgtccatcaagcgcatggagaaggagaagaatgtgtcgtttgtcatggatctaataagggtcagaaagaattgtccgtggtagaatcgtctatgtaacagttttcaaaatttgtaataaatagtaagtttagacggcaaaaaaaagaacttttttttacgaaatagttttatcttttgacgtaaaatagtatttgtgtatctccttaatcataatatttttacttttgatttagaaaatgatataattttaatttttgatgttaaaaatgatataatttttttttttttaaaatggatgacaaaaaatgatataattttacttttgacgttaaaaaagcgaaaaacaagttttactataaaccttcaaacttattttactaacactcaaacctcaaagtaaattttctgtttggatctttctaaaagataatagagtcatgtcaacagaaaactaaaacgtgtttttttttgtcatccaaaaataaacgagtcattcgtgaagaatattgtttacatatataatataaatcggttgggtacgatcttttcgtgtcaaaatatccgctttaacattagctactaaagattaaagataaagaataccttgtgaactcatcattgtcgctctgtaactcctccaaatacactaagaaagttgttcattcggttggaaaagacaccatctacaccagatttgaacagtctgtaagaacaactacatcttggttgtcggcaccattcatacacttcatcgtacaaagaagagcttccacctctgcatgtagtagtggaaattgatttcctctgagtaaaatgtgttatttttttttctttttaacctcaaaaagtaaatttattttgattgacgaaacaaaaaaactatttaatgtcaaaaagtaaaattaaattatttttaatgttgaattatttcattaaaaaaaatacgtttaaattttttgtcgacgggagttatggttcggttatcttttaggacaaaactaatagaaaacttaatttgaaggtttaaagtgttaataaaacagtttgtaggtttataatactaataaaaatatcaaggtttaaagtattacctaatatcacttataaggttaaaaaaatggttttctcaagattaaaatttgagcagatatgtgtgatatagttgctgggtttattttagagttaatgttctaaagttatatatatatatatatatatatatatatttttggtaaaagattaagttttataccattttagtttttttaacagaattacaaagattacaaggaacagaataaagcaatatacagaagataaatacaacattactactcaaattgcgatagatcgcttctaaatgcaaaaagataggctgcgaggtgaaacaccgattccgagctcgcgaggcttggaaatttgcgtgattgccacaagaccgaagtattggagtcctcatcttagttgccacgagcaaaactatccgaaacatgtccacaaaatctcgagatagaagcttatagtttctccgagaactaacgcaaaaacgcataggcaagcgcggacttctacactaactcaaagaattagtgatgccacttagacttattcgccgcctctattcaacactcaacaaccttgccaatgcaactagaagctcaaaatcgcaaagagaaccgacaccaacaaaacctgaaactacaaaactctaccttaaagtaaccgtagaaatgtgtcggggacgaagaaaaatggagacagagaaaccatatccatggctgaggaacttgccaccttcttcaacccactaaaggaggagagacactgtccaccaacaaccaacccacaatgcctctaaccgccacgatcaagccgaagaaccaaaaaggttctgagacttgcctccaaaagagactctcgccggtttcaaacacactaccaccgcagctggaggaaaaactaaggtaagagagaccgagaagagaaggtctgcttaccaaggctcccgctgatgtagcaaaagagccaaaaacacgaggaacgacgacaagtgaagaaatccggcgatgcaccaccggtttcacagaaatggaggatggtctcgccgttaagagccacgaccctgctacaaacgccggatcaaaaccaaaaccagaaacggagaaccctatacgcacaacgatagatctgatgcccaactcgccggaggttaagccttaaaccagcgccgtccatgagcgtcgaatttcagagttcaccaggaaagcaagcaatctatcccaaactgagcgtggttgacgcagtttcaccaccaacaagaggcaaagagcaattctcggagaggccaccattggagcaacaaaggctagatggagaaggagacaaacagagagaaagggaaaggagagatggcctctccgacaactagcaaaagagcgtcgttgctggagaagcagaatcaaagctcaatttagggtttcacctgctttatcgccttatttgggagttatatatttgatacccgaaattcacatgtcgtctataaccaatctaaaatacgaaatatttgcatgttaggacactttatttaaaattttaatcatttataacacttcccaaaactggcacactttttgatcttattcccatcttttccgcgtttacaattaccgtaacacccttggcggaagttcagtcgtccaaccgaaaaccaaccctaaccggtcctcatcactttactcttttttaccttatccaccatctcttgaacatacccttctcgattcaaattagtgcgcttctggtaaaagccataatccaccatactcggttattttctttcaattcttccgtggtctcccttcatttctgtcaaaa

SEQ ID NO: 13034 - DNA, 3000 bp, Unknown
  misc_feature (1)..( 3000): cDNA_ID_3027702_gDNA_ID_2214591_Annot_ID_186784 3000 nt of promoter + ATG
gtccaaagctttgatatataagtggagttttacaagagacttcttaaaacaaatgctagtgacaaatcacctagtgagtgtggaatgtggccgtttctaggagaatgagaggctatattctctaagttcactcatgaaatccaggattgttcaaagccaaaatgaacacaatctagagaacttgtttttacgagaaaaagtagttgggttttacctgttgtctaggtttacataaaaatctgggtggttaaagacatcatgttcacctcctggccaagtaaattcgacaaatattaacagtgaatagtttaaggctgaaaaatactactatctcatacacatctattttttgcatatactcttgaaagttgagtctgtaaagtctaagtcagtttaggttatcgagtcagtcaaaagtctcaaatgtttagagtcaattttattcatgtgggggattgttggaactcaattttacacaagtggctccggctaactcttcggtgatttttccggtgatggccatcaccggaatgaccggattatggagtctttgaattccttgtaatgagcactataagatagtgtagttacatataaaaattgaagttattatgaatgagtaattgaggtccaaagtggtgagcttgaaagcttataataacaaatattgacaattgtcccatattagaagttttaagatctctcctctagcatatatggtgctacccatttaacatggttcactagctattgggaagggacactatggtgtaggagatgcaagtcctttatgcaaaacaacacacacacacgctccgccgccgtcgtgccgtgccgagccgggcttgggccttgggctcttgggaaatggggcctttggcccacaaacaatgttctttttggggaaaatacttatgaggctttgttgcattatttgtaatatttgcaacatagtttttggcccaaaacgaaagcccatatcgtttccataactaaggtatattcggaatattaaaagcatatccgaatattccttattcgaatcttaattccttaaacggttgtgataatggctccgctaatcatgcccacgtctttgacttgcgcatcactccgaatcccacgatctttgatttgcggattgcatttcctcacctctctcctataaaaggaacacatcttcctctcattgtactcactcgttttttttgctaaaagctaaaacgaaactctctccctttctccctttcttctcaaagtaagtcaagagtatatcgtttatttcatgttcgcagattccgctatcgagtgctgcgataccggttttatagtgattgtattctgcgatccactgctcataaaaccgtcacactgcgggagctagtttgaattatggaaagagatcaaatctcgtcttcactcgttttcgaaaaacgtctttcctaatcgttttataaagatttttgatttattgcaaatcaggatttcgcggtcctacaatccattcaatcataataggaaggataaaaaggggaaaaatgtcaaaaaaatcgcgaactttcaaatttgggacaaaaaagcatgaattttcgaaatatcaattaaataccaaagttattgttgactttagaattaattagataacttttatcgattttgccaatttgggcacgatgttaagtcaattgacggaaaaattaacagagttaagtcttctgttataaattccgttaacttatgaaacaacgttgttttgaatctaattttttattacaagttcaggaattgaactcgcaacctttaagataaaacaacattcctttatgggaaaaacgtcgaaaaaatcaccaactttcaaatttgggacgatttaatcttgaacttcacgaaagacaaataaatcgtaaagtttttgttgattttcgaaattaataacaaagttattgttgacttgccatttcagtcatgtcgttaagtaggttaacaaaacgacgtcgtctacttcaacttccttcttccgttttctcttctttcgatttgatttgggctgaggaacattgttcgtctcctcaccagatgggattcgaatcgattcggcctctataggatttgagataatgaaatcgatttggggatttagggtttaaatttgtttcaacagaagaaacgatgttgtttgtctctacaataaacgacattgttttgtcctaacagagcagataaacggaacatgaacgtcgtaaaaaaattctgttaacctatgtaacgacatgactcaaatgggaagtcaacaaaaactttgtcatttatttagaatgtcaacacaaactttacgatttatttgtcttctgtgaagttcaagattaaatcgtcccaaatttgaaagttggggatttttttgacattttttccattcctttaccgactaagctgaatcatttatttgtttgtttctcagaaacatacatatttatataggttataacaaaatgcccaaattaataaaagttaggtttcgatccctttgtcacagtcaccaaataggcgagtatcttgccgtcgtcaactcatcgcatcctacacaacacgaactcaattaagtagaagaatatctctagaacaagaaaccttaatttcagcacaattttcagaacatgatcaatctttccctaaccaatttcaaaagttttttccaagagaaaacttgatcaaaaaatgcaaagatgatgaattctttttaatcgttgaggtttacatcttaatttttcgtcccaaatttgaaaatttacctttatttttgacatttttccaaaaaataccaaaacaaaactttggatgacaaataaaagattcacgtgcatctcacgtgcttcgtgataatttaacaaaagtgtagaattttgataattttgtaaaattgtaaagttgcgtttgtcttgttgaatcgcccgtcactaaaatcctctccgagaatcctcctccgatctgccactagctatg

SEQ ID NO: 13035 - DNA, 3000 bp, Unknown
  misc_feature (1)..( 3000): cDNA_ID_2712980_gDNA_ID_2214591_Annot_ID_135423 3000 nt of promoter + ATG
ataaatacaaagaaagtgaggattcacctgtttgagcttcccagtgagttcaatcatgctagcttgaatctccataaaagcctgttgtaactatacacattacaattccattttctgcaacatcttactggggaaagaagaatattccactagaaaattgagctgatttaagagagagagaggtactcacagctctggttgcttcgtccgccatgtctgcagatcttgatctttgaacgaaccccgacgtgctagagaagggtctttcgttttagggtcaaaaagttagaactacccgggtcgggtttcagacggcttagcccggtttatcaaggctttattgggtcaaatcggcccatttataattaacgatgattttatacttttaaaaaaatatgtgtttgcattggaacaaacaattctacccaataacacaatttaatttacccatttggttttagattgtaccatgattttgtaaatcaaagactcaaagtcattgtcttttttttcttgtataatcaaccacccaaaccattgtttgtatcgtaaccaattcagctaacaccaccaaattattttaccatattatattttaagggtgatttgcattatcatacactttcgaaaacatgttgagcaaaagttttgccgacaggcacacttctgatcaattataagggtgatcaattataagggggaaaaagacttaattgaccctattaattaaatcaagtaaaatcggttatttagggtaagagtttggggaaaccggtttattttgtttttgcaaaccggagaaagcatggaacgaataactatgtcatcgaagtttgaatgacgatgaacaaaagaaagagaagctctgaagtttgaagcaactaacaaagatatcataacgatggtaagaaaaaatggattggtaacaatagtagaaaatattcgctgatatattattgactgtctaagataaaaaatttatatattgcagggaactgaggatggcttctgttatgtaatatgcggggattggaattgcgaggaggatgagaagtggtatgttgaggttaataaggtaatgaaatctcgaattgtgcctgtatataaaggtattaagctatcagaattcgtggaagccattagagtagaatttggaatttcaacgagtacgaaggttgatttaagcttctgtaccccaaatataagagattttaccaccggagataaaacaccaccggtcgtcgtgacgactgatgtggggctaagttattttatgaagatattggaagcaaatgttggaaccaacatgtttgtaaagtttggaacatcttgtaaaagagttttaaacaattctgaggttgacggtgggctagtgaagaccagttcagttaaggaagatgacggaagagggaataagtcgaaacgtttatgtggatcagaagatagtatatcgaaggtcgggttgaaagaatttttgctgtcctccgaagatgaagaatttgttgcagaacttgaaactatagaaagagttataggttgtgaacgaggtcctcttgttagtgaaattttatctgaagatcttgatgatgaagatctagtggatgaaggaagcgaagatcttacttgggatgagattatagaagtaaaaccccaatcttatgatgtggagttttggagcccattcttggatgaggacatgggtggctcaaatgcattggatataatatgtgtcggggaagaagatgctgatgttagaatgggatttgcgtcaccaacagtagacacagaattggtggccagtgtggaaggtgcaggttcgaacatggaaattgatgatttgataacgtcttcgattaagcatccaactgatttacttgcaaacagcagtggaacgggaaaagttgttaacaatagaacaggtgattgtaatacaaatgaaactgcaagagaaaataggaagctgtcggatgtggacgatgaagagtttgatattcctcctctgtttgatgacacggagtatgaagctgccataatgccggatatagatagggctgacggtgaagatgtatataaaggaaaagtttatgctagcaagtcggattgccaaattggattagctatatatgctattaggcatatgtttcacttcaaacaaacacgcacaaaacttgattcatttgttttaaactgtgccgatgagaaatgtgattggcgggtaacagctcatgaaatgcctgagagtggatattatgagatacgcaaagctaaactagaccatacttgttctgtggaaactcggaaaatgtacaagaagaaggcaacttcaagggtgatagcagctgtgtataaagcacaatatagtgagcctgttaaaggacctgtcccgatggatttgcaaaagctgattcttgaagatttaagagtgtctgcatcatatagcaagtgttatagggctagggaaaaggcagtagttgatgtgttaggggaggatgatgatagcttcaccaaattagctgaatatatggagcttataaagatgacaaacctaggtaatatgacaaacctaggtagtatgacagaccttgtgacagatattgaggaaaatggtgatgaacgttttctttatatgtttctggcatttggtgcctcaatccagggcttcagatatttgagacgggttttggttgtggacgggactcatctgaccgggaaatataaggggtcttattgactcctagcggacaagacgcaaattatcaagttttcccactggcttttgctgtagtggatagtgaaatggacgaggcttggacttggtttatgtagaaggtagagagaattattgatgacagtgcaacactaacaataatttctaatagacatccaagcctatacgttgcaaaaagcagagtttttccactagcacaccagggagcatgtatagtccatctccaacgaaatgttacatcaagatataagagcaaaggattagcaaagatg

SEQ ID NO: 13036 - DNA, 3000 bp, Unknown
  misc_feature (1)..( 3000): cDNA_ID_2712968_gDNA_ID_2214591_Annot_ID_135427 3000 nt of promoter + ATG
aattctatctgagttagccacaagagacccctatacagtagcaatgacattaggtaaataatttgttctattcccccttatattgtttttttcattctatttctgtgtgtagagacataactgtttttcattcaaaacttgatatgtgtctcttgatctttttgctgcagaaaagcttgcgtctccaacaggtatgctcaccaggccttttatctcttgacgttaatctttttgctggttatttcgtgtttatttgtgctaattataaagaagtgtttggaacacgatctgggttagctgatatacctttcttctgtacaccaaattaggggctttgcaagatatcctgcatatgaatgatgttcttgctagagtttctctggctaggttgtgccactcaatatctagagctcgggcattagatggtaagtactatcaacctctttctgctgcccgttctcgctctgtttttttttcttcttatctggctatatgggagagatcttttgagaacttacatgttgctagtttcctttcaatcttcctacagagaggcctgatattaggtctcagttcaactcaattctctatcagctactcctagatccaagcgaaagggtatgctatgaggcgattttgtgcattctgggaaaacacgataacactgagaggcatgagttctatgactttgatttctcttagttcattctttgtaaggtattgaataaccaaaatgtactgcatcatttaggatggatgagcgtgctgctgggtggtatcgcttgacgagagagatcctgaagctgccagaagcaccatccttgtcctccaaggataaatctaataaaaccaagcgtccacagccccttattaagcttgtaatgaggaggtactcctagcttggtggaagactgtgtttagaattgcagatcttatggattccctttcctcactagaatgttgctttggattgtaatgatcgttatggttgtgtttcttgttaaagaactttcgcaaattgatcctgttctttcaggttagagagctcatttcgcagtttctcaagaccagtacttcatgcagcagcaagggttgtgcaagagatgggaaagagtagagcagcagcgtttgctatgggattacaggacattgatgaatccgttcatgtaaatgcattttctgatgctctagatgatgctgagaccaatgaaagttctcatccagaaggtacattgtcagtatcctcttaatatgaattacaatcttttttttttattttgttagatgtctgacagatgcacaaatatatttctaatttcgtatggagcataaaattgtatgcaagcttttggtctataagagttttgttcaattttgttgtattattatttattatacgttgaaaggtcaccaactacaaatgtgagttaagtcattgcatctatgctctgatggcgcatcaatatgctagaatcgttacaaaactacaaatgtgagtaaactcaatgctctgatgtccttacaaaaatagtataatatcagtcttctcttcagacgtaaacaaaggaacatgtttttctgtcctattgctttgattttctttaccgaattatctaaatatgtagggtatccttatatctttcgagttttaacatgttccaaatcactttttaccttctttcccactctttggttacttgtttacccttatttttagcaggaattctatatatgttctaacatgttcctactttgtatatgttcgacttttgcaggaattcggagaacatcatccatatctgcagggcctggtcgcagtgatacaattgcaagtttgctagctgcattaatggaggtggttcggacaacagtagcatgcgagtgcgtgtatgtccgggcaatggttatcaaagcattgatatggatgcaaagtccagatgaatcattggatgagttaaaatcaatcattgcctcggagctttcagatcctggttggcctgcagctctagtcaatgatgttttgcttactttgcatgcccgctttaaggtaagtatgatgttttcttggcttttttgattttccagtgtagttgcgaacagtttcaaagttaagcagctctgttgtttgtccacaatcctataagtatttagtagttctctgatgtacggaatctctttaatttcttagattttgtaacaagagttatctggcagaaacatgttacaccatggactctatcaattttcttatccattgcgttgaaactgaagaaaaacttgttattgaggagtaatgttaactgttttcttctgactagttaactctttttaatttttctttcacaggcaactccagatatggctgttattcttctcgaaattgccagaatatttgccaccaaagttccagggaaaattgacgctgatgtcttacagctgctatggaaggtattctcttcttacggatataattctaaagctattataatttacttacataggttgtatatttcgtcctttgatcaaaaaaaaaaaaaaaaaaaaaggttgtatatttcgtcctgtttcaaatttttattgtgtttaggacatttttagatctttaagtttgtacgcttgtttatttaatcttttaaagctatataattggataaaaatcatatttgtactgtatatttgcaaggcttaaattattgtgggatattttactgaatttttgctacctcagatagtattttttaacacaatttatcatctgattgacttctagacatgtcttgttggagctggtcctgacgggaaacacacagctctggaagcagtcacgatagtactcgatctaccacctccacaaccggggtccatggctggactgacatcaattgatagggtctctgcatcagatcctaagtcagctctggcgctgcagaaattggtgcaagcagcagtaagacttcctcataaggttttacatgaatttggtaatgttttcaacacatg

SEQ ID NO: 13037 - DNA, 3000 bp, Unknown; identical to SEQ ID NO: 13034
  misc_feature (1)..( 3000): cDNA_ID_2712964_gDNA_ID_2214591_Annot_ID_135428 3000 nt of promoter + ATG

SEQ ID NO: 13038 - DNA, 3000 bp, Unknown
  misc_feature (1)..( 3000): cDNA_ID_2713019_gDNA_ID_2214592_Annot_ID_135436 3000 nt of promoter + ATG
ataataacatttaattgtttgcgtataaaattgcacagttttattacttcatgtctttttcttctaagcaaaaacaattgggtattaaatgtccaaataaaaattaattgaggttttttttggtttttttcgttcttctttagttgatgttttataaaaatgcacacctattaagaaataatataattatataattaattttgcattgaaaattaaaaatatcatgtatttaaaaacaaaaataaaagcttaaaacatcatttataagagaacggaaggagtattaagtgtaatcttttgcattttgttttaaaataagtgtcattttgtcatttcaatgtatatgtttgataataagattttcagttttattcatattatattaatgtataaaccaatagaaaatatataatatattaataaaaagtaacatagataattgaatttttttaaatatatgtgtaacaatcttaaaacacatttctaatgaaacaacatttgcagataaattgttttttatcaaccacatgttgttcaaatcgagtaagataaaagtaaagttacatcaatcttcattatcttggttgactttaaaatattttccaaaaaagatataaacttgtctggcgtatttttacttttggattattttatttctctcagttgtttcatatatggacggagtatataggatttcgcacgtcggtttgtaacttttcacaatgataattattcgcatttagttatcatcatactccatgaaaatgccttgttactccatttacgtatttaaattttattgttccttgtcttgtccaactcctaaataatttctgtcaagaagaatttttttatatatttttgtcataaaaaagagaagagttgtctaatattatatagtaacaagtttagagttttcgtgttcgttgaggacttttcgtttccacattgtcaaatactataataagttagaattgttcttttttatttcttcttctttttattgattttcttgacaaatgggtggatgacaataaggagtgttgagtttttctatttggtagtcgtaagccaataaaaactatataacagtctatatcacttgaattctgactgattaaattcttttaaaacgaattattctctttggaaatatttctccaaaacttattttaatattataccttgactatttgattattcttcccttttattattgacttttctcctgagaagaacaaaaccttgtctgattcggtttgtcaaggtgtaatatatatttttttttttttatcaattctcatatatataatgatgttgagatgtattagtcaagaattttctatactttttaagcaaaatcatgaaggtttctatgaggcttctgagtcatttcttgagcatgttcatatgtgacgtccctgtagccctcatagattaagaccacaaaacttggtctacacaagttttaacaaaagaaatagcatcaaaaactttgtctggtaaacttagatactttgaattctgtcataactatggtctatggtataagttatgagtggtgaataaggttcctcataacttggttaaagaacatttcttaattaggacttgtcgaaaaagttgtaatacttcatacttgtagtaatatacgtactagtgatgacatgctataaaagtcatattggtttaagaatgataacataaccatttgtatcattagttgtctaattttacaagagccatttgtcacataaatatataaggttacgtgtggaatcaaaaactaggtagctaacaagtctttaatacctatatgtatcgttaattcaactgctgtgtgtaggtttgattctgatcatgcgctcgtgtgcatgaaagtaccacacatgcatggaagtcaacgtacaagttgataatatccactaggtccgatctaaaaattatgtcacttcaactctgtggcacggcattgaagtcatcagccaccatgcatcatctattacgaaaccgatttctttggaatctgaatctgaatgttagtcctagtcccactaaaggttgcttcgtcgtaaaagttaaagttttttttttcaagttttttctttctttctattctataatttccaaaagatcagattacatcaaattcagaaatagaaggatagtttaagttcatttcaatgaaagttgttgtagcgtcactatttttttaaaatatccgtttttaacaaatttagctaaatgacatttactataatgtttgttttgtctattatacataattaagaatcttttaaatggaacgcaaggagtattaaatattgggtttctgaccaaaagaaaggatggcattgattactagagatttcaaattctttcaaatgatatctaagtacgtacaaataatatctaagtacgtacaaataataatgtatttttaaaaataatatgctcatatattggtccaacatttaatggacaataagaagacatggtgtgaatatatctgactcactagccgtgcatggattggctgcttcagaaatttctgcactctatccacttgaaggtgacatatatatacacattttaatagtggttattggtacttacttggagtataaatatacgcacatatcagatcagattgtatcattattgtctacatatctttttgaagccgtcataacttgcaagtaaagaatggtcagtctaatgttctttagttcggcctcacctttatgctcttctccatcaaaaattcccaaggctaggtacttgtttacaattataatgcaagacatggattcaaatattttacgctattaagaagtctttctcttataatcggcttcttgatacacttaacttcactctttcttctacagtttggacttcgagatgaagaaacttggtaaatttttctcatcttgactctcaaaactatgaacagaatatagttttatagttggttatcataagtctcttgtcctaatt

SEQ ID NO: 13039 - DNA, 3000 bp, Unknown
  misc_feature (1)..( 3000): cDNA_ID_3027753_gDNA_ID_2214592_Annot_ID_186810 3000 nt of promoter + ATG
ctcaccttaacaaattgattctaatagcaattaaacccaggagagactctccttgcgtctgaaacagtccagaaacgtcctgcaacaagtccacaaccaaaagcaaccttgaagcaaactggacaggaaaaccagaaacaaaccgtctcaaagacgaaacctacaatacaagctaaccgttaactattcaatcgctccggtgaaatcctagctgcagacgtcagaaagctgcccacaaaatctcgtgccgatcggaaaacagacgagaccacgatctcagtttcaatcttcgctgttcctaattcgcgtatgagaaaacgtgtctcacgaaactgcgaataactcaaccaagtttaatccaaattcaattctgtaaactggagaataacgataaaggacttgggaatacctctaccaaatttcgttaccttttaccacgattttatatgacgaaactgatttctcccaaaccctaacgattctgctccttctccttttctctctttttctcctttataaaacgaaaagtggctaactaaagccctaatttcgagtttccttattttataggcacactttagggtttccaattaacccaaccaattaaaccggatgatttaaaaacaaaccctaaccgattttccggttcacgggcgttacaaattattacttaaatgggttaacccatttaacaactcagcccatcaaattaaatgagttatgggttgacccaacccattttgttaaatgggttgggtcaacccataactcatttaaccctaaactcatttgattatgagttgagttgagttgggttacccattttgacatccctatacgtacataacatttttcaaaagtatgagaacaactatactttaacaatatatttttatttaattattatatataaatagatttatgaaaaaaaaaccaaaaaataatcaaatgtttctaatgtataaactcaataaatattgtgtatgtcgcctttaataaaacataatctaacatatttacatgtccacatatatgtacaccgtaaattgcatatacatacacataagaaatttaatgaagggtataattgtaatgaatgtgtacggaattctcatcctctgtctatctatcctcgtagacaattgttagaaattttttatactcattttaatgtggtgtcatgtacgcttcaacaaatatttttatgtacgtacataatataagatttatgtgatttaggtatttttaggatgtaactgtttggagcagtcgtacacgtgtacgtgtatctcaagattatcgtgtacgtctacgtgtttaatttaaaatcttatctattctccacaaataatatcatataacataacacttactaaaaaatttcaaaataacaattaaatagaaataacagcatcaaaacaaaaagtatcacatatatcgtactaactacataacatttggctaactcgccgtatgcactatcgtagataccaaacattacgaagattcgtaaaaagaccataattctctttaacagaaccagatataattttactgcagcataccaagtacttgatcctccagtgttgataggttctcatctaaacaacatcaatgcgaacattttttttattcatagtagggatctaagtgtaaacatttctgtgtcattttgtccaatccaataaatacagtgtgaatattatgttaatgatgtgggaccttcttgatgaaactaaccatgggttaaggtgaaaacacaataaaaaccatatttgaggtaccaaatgtatttgaaaacaatgaagaagtagatgaggaagaagaagtcgaggacgataaagaggatgaacagaaagagggtggtgatgacgaacagaaagtatgaggaacaaatatacattgaccatatatttttatttagttattatatatgcatagattttataggaaaacctccaaaaatatattccatctaatcgaaataaccaaagatttctaatgtacaaactcaataaataattgtgtatgccgcttttacaataaaatataatcttacatatttacatgtccacatatacgtacattgtaaattataaatacgtacacttaaattttttaatgaagggtataattataatttttgactcgtcttcaatctctttaaccctaattttgcagtctcttgttaacaattatctcagaaatcttgatttttttggatttacgttttgaatgcttattacatctaaatattgtacatctagcatatttttagttcaaaaagataaagaatttgagttttgtttaattgtccagtggttaagtcaattacttcggaagaacacttgctttctcaccggaatctcgtttatcttcttcgatgacacattcactttcgtttttttcgttttcaattacacatgaactcagatttttgtttttttgggattttcgtttttgtttacaactaaacactgtacatctattcactcctaactaagttgtgtgtacgcactctacatcgttacaaagttaaagggcattttcgtatgaatttgccttaatggctaaacattggaaggcccagcccactctgccaatacttgaaagaaaaactcaggacggtgatcacggtgaaaataacttttttttaatactattaatcatgattatctagtttttttttttttttttttttttttttgtttacctaattggtttgttcaatatcttaccactaaccactaatctctttcaaactttgaaaataatagatagatgctatagaaaaataatcaataaaaaaagactagcaggccgacaatggaaaataataatcaaagtattttggtcattcaagatgcgtgttgcggagagacttatgggatgggatagaactcgagggagtacctgaagaacctgagattgttgttgagccatttctaacgatatcagatggaataatagtccattttctcatggccacatgatgtgatc

SEQ ID NO: 13040 - DNA, 3000 bp, Unknown
  misc_feature (1)..( 3000): cDNA_ID_3027767_gDNA_ID_2214592_Annot_ID_186804 3000 nt of promoter + ATG
aaaacgaaggcttatcttcgttatagtaaactgataatctcttaaaggaacactcccattcactaaaacaccaaacacacaaacaaatatttcatcaccataccacaacttacaaagatatatcataaagttatcaatctcaacaaacctggataaatccaagttttagctgcctcatgatcaattccaactaaaggactattatcgttatcgttacaccactcggaaacaacttgatgattttttggtttatgttcggttctaccgatgaatttacgagagtagattgtcttttcgcaggtggcttagtgagatttgccgtaattggtggatgagcgtttgtggtttttcagacaagccatgtcgatttctttgactgctgcttcccaatcgaatacctgtaggagaaaatctagaagttgaataattaaaaaattgattcaaaaacgcagaaagagattgaacttacgccgtcttcttcgatattggaaccctagatcccacccaagttaacaccaaacacgtcgtatccatgatgatttgtccacactgcattctcatttcaagtataacacaataaaccaaaaccgatattatcttctattaaatgtataacattatatcctaaccaaaacctaataaatccaatcttgtgactcatatggttgattcataccaacacacaaaagttcatacatcaatgaatatcaccaatttcacgagtagcgcccatctttttgttgaccattagttcacttgtttgtagacactctaatcattatgtggattgatcattctagagtatatcgtggatgctgcaaatctcaaaaaatcattagccatgagagaccaaacaaacaagctcaaacttatgtcaaaacgatctagagtgcaaaatgtatcacaatcttaaggaaacctagaactttattatttcgatgcataagtttttaccgaagcgataatcaccaatttcacatacatcatccattttgctttgacaatttgctcacatgtatatggatactcttatcatcgttccttgataaatcttaccaaaactttttatacctcgatataacaataaacatataaagaaagtttgcgtctgaatggacagattcccttggatgacatcaataagtggtggttgagatcgttggtggggatgaatgtatgatggtcgtgaggatcaaaccaagcacgaatcatgggactaagaataaagttgttggctttggccaagcactcgctaaaacgaattcgtcgttgtgtcaaacaaatccttcagaatcccgacgactactgctccctactcgctgaattcaatgtgtcaaaccctaaaggattgctttgcccgtagaatagatcatgctcggaggcggaagcagaggtggtggtggagaagcgatggtggaccatccggaacgattgcagtgagagatgaagtgttgaaaattggacttttagttttgatttggaatattgagattcccgtaaaaaaattggttttgattttggaaagagagagaaatgaggacgatgtagaagagagttgagagagacgacgtcgtgcaatgtgattaaaaggacaatttaggaattttgatttggtaaagtgccttctattttcaaagtgcctaatcccgtaaatagttttctaaaagtgtctcatagtgtaataacctctttttcaaattcctttgttgttggcattccagattaaacaaaaaacagtcgaataatcaaataaacggatgggaatgtgacacgtttaggcatttttaaagaatattattccttttgaggcactttctagggaatagacactttttacactaattcctttttatttggacttttttaccctcaattcaaggaaacgtaattagaaataaaggaaatctctctctctctctctctctctctctctctctctctctctctctctctctctctctctctctctctctctctctctctctctctctctctctctctctctctccccttccatgatttgtagagcctctctctccatagtttctgggctcgattttattccgtctccatcgcttctgggctctattcctctttcgattatggcggcggctcaccagaaatcggtggtaccgattctgcaaacaaataagagaagcttcttaaacaattcgatctcgattatctcaggaatttggtaaaagttctatatccataaggtcttggaggcggaggtctttgcaaactgtaagaaaaatcaacaaacaattttttagtatccataataacaagtccatttaaatatatacattcggaaacctttttactgatccatatccattctatataacatgtccataataacatgagattcgattaaccatggtttgtaaagaaaccaaagttccatgtccataaggccttggaggtggaggtctctgcaaactgaaagaaaaattaacgaacaattttttggtatccataataatgagtccatttaaatatatccattcggaaacctttccactgatccatatccattctatatatcatgtccataataataggagtttccatttaccgtggtttgtaaagaaaccaaagttccatgtccataaggtcttgaaggtggaggtctctgcaaattgaaagaaatatcaacaaataattttttagtgtccataataacgaatccatttaaatatatccattcggatactcgatgctacgtagatgaaacgagttttacctatgagagagagcaaaaatcaaatcaagccgccattgttgaagaagaaaaagtttcttaaagaactgaatctcaaatttatgtcaaaacaaagatttaaattgcaaaataaatcacaatcttaaagaaaccaagggcttgtaccctccaattaagataatttcttctttggcttgagattgaaatcaaaaaccaaaaatcaaattaccagagccacccatttgctcaagacggtggaggagcccgtgatg

SEQ ID NO: 13041 - DNA, 3000 bp, Unknown
  misc_feature (1)..( 3000): cDNA_ID_2713015_gDNA_ID_2214592_Annot_ID_135438 3000 nt of promoter + ATG
ctttcatgagaatggcctctttctctctccgcaaaaatatgctgaagaccttctcactgttgcagctatggatgaatgctccccaatgcctactccactgccacttcaacttcataaggttcctcatcaagaagaactcttctctaatcccacttattttcgaagtcttgaaggaaaactgaaatatttgactttaacaagaccggatctttagttctctgtgaactttgtctgccaaaagatgcatcagcccacaggtttagattacaaccttctcaagagaattctccgttacgtcaagggcactctctcaatgggcattcacttctcgaagcactctgattttaagcttcgggcttacagtgaaaaggaatcagctgacagtgagtttcgtcttcgtgcttatagtgacagtgactagggtggttgcaaagagacacgtagttccacaggaggttattgcacgtttcttgggactaatctcatatcatggtcctctaagaaacaaccaactgtctctcgcagttcaacggaagcagaatatcgctccctttcagaaacagctcaagagatgacttggatttgtcatgttcttcgagaattaggcattcctcttcctgttacgcctgagctctatggtgataacctatcttcagtctacttaacagcgaatcctgccttccacgctcgaagtaagcactttgagtttgattaccattatgttcgagagagagttgctctaggctctttggttgtcaaacacattcccggtcatcaacagattgctgacatcttcaccaagtccttgccatatgaagctttttgcagtatgcggttcaaacttggtgtggattttccacccaaaccgcgtttgagggggagtatcaaaccgacttctcaaaacgataatattttgtctgctacaacgaatgggccaaaggtttgtgtaaccaaaacaaacgagttgggccgaaaaacacaggaacccatcaagtctaacaaagaaacgatgtcgtgcaatgttcaatgatcatctcctctacaaacagacaaaagaaacagagtcatgacgaaagctcgtacggaggagttacagcttttaaaccaattctcagccattatgggttagagacaatgggatgaagacatctggagagtttacttaggttttacaagttcatgtgttgtgtataaatactctatgtaagccgctgtaaacccttaagaaagagaatgaatgaaatttaagagttcaaggtttaagcttttcatacaagctattggcgtatctcttattttccaattttttttttttacgaagtatgaatataatccagtggcattggcatatttaacctgaatcatgtaaaatatgggaaaataattaatatgagataaagagaaagtgaaattaaagaaagagtagtcataaacttgaaacagcttctttgataaattctatgaatatgagataaaacaaaacgatggaaagggagagaaaactgattaaaaaaattgatttgattgagagttaaataggatcggagataaaacggtttgaaaacatgatatatttcattttgaacattgattagtaaatttaggatctaagaacagttttagacaaaatagaaggcagatatagatatcgaagaataatatttttattttagaactgttttttaacagatttttatttttatcaaaatcgataatatttttattttagaactgttttttaacagatttttatttttatcaaaatattgaaacaaaatctatgtggcaaatttttatggattaggtgatttgtgatttataagataaaggatatccgtctatttaggcgggtcttatcatttttttcttatggataaatattattatagaggtagcaaaccgtacatgggctaaaagccctacaaacattaagattacaggaaacattttttaagcccaacataagcttcaaagcattacttaatagagaataaatgatatgtggctctatccaacttcacatgtcaatagctctaaactgaacagctacacagtggatgaataatctaaagggttttgtcatcaacctccgccgtccaagtacgattccggtgagaaaatcatcgccgatattaaaatcgaagcttgatttttctggatttcaccgaatgaaaccaatcgaaactccatatagagaattaacagctaaagacaatctaaatatgcaacgaaaatttcttttttttttcaacttaaaacataaatctctggattgattcctgtaaatcaaaaattcaaaagatcgacccaggtaataataatctttaagacactaatcacataaaccgctattaccaactcataatttatgaaattattgaaaggaaagcaaaagtcaccggatacaccagagaagtatggcagaagataactagaattcggttaacgccgtttattaaacccgatgttaccgaacatgagccaaccatctccactaaagatcgctggagatgctagatgataaacccgactaaatggggaaagataagcaccaaaataacattcggactgtgcatcgaagggaaataaacttttactattgtctgaatttttctttttcccgacaaacgttattcattacttaaagagagtcattacaatgttgttgctcaagccaaataggtagagtatcagtgtcagaataaaagcatgcagaaatacaaccaaattttaaagagaaaaaagagagagaaagcatttgttattaaaaaagtgaatttgtttttaaaaaaatcaacacatatttaggctattgtttctagttatgattatcgccaaaattttcttttgttgggcttggtttgttttcaggcccaatagaaattaaaaaccatttcaaatttctactcttttcgtctcactgtcaccttctccgacggtcagacctcaaaaactcatcctccaaatttgatacctcttccctcacaatctccaacaatg

SEQ ID NO: 13042 - DNA, 3000 bp, Unknown
  misc_feature (1)..( 3000): cDNA_ID_3027781_gDNA_ID_2214592_Annot_ID_186800 3000 nt of promoter + ATG
taatactttaactcagtcatgaatttctttgccgaaatccagagactccgggtctgaggagccagtgcatatacttgcgtattatggcacttccggtccagcattatatgatgagttggaagatttcttggtgaagataagagatgggcgtttcgttcgtgggagagaaatggtattgaaattgaataagctaaagatacctttaaaatgggagcatgttaccaggattgcaggcaaggatgttgccccgggtaggatgcatgtagcccgagcgcttcttgaagcaggctacgtggagaatttgagacaagctttcactaaatatttacatgatggtggacctgcttatgctacgtaagttctagttcttcactaggttacctgatttttttgaaccttgcgggatttaagcgtttatgattatcttatgctagtctagtgcttaccttaggtgggttgtagtggactttacctctgttgacagctcatcaactatattagagaaactagagagtagagatctaacatgctaaaagaaagtttagggaaaatgagtttggatattgtaggattggttttgcatattgctttgggcagtggttgatagttagagacttctattgctaatcagttttcttatttggtgtagttcgttggtacttgtttaaaacctgtcagtatcacactgacttttttctatgtgaatggttgcataaccttattgcagagggactgagcctatggccgaggaagcagtaaaacttatatgcaaaaccggtggtgtagctgtgcttgcacatccgtgggcgttgaagaatcatgtcggtattattaggagattgaaggatgctggacttcatggggtcgaggtttataggagcgacggcaagttagaaggtctctcactctctccctccctcgttccctctctatcagtctatctatctatttgagttcactgaattttaatgttgattgaacagtgtttagcgagttggctgatacatacaatctgctaaagctaggaggatcagattatcatggaaaaggcggacgcaatgaatcagaattggggagtgtaaaccttcccgtgacggcattgcaggacttcttgaacgttggacgtcctatatggtgtgaggccattaaagcaaccatgagagcattccttgaccaaccatcagattcaaacctctccaatatcttaaggttcgataaggcaaggattctgaaaggaaattcagcttggtcctgtggtaaggagttgatggaccgatgtttagcgatttggttgaccagtgatgagagaaacagcaatgactttgaggctctcagattgaagctctcttttgtaccaatcatgtcaaacggaacatgtgtcacagttggtccttaaatatttagtctggtctctttttatcactcacttcctaacaatatgctatttccacacgaattttagtaattaccaaatcccatggaagatcacttggatataagaaacaaaaatataagagatgcttgttttcacttttaacaaacataaaagttttaagttccaacaaaatagtacacatatcaagatatatagaagaatcaattatggatttgtcgttttattggatgacatttgtggattttactcttttttgaatagtttatggattttgcccttgctacaaaaatgtgatttaacatgcgttttattcgttatgtttgggtttagtcggttgtggttgttcttaggatttagtatttcgtatcaagtacgtatttttaccaaaaaaaatcctcaatacgtacatttttatgttttaaaaaatgacatccgtaagattttagtaaaaatggtaatttcaaaaatgggctatattaatatctatgctcagatgattgaaatattaagaaactatgcatgataagttaataattaatcctctctcttcatcgatataatttctcccaaaaatacccctataaaaccaaaataacaataacaggttataatatagttgcggaagcattacatgctgaagatatacttgaagaatataccccaccgacaatagaaacataaaagattttatccatcattgctaatatttatggggttgcaagtatatcgattatatacgttggtctatttatgagcactgtattctcttccctgcaacaacccaaaaactataagactaaataacttagcttccgacaactttaatgcaagagggagctaaacacacaggaaatcaaagctaaaaggtaaacgtaaaagttatgaattgtaacgcccgtgaaccggaaaatcggttagggtttgtatttaaatcgtcaggtttaatcggttgggttaattggaaaccctagagtgtgcctataaaagaagaaaactagaaattaggactttagttagccacttttcgttttataaaggagaaaaagagaaagaaggaaaagaaccagaatcgttagggtttgggagaaaacgttttcgacatatctaatcgttgtcaaaggtaatgcaatttggtagggttatttccaagtcttttatcgctattatccagtttacagaattggttttggattaaaattagttgagttattcgcagtttcgtgagatgcgttttctcagacacgaattaggtccagcggggattgtaactgcgatcgtagtctcatctgatttccgatcggcacgggtttttgtgggaagctttttgacgtctaaggctagcgattcaccggagggatttaatagttaacggttagtttgtattttagggtttcgtctttgagactggttgtttctgttttttatgtccagtttgcttcaaggttgcttttagttgtgacttgttgtaggacgtttctggactgttttagacgcaaggagagtctctcctgggtttaattgttgttagaatcaatttgttaaggtgagtgcgtgaccatgagcttatctgagcgattgggttgtatgttttgttttgtgtgatg

SEQ ID NO: 13043 - DNA, 3000 bp, Unknown; identical to SEQ ID NO: 13041
  misc_feature (1)..( 3000): cDNA_ID_3027777_gDNA_ID_2214592_Annot_ID_186801 3000 nt of promoter + ATG

SEQ ID NO: 13044 - DNA, 3000 bp, Unknown
  misc_feature (1)..( 3000): cDNA_ID_3027828_gDNA_ID_2214593_Annot_ID_186815 3000 nt of promoter + ATG
tacttaggcttttaagatcaggttgcagtttaagttcttatactcaatcatacacatgacatcatgacatcaagtcatattcgactccaaaacactaaccaagcctcttcttgcttctcaaagctttgatggtgaagccaaagttcgtataaatatttggctttgtatcttcgaacaaggaaacactctttaggctattaagatcagttgcggttctagttcttatactcaatcatacacatgacatctagtcatatttgactccaaatcactaaccaagcttcttcttgcttctcaaagctttgatggtgtagccgaaatccgtatgagtctttggctttgtatcttctaacaagaaaacactacttaggctttcaagatccggttgtggttctagttcttatactcaatcatacacatgacatctagtcatatttgactccaaatcactaaccaagcttcttcttgcttctcgaggctttgatggtgaagctgaagtccgtatgagtctttgcctttgtatctttgatgtaggtcaaattgccttaagcccactctttcaaataagagaacgattgtagcactgaagggtcgaattccacaaagctctcggatcacacaatagaccaaggttttgaatctacatatacatttttggtagggtttttggccaaaaatctttcacctatttactatttgcaatatgagtccttacaaatttaatctcaatcaaatactttataactaaaaacttacaattagtttaattgcattaattagttgaattaactctttcctaaatttttattctcaattaaatcatttttattgaactatattcgattaaggctaatttcctaaaatatatatatcgacattaaatttaaatatctaatttttttgtcactatatttgtttatatatatatataattttgcttttagtttatatataaaacacatatagttaataaaatattagattttttttgcatctgatgaaattcaaattttttcaaacaaacatataatactccatcgatgaaaaaaaaagttttaaagcgactaatagtgagttatgaataaaaagcgactaaatccggtaatcgtaaatcgatgctaaaataaatagtcgtaaaaatagtcgccaaatagcgaatattgtacgactaatattcatagtcgtaagagtagtcataaaatagtcgtcaaatttagtgactaattgactaatctgcgattaaatttcacgaacataaattgtttgtagtgttatagtagtagagtagtcattaaaaattcgttaaaatttagtgactaatttacaactatattgcgactatggtcgtatttatgtacaagaataccatattacaaaataaaattacaaacattataaaaaataagaatacatcatcctcctaaaaacataactaaaacaaagtagataacaatctttaagaaagaacttggttaaattaattcttttgatctcaatttttcctccttgtcttacatctttcatgttttcttcttctccaaaaactgcctcatggttatttctaccagaagaaaatgctgatatgctatcataggtctggtcaagatcatctccttgcaaacagaacacaccatgagaaggcaaggacataacatcttaagacgaacctatcaacatgattctggccaagcattaaatcatgatttgccattgcagaaacaatagcacactgcttaaaaaacaaacaccgttaaaaagacaagtagttctcacactatagcaataaaagaacagtacatgtaacaagagaacatatcaacaagttctatttatccaactatagaacacaaacccacataagaccaaagcatgagagactatatcaatgtgagcttaaattaaaaaaaaaagtaaagaacttggcgagataagccaaacagttcttaaggcacaatcatcattttcgcaacttaatatcttcggacctcacagttaagaacttgaatagctacactatcataagaaacatatgtaaatttcttggtcagacaatataggcaacttggtttttaaaagatcagttcaattgatctcagctgttaaatagtttatcactctatagctaatacattaagaatgtttagagaaagataaacacagatttgactttgtagtgatcactaacctgaattggtcccttttttttatgttttctctatgaaacaaggtttgacaaaaattaacaccccattacttttttagaaaaacaaacttcgacaatatccaatcacaatgatagctttgaaaccagaaattatagacatatcaagctaaaatgatcagctcttctaattatattcaaagagaagtggatcaacatgagaaaaagccattatcaaagttcagaaatcaaaactcgtaaaagacaagacaccattgattatcagatctttaaatttaaaagcaaaaaccatgacccgttactttgtccaaagtctaagtacattcaaactatgagagaaagtaaactcgtaccttaaacccaactgaaactgttgggacttttttaaaacatctcttaggctgcgctggaagaggtccatccctagtctacaagagaaatcgagacaaagtaagcaaatatcaaaacttaccaatccaagcagtagcaacagatgctaaagaagttccaactgcatacacgaccatgtgcctctcgaacaagtcctaagtgattaaatatattagcgagatatgcgggcagtttggaacaagaagttgttaagattgttccacaagtttttgatagttgtagatttgattttttcggatcctcttagagattcttttgtaatctatttaaagcattgtaaacacttctcttgaatatatcagaaaactgaacatattttcccagtcacaatctctgaattcgcatagtaacagagcctttctcttaaaatttttgattggaaaatagagaagtgattctctacgacg

SEQ ID NO: 13045 - DNA, 3000 bp, Unknown
  misc_feature (1)..( 3000): cDNA_ID_3027801_gDNA_ID_2214593_Annot_ID_186823 3000 nt of promoter + ATG
ctgaaattatgatctatctctcgactttattgcatggatggtttaagtactacagattcaaatcaatccgactaatggaaaatccagaaagccaatcaacaaacttaaggacatccattcccaacataatccacagaggctggagctaatctcactgctcttccttttacctcatcaaaacggttagtgttcataggacttgactgcttgttcagacctagttctttcttaaagattgttatctactttgttttaattatgtttttaggaggatgatgtattcttatgttttataatgtttgtaattttattttgtaatatggtattcttttaaatataattaataaaaatatgtttggaaataattaataataaatattaatattaatactgaaataaatacataaatactgtacaaatatataaatactgtacaaataaatacaatactgtataaatacataaatacgaccatagtcgcaatatagttgtaaattagtcactaaattttaacgaattttaacgactactctactactataacactacaaacaatttatgttcgtgaaatttaatcgcagattagtcgttaattagtcactaaatttgacgactattttatgactactcttacgactatgaatattagtcgtacaatatttgctatttggcgactatttttacgactatttattttaccatcgatttacgattaccagatttagtcgcttattagtcataactcactatttgacgactatttggcaacttatcgtgtagtcgttaaaacccagttttcttgtagcacataagaattagaaccgcaaccggatcttgaaagcctaagtaatgtatcattattaaaacttatacggacttcaactataccatcaaaacgttaagaagcaagaagaagtttgtttagtgttttggagtcagatatgactagatgtcatgtgtatgattcagtataagaactagaatcgcaaccggatcttgaaagcctaagtagtgtttcgttgttagaatatacaatacaaaacactcatacgtacttcggcttcagcatcaaaactttgagaagcaaaaaaatgtttggttagtattttaggagtgagatatgactaaatgtcatatgtataattgagtataaaaactagaatcgcaaccgaatcttaaaagcgtatataatgtttcaaaggcggatcaaggtgcaagactacatacataggcacgtgccccacactactattaattgttttatgctatagttataattattcgattgttacatgagaaaatcagacaaattatctctcgtgcacttcctatcttctttcttcttattcctttgttttactttcttcttaaactctgaatcttctttactgtcctctgtttgatctccatagtctttcccgagactgtaaattttcctcttcctcatgaaaagctgttctaaacaactcataagcttcaaatgaagaacccggaatctcatttgtctcatttcttaaatccccatgaatactccagcatgaattcctcttatacttgtgatccatacctctaattaccagatgatcaagtaccgtgtctcctggttgatgacacacattgcggcaatctacacatggacaaaacatgttgggaggattacccagcttcctcgctgatgctttcacaaaatctgtggctccttgctcatactcaaggctagtcctggagaacataactaacataactaagattaagatacaactccataccttgaaagccaaacccaagacttgtccatgttacaataagatcacagctccacgaccaaaagatacatacatttgtgataaaagtttctagagttagacactataataactagacgcaatcacataacaatatgaaacatattttaagaaaattcaatgaaatatgaaggatatatatacctctaagtaacaagaatgttgattgatggatatgatacttcaaggaaacaaggaagcaatttgagattctctagaacaaatcccttcgcttcaaactgaacaaatactttaaaatttgagatacctttgatttgaaactctatcaatgaccgaaagcttcctctgtaaaactctatcaatgcacaaactgaaaacaaaatccaaatttgaaaccatcacacattcttgtcaaaacaaaaaaagctagaaaacagaagacagaagaagccattaacttgactccaactccaaaaatcgaaacattacttgtctcaatcgaacataaagaacatgttaccttattatatagctttacttctgtcgaaatctcctccctgtcaaagcaaattgaaaaaatcaaatagggaaattttaaccctaaatcaaaatcgaccaaaacaaaatcataccaattgctcacacaaatttctccttaactcgagcacaccaatctctcagcaaagcaacctgcagtcaaaaacctaaattagatgaataacagtcgaaagaaattatgaggtggaagaagagagagatgtgtatccaaacctagatctgctgaaaaccccaaattagtatcgattatctctttagaattaatggaagagagctgaagattaaagcaattgttaagaaaaggttcatgcgtgaaacaatggagagagctggagagagtagtgtggaatattgagagggtactcaattttttgtggccaaaattttgctaagtactagcgggcaaaattggtttctttctaaacattacacagcgtttaataaatgataactgctatattatatgtttaacctagaagcgtgactcagaataaaattttaatcacccaaacatagcgtttacaaattttaaaacgttatagaaaaaatgagggttgtttactatagcataaaagtataaaacgctattttatctactaatcaaatcaccactcatgaaactgtctctgctccagcatcagaaatagtaatagtgaaggaacaggatgttcacatg

SEQ ID NO: 13046 - DNA, 3000 bp, Unknown
  misc_feature (1)..( 3000): cDNA_ID_3027817_gDNA_ID_2214593_Annot_ID_186818 3000 nt of promoter + ATG
gtgaaaagcgaactcaacacttagatttcacagaaatgaatatatttttccaaaaagtgtaacttcgaaaaatccttgaaggataacttggaaaaatccttgaaggatgaaatctagtcatgtgaagagcgagctcaacacttagatttcaccacagtaaatatatttttccaagaggtggaacttggaaaaatccttgagggatgaaatctagtcttgtgaagagcgaactgaacacttagatttcaccaaaatgaatacatttttctaagagaaggaacttggaaaactacttgagggatgaaatctaatcttgtgaagagcgaactcaacacttggatttcaccgaaatgattatatttttccaagaggtggaacttggaaaaatccttaaggggtgaaatctagtcttgtgatgagcgagttcaacacatagatttcaccgaaataatatatatttttccgagaggtggaacttggaaaaatccttgaggcatgaaatctagtcttgtgaagagcgaactcaacacttaaatttcatcgaaatgaatatatttttccaagagctggaacttggaaaaatcttcgagggatgaaatctagtcttgtgaagagcgaactcaacacttagatttcaccgaaatgaatatatttttccaagaggtggaacttggaaaaatccttgagggatgaaatctagtcttgtgaagagcgagctcaaaaaatagagttcaccgaaatgaatatatttttcaaagaggtggaactcggaaaaatccttgaaggatgaaatcttgtcttgtgaatagcaagctcaacacttagatttgactgaaatgaatatatttttccaagaggtggaacttggaaaactttttgagggatgaaatcttgtcttgtgaatagcaaactcaacacttagatttcaccaaaatgaatatatttttccaagagatgaaacttgaaaaaatctttgagggatgaaatctagtcttgtgaagagcgaactcaacacttagattttaacgaaatgaatatatttttaaaatatgtggaacttggaaaaatcctccaaggatgaaatctagtcttgtgagtatcgccgtacggaactctcaagggattttcagctcttcctccgaggaacttgatgatttctacggacgagaagaaaccgcaaattacatggggccaatgaggagccacccgagagtctcccaaaaccggagctttaggaaccgagggaaaatctcaaaccaaggtaatattcaacaaaggtctattcttagcgagtttcaggaacctcagtgagaattgcctattccaacaccggcaaatgagaactcgaccctagaggttttgatcaagagactcgaagctagttttcaagaatgccaaaaaagtgtcgacgcctcaatccagatcatgcatgaggacttaaaaagcaaaattaattccctttagaggaagttcgaatacttgtcttaataggaaaatgagactacctgcctgattgagtcatacgagaaatccttcagaacagaagaagggcacccactgatcggtgcaccattgcaagccataacactgaggagtgggatggcttacagacaccagagtatccgaaagatcaggaggaggaagaaaaaccaatccaagcaagcctgtgagacctgtcacgatccgaatagtggaagagacccagaacctcccatacacattcctagccaagaagccgaggaagaagtaccgccaagccgcgaaagcactactgcgaccaatcttatctctccctcggaccgtatctactgacctaaggtaccatacccgaatgctgggaagagcaccaagaaggagaaagctaagcaacgagagcttatcgggtagttaacggtaaggctaccttttgttgaggcttgtgccatgatccccactcttaggaaataaatgaagagtatcttaaccaacaacatcagcctagaagacgaggtaatgatgatgacccaagagtgtagcgccatcctgcaagaccagacgacatgaaagaaaggtgatcctgagagttttgtgttgtcttgtgctattgatgatgaactttttgagtgatgcctatgtgattgaggatcaagcatcaacatgatgccgctcacagttactaaccgtcttggatactacaccttcaaacaaactaaaatctccctaatactggcagatcgttctatccgccatcctgttgggattttggctgatattccgataatgattgggggatctcaaatccctattaattttgttatcctggaagttcacaaagagcataaggaccactgatccttggccgaccattcctgtctaccgccagcgccattatcgatgtcccgaactgaaaaatcgaccttcaccttggcgatttcataatgaagtttgatatgaatgagactttcaagcaagcttcatctcatgatcagattatctatctcgatgagatagaagaggcgtctggtagaatgtgtaggggaaatcattctggaggatcccctggagatagctttaatagaagaaaaggaggagtatgatttcctagtggattttgtagacggttcaacatggatgctggattccgctataagataagccaccaaaggatacccaccaaaggatacgcctgcctcctgggccgacctgataagtgtgtattttgcatgttttgagcatccatttgtcatcactttagcatcatatcatcactgttatatatcatttctcatcactttgcatgtttaggatagttttgcatgcatgttgcatatttgtgtttttcaggtgatttggagctgttggcgagctaattggaagaagcggacatgatcatgtcaaaccactcgaccccctggtcgagtagaagcttcacgacctcaacagaccactcgaccccttggtcgagtagaagacttcatcaattcacctcaccactcgacctcctggccgagtaccaccatg

SEQ ID NO: 13047 - DNA, 3000 bp, Unknown
  misc_feature (1)..( 3000): cDNA_ID_3027824_gDNA_ID_2214593_Annot_ID_186816 3000 nt of
tagagaaagataaacacagatttgactttgtagtgatcactaacctgaattggtcccttttttttatgttttctctatgaaacaaggtttgacaaaaattaacaccccattacttttttagaaaaacaaacttcgacaatatccaatcacaatgatagctttgaaaccagaaattatagacatatcaagctaaaatgatcagctcttctaattatattcaaagagaagtggatcaacatgagaaaaagccattatcaaagttcagaaatcaaaactcgtaaaagacaagacaccattgattatcagatctttaaatttaaaagcaaaaaccatgacccgttactttgtccaaagtctaagtacattcaaactatgagagaaagtaaactcgtaccttaaacccaactgaaactgttgggacttttttaaaacatctcttaggctgcgctggaagaggtccatccctagtctacaagagaaatcgagacaaagtaagcaaatatcaaaacttaccaatccaagcagtagcaacagatgctaaagaagttccaactgcatacacgaccatgtgcctctcgaacaagtcctaagtgattaaatatattagcgagatatgcgggcagtttggaacaagaagttgttaagattgttccacaagtttttgatagttgtagatttgattttttcggatcctcttagagattcttttgtaatctatttaaagcattgtaaacacttctcttgaatatatcagaaaactgaacatattttcccagtcacaatctctgaattcgcatagtaacagagcctttctcttaaaatttttgattggaaaatagagaagtgattctctacgacgatggcagcgatgaacccatcaacgaacccgacgaccactgaagtccgacgaaccatatccccctacgacaaccccggtgctgtgatttcccacccgttgctgcaagcaacaaactacgatgagtgggtctgtagcatgaaaactgcattgtgctctcgaaagaaatttggatttctcgacggctcaattgcacgacctgcagaaaactctcccgatttggaggattggtggaccattcaagcgttacttgtctcttggataaagatgtctattgatccaagtctccgatctaacgtctcacaccgtgatgttgcgaaggatctgtgggaccatctaaagaaacgattctctgtcactaatggactgagaattcaacagatcaaagccgagctagcatgctgcaaacaaaggggtctagccattgagacctactttggaaagctaactcgcatttgggacagtatggcgaactatcgtcctttgagagtttgcaagtgtcgtaagtgtgagtgtgatcttggcacacttcaagagaaggacattgaagaagacaaggtacatcaattcctttttgggctggacgatacacatttccgaacagtgaggtcaagcttggttttgagagttccgatccaatctatggaggaagaatataatatggtacgacaagaggaagatatggtaagaaatggaatcaaaggcgttgaatagagctcagaagtaaacgcatttgctgtccacaccactacaccatttcaaagagatgagagagataagtcagtgttttgcaaactctgcaacagagcgggtcattctagcgacagctgctatggcgtgataggctatccagagtggtggggagatagaccgagatctcgctctacgtctagctgtggtcgtggacgtggaggctcaaacagaggggctggaaagagtcgtggcagcacctcgtacgtcaacgccgtcggagttaatgaaccaacaggttatgcagccgctaactacgtcatcaccgacaatgacagagatggagtgaccggtttctccgattcacagtggaaggtgattaagaatctgctcaatgctaacactagcaaagtctatgaatccgaaaaactgacgggtacgtactcttttccctcttggataatggatacaggggctacacatcacttgacgggtcagttagaaatcttaacggatgttaaagatattcaaccagttggaattgtgttagctgatgggagacaacgagtgtcagttaaagaaggatcagtgaggcttgggccgaattggacactaaaatcagtttattatgttgatgggtttcaatcaaatttgatttctctttgtcaattgatggatgaaaatcgttgcgtagtgcagttagctgatcatttccttgttgttcaggaccgcactacgaggacggtgattggagttagtaagcaaaagggagggaccttccttttttggagtttggagtctgtaacatctgttgaagttagagatgagaagtcattcgagttgtggcatcaacggatgggacatccttcagctaaagtagttggtcttcttcctttaatctcaaatgttatttcttctgaaattttgaataaagcatgcgatatatgtctccgcgctaagcaaacccggttgtcttttccaataagtgagaataaaacgaaaaggatttttgatcttattcactgtgatttatggggtccatatcgaactccaacacactctggtgctcgttatttcttaactatcgttgatgattactctcgaggagtgtggttatatttgcttaacgaaaaatctgaggcaccaaatgttttgaagaacttcatagccatgactgaacgacaattcgaaacccaagtttaagtcataagaagtgataacggctctgaatttgttagtttgaatgagttcttcaagaaacaagagattgttcatgagacatcatgcgtcggcactcctcagcagaatggacgggttgaaagaaagcacagacatattctaaacgtggccagagctctacagtttcaagctaacttgcccattgagttttgggggaatgtgttctcagagcggcatatttaatcaatcgaacaccgagtatggtctggaaagga

SEQ ID NO: 13048 - DNA, 3000 bp, Unknown
  misc_feature (1)..( 3000): cDNA_ID_2713041_gDNA_ID_2214594_Annot_ID_135444 3000 nt of promoter + ATG
gatgagtctcacaataataggaaaggaaataaaaccctaaccaagtaaatagtttccaaaatcaataatataaaaaaagaaatgatcctaatagaagaatatatccttctgccttcatgtcaaaatattcgtgatgtgtatttgatgtgtactccgtgatctaaattagttgcttggagatatggttctactcatatcatagtctctagccatatttaacaagcactatccttgattgtctgaatgctttatcaggtttacctttgtatgcgttttcttttcttttttctttttttttgttagcaccgtttaatttgtgttaattgtaaaaatctatatgttaaatagaccatgcaacctgtatcgtagatcataatactttagcatcgtttggacgatattttacgtgcatccaatatctagagtttggctgaattgtcagccatatactagttgcaatctcaacatttcaccataattttttttgtttcttaaataactacaaaaaaaagaaaaatctcgataaaattatatatatttttagatttgtttttaaaattacatctccatgaaccgattagttaaccgataatatgaaaaacattcatttgacgttttatagtgaattagttaaaaaatatatatggttttatatattacgagtgtgatcgatacgtaagaaacaattcctagtaatatatatcttttttttgtcggttcctaataatatatatcagagactaatactggagaatttcctagaaaccttacaactttttttcttgtagataattgcgaaatgatgataatttagctttttgacatggacaggtacgtgtcatatctctctcaaatcacatcaaaataaaagttcgttccatatttcgttaattcgttccatttaatttttaaggaaacatgattttttaatggaacatgttattctaacgtggttatgtgaacttctaaattctaggttatgacatccatttatgtaaaaaattagtatattatatttttaaaagaataaatatgttacaaaaaataagattgcaattttcataacatttaaatgtatgccaaaattatcctaaaactaggtcacaacatttcttttttacttttactccaaaattttgtcatcccacctaattatttattatttagatggtagtacaaccttctagataatctttactctttacaatcaacgtgaaaggaaacgacaaaaaaaatgactcttgtgtcaaagagaaaaggaagtaaccttccttggccacgtctgaaaatgcggaaaaaggactttgggtcgtgacagtgaaacttagagatcttgtcgacaaccagatcgcttcacttgattagtgatactttatcatcactattttagtatttttcgtgtaattttaaatttcatgctctctcttggacttggtccgctaatgattccgatttttatacagcttatcaatcactgtaggagtatcattaaaatttatgtatttttgataattacgaagttatcatatacccatttggactctagcctctctatatcataaaatcagttatgtgaattgtagtggctagtagaatatgagttagtataagtgtatttgtttgttttattagtcacaagtcgtttgtcttattctcaaatagtaatttgtatagatatatagatagatacaataaagtatcaaactagtagaaaatcggtacccaatctaattcattagtaatcaattcatatctaacaatattttatgtgttaatatattggcaacaacttcatcaaatatgtggcaacgattacatcaacgtcgtaaaaaacgtggcatccacgtcagtagccatgagaaaagatatatggtttcacacgattcaataaatttagatataaagtttaaattattgaaatattggatatatattagcatagaaatgtttgtagttagaattaaatacagatactttactttactatgaaatgaccgaactttgttcaaatttgccaaaggcaaacgctaagaaattcacttttgagtaaaatgcaagtagaaagatggtacctacaagactacactcagtgacttggatactgattaaataaattgcatggatagatatttcgatcgcggtcggcatgaattaagtatctatagccaagcaatttgtcagtcaaaagctccattagaaatttaattagaatatttgtattcacgatagccaagcaaaagttttgcacgctctaaaatgaaagtcctatagtagtttctacgcataacgcattgctctttttatgctatacttactattgttcagtgcatatagatttgtctctatatatccctctgtcggcagagatttcaaaaaagatccttaacaagtatcattagtgcacgccttaactatccaaatagtaacaaacttaaacaatagaaaaacttgaaaaaatgtatcaattttcaaatttgatacgaaaaaacttgaacttttaaaatattatttaaatcataaagttttctttgatattttttgtaaaatagtcaaattttgttgaattcaccatttcgaacatatcgctaaattttcataaataaaattaactttcgattaagagaataaaacaacgtcgttttatcaactacaaaacatagtcgttttgttaaaaaagcgtagtggactggagttgccattcacgtttattcatatctagttacaatgaatccaacaacggaccataaggggcccgacgcaacacgtataatactctgatacttatcttcttaattactacttaatttgtttctactgtgataaatttcctttaactttacttttgataaaatattgtcttctttttattctactacggagtagttttttgacttttctcatttcctattctgttcgtttctataaatagagggcatgcaacgtaacatattactcatcacttacttaacatactaagagagttattagaacttgcaaaaa

SEQ ID NO: 13049 - DNA, 3000 bp, Unknown
  misc_feature (1)..( 3000): cDNA_ID_2710341_gDNA_ID_2214594_Annot_ID_135452 3000 nt of promoter + ATG
tgtaaactgatatataattaaatataatatgaaaattcgtcgttaactaattattatgaagttttttctctcttctctctttcataccttttagagagaaaaacactttgattctatcgattggatttttcccgtgaatagccgtctctagtgaatcgagtttttgtccatcatcttgtggctccgttagccaagatagctagcttctgtctggcaaatctagcttctataagcagttttggtcggcttttatatttgtttttagtttttttttatagattttaattgatgattcgttttatagattttaattgatgattcgttttaggtgttagtcacttaaaatcaatctatcgacttgtatctctggaagctcgatcttgcaaatcgcctaaagtaaagagaagaagagttgtttccagcaaatttggattgccatagccgtctctagttgtttttggtgcttcgatcaaacaaaattttgtgaattaatcagaatttttcctttttatcttatagggttgaatgatctgttattgatttacttctctatgtctatgcagaatctggtgaaaaacaaagtaaatcgatgtttaagaaatttacagcatcgattgagttcaccagaatcggaatcgttgacgacaaagattaaccggaatgtttaacgcatctctcatacgtgtctgtttttattacatttttggattgtaggcctgaacctgtacactttgtttatgaatctttaataatagataaaataaaacacttattattccgagcacgggcttgcatatggttcggttaagttcctgtttttcatatctttctttttatacgatttgtcagcatcattcagccatcgttattgacttgttgcctttgaattttgtatcgaaactaactaaataattcattgaacgagtgagactctaacacttgcatggtctatgtttcaggagagcttagatgtgcctataatcatcactaaccacgagacagctcactattagcattaaatgttaatacacatttcgtttctaaattctaacctttacgtgttgggtgggataaacaaacccgagactccacatttttctactagcattgacaatctgtccttatcacaagcttaaaggagaaaaatttgaacacatttttttagaaaaagaaaaaaacaattattgttgtcattaataaagtcggttaaattatttaacacaaataataaataataaaaataaaggataaaaaaaactatttcgacatataacatgtttcatacgaaaatatataaatgatatgttgtccaaacatatagtactttataggactatcacttttgtaaggattttggagataacgactactaagaacatttttaatggaagattgtattgaaaattttgtgaggttatattggatgaaaaattgacagaacccgttttgtgaagaaatttttgagaaaatggaaaaggtggacatgtgttcacatgcatttgattggatgtttagttttaataaaagaaaaaaaaaaaagcgtatattgttatctttacaaaagaaactcggattttctttctctctatttctcgcacgaagataaaaaccggtgaacttttgatttcctatgagttaacaccgttttatgtgtatatttgtggtatttgaggcttccaaacgctcaatttattaatttgacagacggtgttgattatcgctggaggaagataaacccattcagagaataacgaatctgatttggagagttttcgttgaaggaatgtctaaattaggtatgaatcaagccattctagcatgtatatgataactaaatattgtattttctagttaatatatgtaattttaattttatttaatattcttaagataaatttatcatgttcaacatgtgctactgtatttatctaatcattttaaatttgactaatatttaaaaatgcaatagttttgcttaaacttaaatcaaagtattattcctattttcgaaagtttgtgttgttatttatagtataattacatttatttaatttttataaaaaatatattttgcataatacacggtatagtgatccggtatatgacctgacgggttttaatataatacaagacgggttttattgcggaacgggttacataacatagcgggttaaaatcgatattaataaaaaattaaaatatttttgacaaaaaataataataattaaaatacatcattagccaacgctttgaaaaagttaaaatcttcattttattaatttgtcaaaaccaccaatattattttatgttgaattaaactaatttcattaattaaaatatatgaaacagttttttcgaattttaatgcggattaaaacctaattttttttttgttatttatagtattatatttatttaattttcataagaaatatattttgcatccactgaaaatatttcagtattttaggtcctgtaaatttgcaccactttttaaagccgtccgtaagtgtagccctttgatgatctatttattgatcagtatcactttacataggtttaaaatatgtcgactaaaaaaagggtcgtatccataacaagtaccaagagtggacgacttttcttttctgtccaaaaaaacaacaacaatgataatccaataatgaagtttttgcatatcaatattgtttaataaatttatcgaaatatccaaaagactagtgggtttgccatttatggagtttcaaattatttacaatgcgtccaacatccaaccagaataaggggaccgacgcaattaaactcatatatacttagacttttctactttgttttaattgtgataagttccttttctctttattggattacggataagttatttgacttttctcattccctcctcctcgttttctttaaatagaggccatgcatggtaacattttatgcatcacttgtttctccataataagagagttttaagcatttgaaacaaaaaaa

SEQ ID NO: 13050 - DNA, 3000 bp, Unknown
  misc_feature (1)..( 3000): cDNA_ID_3434336_gDNA_ID_2214594_Annot_ID_186855 3000 nt of promoter + ATG
tatggttttttggcaaggttgtttgttgattgcattgttgtatctaccagttttcttcgttttaattttcaagacagttatgcgcctaagttgttgctgaaagctccatcggtttaatctccacgcggatttccttagagttcgggaggaaattactttgagaagttcttttctttgcagatttgataatgaagattggtgagattctctaattaaaaaccgttaagacttctttgcttgaagatctggcgatttctgatgattttggagtttcctaaggattcttaccaaatcgacaatgaccaacaacgatatatgcttcacatgtccatgcgtcttaaccttgcttcatagtctcacatgtggctttgcgttggaatctttaaatcttacttctacaaagggtttagtttcctagattggactttctttaagttgggcttcttcttataagttaaacttgttggttctttggttatgcaacatggatgcttgtttagataatctaatattgtaaaatttgatgtgtttgtcgagtcatgtaagtgaaagattccacttttgcaacaaaagttttaaataaagtgcaacatttatgagaaagaaaaaaaaaaggttttatgcaaaaggactctccaaatgattttttttgctagacaaacatccatctcaaaaaaatacaggtcaatatcacagtctcaaaagtcacctacaatatagtccttccgtatatcgatgacgtaacagtcgataactccgttggaagacataagagttttgttaaacaaaccctccatatatttttttatttttgcaagacaaacctcaatgtcaaataaatacaatattacaatctcaaagtcacccgcgatatagtcattttgtatagcgatgacatgacaatcgataattccgttaaaagcataatggatatcaaaatagacctttgttttgcttttgttgaaaaccacatgattgtgtgagtttcgttattagaaatagaattgagggaaataattagagttctttcatattatatcttcttctttattcatatgaagtttggagattcatttttcttttccatttcgatcttcatccatttcgatgtatgtgtttgttgaattgtgttccacatgatcaaaaatcttggtttgattttaagtgattcatttacagttttgaagatcccaatgaaaaataaatatgaatctccaaattttcagataaataaaaattcaataattttggtgtatattgttttatgggtaatattagtagataaccaaataaaacatacaaattaagaaactagcagagagaaagttttttgttacaaaataaccatggatcccacgttgtcggaagaaaggaaataacaaatctacccttcatttgttgtaagatgaacagtaaacgaaatacatccgtgtaatttttcaaaatagcatgtaacattaaaatttcacatgttatatttagtttaaaaacatgctatttcaaaaaacgttatgaatttttaagaaaaaatattcttatgaaattcttttacgtgaacagaatcttaaaaaaaaaaaattatatgtgattttaataaaaaccatgtattactaaaaaataggaatatatttttaaagaaatcacgtgtgatcttaataaaaaacgtgtattactacaaaatatcatgataaaaagagatattaaactgaatagaatgttttttccaaaaaataccaggtgctttttaataaatactatgtaataagagaaaataacaagataaaaagaggatattatgttatcgcatgtatttcggaaaaataacatgttacaaaggacatttacgtaattacacgtgttttccaacatgtttccgacaagatactgtgattcaaggttagtttgtacattcttttcaaatctatagtcatttattataaatactcttgttttattgtatgttttctaatgtagttattggttgtcatgtcatcactacacaaaaagataatattatgagtgatttttaagattgtagtgttgacattcatttatttgatatgaagatttttttttacaaaaaaagtttacatagaaattttttacactaaatctttatgtttttaatagagttatcgtctatatcaaacctacatttatttgacataatagtttatcttataaaaaatgacttcatctgttcttttttatttgattggttaggaaaaacacacatattaagttaaacatattaaaattgttaaatgtattattttttgtattttacaattttttataactttaaatcaataatattcaattatttttatcaaagtttataattaattaataataactaataaatatttcataaaaaatctaaaaattaatcttttaaaaacttatttttttcaaaaaacagagagtgttaaatagatagatttttttacacaaaacccaaaaaaaaaaactaagaccttgaatgttttttagattttgtaagagtttttgatttttgttttttaaaaacttattttaataccaatcaagattttaaaattttggtttccctacaatttagtaaaactattttattgtagttttccattcatatttaagttttttagtttttctaaagtttagaaaatctagtttttactcaatcaacgttattttttcaaaaaccaaaaaccaattttttaggggtttttaaaacaaaaatataataacaaaaatctaaaatctatagactaaaatctaaactcaaaaactgaatcgaaaatatccattcaggcctaatacatccaatatttcaatacttcttaactcttaactcttaagttttaagtaattaaatatataaagatctgttgccaagcgtaccctttttataaacattccaaataactatctccattctttggagttacccaatttcgacgttgaacacaaacccttgcttctctcttctctgtttctctctcgcagcgaaaaatcatg

SEQ ID NO: 13051 - DNA, 3000 bp, Unknown
  misc_feature (1)..( 3000): cDNA_ID_3027905_gDNA_ID_2214594_Annot_ID_186847 3000 nt of promoter + ATG
ccacttttgtagaaaggggtaagcctcacgttacttttccaaagaacccaaatcctgcctctcctattaaattcataatttgttaaaaccgaccatcctggaaacaacttttcactcagctcctgcatcttattctcctggacccgtgtttcaagtaaacaaccaaattgaaaattttgttcttgaacccatttctttatgattggatgctttgcagattcgtttaaaccactgacattcaagaagaaacccgtcatttagcgatgctttggagggagccctaaactctgaccactaggagtgtgcctagttgaaggagtagaaggattggagagcactttatgtgcagactttgatccacggggtaaagatgcccgaggtggcagctctaaaacccgtgaccttaccactgagtttttttttccttattttccacctcttgtgtttgagtatccgcctgtttagacttctcctcaggctcgtgaggttccatctctttagatatttcctcccctatatcctctgcgccacgaagtacaaagtatgagtttgataaaatagaaacttctccaaacttcaatcctacatgacttttcccggggctaagcgtagtcttaggagtgatccatccttcatcctctcctctctctacctctacttcccccggagcgttagattgaatcttaggcacctcatccaaagttacatgaacaacttccttagcttttcccgtaattggagaggatggctgaactggttctgaagcaactgcgggaatggttacaaaatcactattccccgtgctggttttctcaatagataaacatgtttctttaagatgaccccatttaccacatccattaaatctcggaggcagccaaggatatgaatatgtaataacagcatcgagctctccttcttcctcacccgtgaatacgtactctctaggtagatcttttgttaggtctgcttctattaagatttgtgcttcatcaaaactcacacaagcttccgtttttggatgtaaccgtattggcttacccactgcactagccaagaactccaaacctttatcagtgaacattgacgggggaacatctgtgagagtaaccaaaagctgaatggatttcatagctggttgagaatcttcttgaaaaggcgtccacttcgagagcaccatcggaatgtccataatgttccacattcttctattcagcactctcctcctcattgcctcattccttatgcgaaatttgactgttgttgcgtttacttcatacacatcaattaagtttaaattatctccaaattttattcacaatcatgtgaatctttcccacatgcggggccttcgtactaaggaatcgaccaaccaaaaaatcctcccagagaggttttgcacctgcaaaaaacctctttcggaacaaccactctttctttaccatcaactgcatctaccacaaacttttgttttgtgaagatatgtttttttgcagcgttgagccatgatttcttaactggtggagacaccacctcaacaactgttggagtagcatctagacctaacgagatctgctggtctgaaactgtctcacttgtatccgacaccaaaaccccttgctcacccttcttcgtatcatcagatttctcctcctgactctctagaatcggtaaactgttagccaaatcaatggccgacaccgaaacctcaccggaagtgactggagaggctgtcggctgcagcattcttgcttggtacgcaaaaaaaactaatcgcctttttttgtctcctgccacgtcagccctttttcttctttttaacctttgtctttctctttcttctttgtttgatttctctctcgtttttaccactcttagataaattataggtatgctgccaatctctctcttgataaatctaggctgccaagtgttcttcatattgatgggttttctctccctcattttgtagataatctctttatttctttggtcggaattcaatctttcttaaatttttcgttgtcatgtctttttctataattctttgtcactttcttccgtaacatgttatttctttgaattacacgtaatagcagaatatctctctctttaaaatgttacttttttgtattacatgttatttattaagatcacatgtaatttgtttttaaaacatgattttaatgttaaaacactttatttttctacgcttttctttaagtataatatgatttttttttattaaatgacatgttcttttagagcgataagaaaaaaattacaagtttttctttatctttaatttttcgtagtgcaaatgttaaatcagattctttagtacaaaaaattcgtaccgaaccgcatcatattacctatgtaaacaatatttctcaaagataactcttttgaacttaattattattggttgacaaaaaaacatgtttttttcacaaataacaatacgctactgcatttttgtctatgtttaagaagaaattttcacaaaagtggacgaaaaaagatttgctctaaccgtttgtcaaagtgagaactggttttcacgttttgtcttttcattcaatttcggaccaaattaccctgggaaaacttaataatggcacaaaccaaaccgtgcagcagttcgtatcggttgagttgacggcgtaaaccaaaccctacagcagttggtttcggtttagttgatgcggttcagttttgaaaaagacaaaaaaaaaaaactgaaacgaagaaacccgagaaaacgataaagagaagagagtaacggagagatttgagagagaatcagaaagcgaaacgaaattaagtatccattgcttcaaaattcaacataacttcgaattgttgggtagttgaattgagccacagaactcccacatccggggaagtgaaagttaatgtttttcccagcgaagccaagagaaagttactgtttattccggcaaaatttgaacctccggcgagatagcatctttagct

SEQ ID NO: 13052 - DNA, 3000 bp, Unknown; identical to SEQ ID NO: 13049
  misc_feature (1)..( 3000): cDNA_ID_2710341_gDNA_ID_2214594_Annot_ID_186841 3000 nt of promoter + ATG

SEQ ID NO: 13053 - DNA, 3000 bp, Unknown
  misc_feature (1)..( 3000): cDNA_ID_3027851_gDNA_ID_2214594_Annot_ID_186831 3000 nt of promoter + ATG
cgcaaggcaatcgggtacgtaaaatattatacatttcagcctgcttacaaaaaacgaagatatgttcgtgaggctagctattcaaacttgaactaacgtaccatttgataaatttatacaactatttcgccagttccattttatggacttacaatatagtaaagtcagaacacacttcacttgagtgatgtggaatcctaggaagttttgtgtaaattatgtttcgaacgtatatttaaaaactatagtttcgagtttatatatgtactttaaaaaaaaaattgaggtggaaaactaaattgaagtcaggaagagggcttcacattttcacgtgcttaagaatgtctttgaaataacgtgttttttgggcaggcatggtgaagccagagagtgaggaaactgtgcaacctgaaggttatggcggtggccacggaggacatggtggtcacggagggggaggaggccacggacatggaggacacaacggaggagggggccacggacttgacggatacggaggaggtggaggacactatggaggaggtggaggacactacggaggaggtggaggacactacggaggaggtggaggacactacggaggaggtggaggacactacggaggaggtggtggaggacacggaggtggaggacactacggaggtggtggaggaggatacggaggtggaggaggacaccacggaggaggaggccacgggctaaacgaacctgttcagactaagccgggtgtttaaaactatataatatcttcactaccatgcatgattgcatatatatatatacgcttatgtattatctatatgcctataaataaaccatggtgagtttgtaacgcagtgccttcagaaatgttcggaataaatttccataatattagtataatgtctctctgtttgaattataaactgcgctgtttgcataataaaatctcttgtagctaggtcatgttactctctttcagtttttctttgtaacagtattatatccttattcatattgttagggaatatttttcttaaaagattaccaaaagcctgcaggaataaaaaaaaatgattactaaaaacctagagactatcgaggttttgcatacaccaacacttacgaagttcattaaatatatgaaaccgatacgagagatgggatcatcagagaagggagataaagacagtagaagcttcttaattgtcgcagttatgttctgatcttttccttatagaattagacttttaatattttcgtttttagttttaacttacgtcggttgtaagagatctatatataatcatcttccaaacattacccttattttcaaggctttgcttctgttgggtctcttcgcagttcttctcgtcatctccgaagtgtctgcggcaagtaaaattattgtatgcatttcaatctactttaaagaaacaagatatatgataaaaatattttatacatttcaatcatccaacactaaagtaccatttgataaatttacatcacttaagtgaagtgtggaattctagtaccattttagaagttgtgtgcatattatgtttagaacgtatatttaattttgtaaaccttttttgaaaaaagcattaatatactttcaaatctttattgaacgcacatttaacattttgcaagtacatgcttaacaatatctttgaaataatgttttatttttaggtaggcatggtgacaccagagagtgatgaaactgtgtaacctgaaggttatggcggtggccacggaggacaaggtggtcacgaccatggaggacacaacggaggagggggccacagacagacccggtccataagggccattgaagcaatagatttaggcctcaatatttaatggctttttactttaaatttattttgagtcctttaccataaatatatttttagagccttttaagattttgtttaggcatttagatacaaactaattagtatctctaatagtgaaatttgatttattgtgaaatgttttttcaaaattggacttttcaacattttttgggatttattttgttgtttaagtgtatttttgaaatttgttttgttgttaaagtgtatttttagaggtttaatgtatattttattattatttatgatttttcataatgtataaaaaggactgtttttaagctttgcttaaggtatcaagatatgtttgatcagcactggccacagacttgacgcatatggaggagtggaggacgtggaccatgtggtggtcacggtggtggaggtggctacggaggaggatacggagttggaggacacatgattaacgaaccagttcggactaaaccgggtgtttaaaactatataatatattcagcaccatccatgattgcatcaatatatgcaattatttattatttttatgcatataaataaccatggtgagtttgtaatgcagtgctttcaaaaatgtttggaataaagtttcacaatactaatttccgctgctcgcacaataaaatcgtttataggtcatgtaactctctttcacttttttcttgtaacatatttattttcttatttataatgttggaaatttttcttttaaagaaaattttaccaaaacctagagactaagactatcaaggttttgcatatacctgcacttaaaaagttcattagacatacgaaagttccgtaaagagccggttcagtttccttaaccgttttctggtttcaaaataatttaaatatttaaaattattaattttaaaacttaaattaaataaaaaaactgtcttcttcgagaaagcagaacagttccgatgaaacgaagagtgatttcgaagaaccagagaaattccgacaaaactgaaacacaattccgattgaggctctgttcgagttcgagtcgttgctaaagtggagaaaatttcgatagagttcgtgttaaagtgtggaacaataatacaatttttgggtttatcgattgactgttcagagaagagctcta

SEQ ID NO: 13054 - DNA, 3000 bp, Unknown; identical to SEQ ID NO: 13048
  misc_feature (1)..( 3000): cDNA_ID_2713041_gDNA_ID_2214594_Annot_ID_186829 3000 nt of promoter + ATG

SEQ ID NO: 13055 - DNA, 3000 bp, Unknown
  misc_feature (1)..( 3000): cDNA_ID_2710348_gDNA_ID_2214594_Annot_ID_135455 3000 nt of promoter + ATG
gacgatggatagaccactcagcaaatgtcctgttaggtacatcatcaggtcctagcttagaattgatgggattgtttcgaaagctaaaagctggagagctaatgggaagccatggagtgcataagaccctacaagtaaaccccttattagttgttgagcatcgtaaggagtttggaaatttgttatcctccccaaagtacgggtaaaggacacccttccccatgggtatttgcagaagaactccaggttcttagtcatctcgacagtcttcgaagtaggcctgttggggttactgtgggccgctaccacaccgtcaaccaaaataataagagatagtgccagttgctttcacccctccatgctttcctcctcctgcagccagctcaccaaatcagcaattgttggaatcgtgtccccaaacctctcatcaaacagagtcttccaaacactctcacactcaggtttcacactgataacatcatcaacgtctttcttcttgggatacttcccacattccagcccagttaggataataaattctcttaatccaaatctaattggatgaccgccgaatacaatccacatctcattcaccttctttgtcactaactgacggcatattagtccaaggacaagcttagcattgaaagatgccttgtttttgggtattttaaaaagttccccaaatggagaatcgagaagaaactgcatctctggtttcccctttagtacatttgctatgtcaaaaatgtacttcagtttagagtacgcgttcatcttcgtctcggaaggataccggtctagagcaaagagtcttggtggtaactcttcaactgtaagatcttcagtcggagcaacacttggactacctgcaattaaaagtcatatattgttaagcaaaccgaagtagtgtacgtacacagacattttccagattataactcaaaatcatatttttggcggaaacagagatttccaattctacttctcaatttttcatcctaaagatatgctaaattccgacaaattctaaccctttaatcaaacaagctttacaattctgatacacccaaagacaacaaacggaaaattagagattctaacccagttcctccgttgcctttgtcgcagagcgttttctccgcggggaaactcttaatacccgcttctccttccctggaccatgctgcttcctcgggacttcgtcgttagctttattcccagccatagctaaagatgctatctcgccggaggttcaaattttgccggaataaacagtaactttctcttggcttcgctgggaaaaacattaactttcacttccccggatgtgggagttctgtggctcaattcaactacccaacaattcgaagttatgttgaattttgaagcaatggatacttaatttcgtttcgctttctgattctctctcaaatctctccgttactctcttctctttatcgttttctcgggtttcttcgtttcagttttttttttttgtctttttcaaaactgaaccgcatcaactaaaccgaaaccaactgctgtagggtttggtttacgccgtcaactcaaccgatacgaactgctgcacggtttggtttgtgccattattaagttttcccagggtaatttggtccgaaattgaatgaaaagacaaaacgtgaaaaccagttctcactttgacaaacggttagagcaaatcttttttcgtccacttttgtgaaaatttcttcttaaacatagacaaaaatgcagtagcgtattgttatttgtgaaaaaaacatgtttttttgtcaaccaataataattaagttcaaaagagttatctttgagaaatattgtttacataggtaatatgatgcggttcggtacgaattttttgtactaaagaatctgatttaacatttgcactacgaaaaattaaagataaagaaaaacttgtaatttttttcttatcgctctaaaagaacatgtcatttaataaaaaaaaatcatattatacttaaagaaaagcgtagaaaaataaagtgttttaacattaaaatcatgttttaaaaacaaattacatgtgatcttaataaataacatgtaatacaaaaaagtaacattttaaagagagagatattctgctattacgtgtaattcaaagaaataacatgttacggaagaaagtgacaaagaattatagaaaaagacatgacaacgaaaaatttaagaaagattgaattccgaccaaagaaataaagagattatctacaaaatgagggagagaaaacccatcaatatgaagaacacttggcagcctagatttatcaagagagagattggcagcatacctataatttatctaagagtggtaaaaacgagagagaaatcaaacaaagaagaaagagaaagacaaaggttaaaaagaagaaaaagggctgacgtggcaggagacaaaaaaaggcgattagttttttttgcgtaccaagcaagaatgctgcagccgacagcctctccagtcacttccggtgaggtttcggtgtcggccattgatttggctaacagtttaccgattctagagagtcaggaggagaaatctgatgatacgaagaagggtgagcaaggggttttggtgtcggatacaagtgagacagtttcagaccagcagatctcgttaggtctagatgctactccaacagttgttgaggtggtgtctccaccagttaagaaatcatggctcaacgctgcaaaaaaacatatcttcacaaaacaaaagtttgtggtagatgcagttgatggtaaagaaagagtggttgttccgaaagaggttttttgcaggtgcaaaacctctctgggaggattttttggttggtcgattccttagtacgaaggccccgcatgtgggaaagattcacatgattgtgaataaaatttggagataatttaaacttaattgatgtgtatgaagtaaacgcaacaacagtcaaatttcgcataaggaatgaggcaatg

SEQ ID NO: 13056 - DNA, 3000 bp, Unknown; identical to SEQ ID NO: 13051
  misc_feature (1)..( 3000): cDNA_ID_2710352_gDNA_ID_2214594_Annot_ID_135456 3000 nt of promoter + ATG

SEQ ID NO: 13057 - DNA, 3000 bp, Unknown
  misc_feature (1)..( 3000): cDNA_ID_2710360_gDNA_ID_2214594_Annot_ID_135459 3000 nt of promoter + ATG
tttgatacataacaatccactccatacatgactcattaatttttcatttgtaacctgaaacacaacagctttcatcatagctaacgtatgttctagacatatcaagcgaagaagattcaccaaagtcggttattttatttgatctcctcttcgagatcacaaaatattttcgttgtttcaaatatgtaacaaaaaaaaaaaaactagattagcagattcaaaatatcaacaactatgttacacaacttacgcatctttttcaagcatctccacgttcatgaagcatgcatcaaaaccatgaggtagctacttaattcccaattgtttatatacttacttaatgcaaataatgtaaccatataaatgacataacttaacaatcatttttttattttcatgtgaatttaaattttctttagaacgtgccaatagtgagaaaaaaaaacattaagacatcaagaagtgaagaaagtaataatttatagggtgatttgcaagaataacaaaaaaaaaactgaaaattaaatatatagcacctattatgtatcaattaagtaaataacactctaaccatgaaaaaagtctaaacgacccttgctttagtctttccagaggtaagtgggagagatgtcgtcgacattgaacgagatgatgattggtgaatatagagatgttctagtgaaagggaagaagatagaaatccagcgaagaggatgagatagacaaatccaacaagaaagcaaagaagagaaatgaagacgaattttcagcggctgggatatgcaacatacaccagagatgacaaacaaggggtataattgtcccaaatacataaaatacagaagatatcaacttgtttttttgaaaattgttagtttcttaatttaatttttgggagatttgcaaaactactattttttactactattttgcaacaatactcttttatgttatccatttaaaaaaatacttcttccctttaacagaatgaacaaattaccctcatctaataggaacatgtaattggaaactaaaattttcccgccaaatttttggagtcaaaatttattttttccgccaaaaaataatttccgccaaactttttttccgcaaaaaaaagaaaaaatttcccgtcaaaacttttttataaaacttttttctcaacaaaaaaaaatacttttaaaaatccttgtaattttttttgccgggaaagagatttacaagggattttaaaagggttttaaaagatttacaagagattttaaaagggttttaaaatatttacaagggattttaaaagggttttaaaaaatttacaagtgattttaaaagatttacaagggattttaaaaggttttaaaaaaatttacaaaagtttataattgatcttgtaaattctttaaaaatcttttaaaactcttttaaagcatttaaaaatctcttgtaaatcttttaaaacccttttaaaatcccttgtaaatcttttaaaacacttttaaaccctttaaaaatctttaaaaaaacctttataaatcttttaaaactctttaaaatctcttgtaaatattttaaaacccttttaaaatcccttgtaaatcttttaaaacccttttaaaatctcttgtaaatgttttaaaacctttttaaaataattttaaaccctttaaaaatcgttaaaaaacttttgtaaatcttttaaagccctttaaaatcccttgtaaatattataaaacccttttaaaatcccttgtaaatctatttcccgccaaaaaaactttttttcgcggaaaaaatatttttggaaaagaaattttggcgggaattctatttttgaaattttttggcgggaaaagattttgatggaaacattttggcgggaaatttattttagaatattttaagcgaaaaaattttcttaattttttttgctgttagttttgcaaattttcccaatttatatgagatatgtcaaacattaagacattcaaaaccatgggacggctacttaattcttaattgtttatatacttatttaatgcaaaggaacatacgaaaatcaagaagtaaagaaagtaacatataaattatttgtttttaattcatatgtctatatgcaaaaaattaaacatataatttttgtaattaaaatggaaaactaaaaataagatggagtgtatataattaaattatatttttatcatagtaaaacaaatatttaaattatatggcaaaatcgaatttgtaagattgaaatttcgtttaaggaaatacaaaattaaatactaaaaaagtatgtgagttattattttaaattcaaatatcattaataagatgaaatgtataaggactcgatagtccaatttactcatgtgtatagaaaggctaatcgtttagcttatggattaccaaattatgtgtttttgttattgcttagtctacatatatttgatgtttgtcgaaatgtctgagtgtagttattatgttatgaataaatcgtaggcgcttttgccctctacatattactaaaaaaatggaatgtatagaactaaatgacaatttattacgatgaaatagataatacaaacttacgatgtatagtaaaattaaatgtatattattaaaattttatttgatacaaaaattaaaattaaatattagaaaaatatataatcatatttactattcaaatttaaatattattgataaacatttaaataatttatattttacattcgaattttttagacggactttatctagtatataaatattgttaataacttacatcattttattttttaattttggtaaaataataatatatcctgttttcattaattaattttgactaaggtctctttaattatagagttgcccaaagaattattctcagatttgtccatctccgagcatctggcttctctgtcgcatcttctcttccctttcccccaccgacaattctattcatctccgatcaaaaactattcctttctgatcaca

SEQ ID NO: 13058 - DNA, 3000 bp, Unknown
  misc_feature (1)..( 3000): cDNA_ID_4257502_gDNA_ID_2214594_Annot_ID_135462 3000 nt of promoter + ATG
tctctcatcgtagggatttttttagcgactaggtttaaaaattctcaaaatctggttacgtctatttcaattgcttctgagtttgcatgaattgatccttgattctgatttccaacgatttcaattttgattgcgttaacagttataagaatccgcaaaattatatgttgaatgattttatcgccgattctgtattgtttcgtgaagtagtatgcataatctttgattgaaacaagttttgtgtttattgatgcaaatacattatgatctttattcaagtggagatgaatattgatgttgaagttactaagtttcacttgtctctcttgtgttccgtggtcgagtctctgttgttcacggggcgtagaatcgctatttcagtccctgtacataatctttgattgaaacatgttctgatttggtgctgcttttgctgaggaagcaaaatacattatagtctctgttcaagtggaatcctaagatattatcactgagtatgtgttgttcacgaggcttagaatcactattttagtccctggagcctggagtagtagtgtacataatctttgattgaaacatgttttgattttgttctacttttgctgaggaagcaaagtacattatagtctctgttcaagtggaatcctaagatattatcgctgagtctgtgttgttttacgtgggttagaggatgttgatgtgttgaaaattgatggatctgtgttttttttgctcttgaatgttacagaaaagagacaagctgaagcagcacgtatcagggagaagtatccagacagaataccagtatgaattttggctattttcatttaagaaaattgcatagcttttgccttattctctctgaaattgttgcaggtcattgtcgaaagagccgagaagagtgatgtcccggatattgataggaaaaagtaagtccttacttctcttgaggagttggatataatctctttcttctcactgaaagtggcttcaagcccttttctgagaaccctacactccctcacatttagtaatgaattggttaattggatagaaataatttttttttattgaaagatctggaggaatttctggttttcatggtttgttgcttagggataatgaattggctgacttactattcaaaactttaggtacttggtcccagctgatttgactgttggccagtttgtttatgttgtacggaagcggatcaagctcagtcccgagaaagccatcttcatttttgtcaagaacattctaccaccaactggttagtttcaaacacgttccttaatcatatacttttccagttcaaggaatcatatctttttctcagttgagctaatagtagtagtgttatccttttattgcagcggcaataatgtctgcaatttatgaagagcacaaagacgaagacgggtttctatacatgagttacagtggtgagaacacgttcgggatcttcttctaatgcgcttggaatatgtggatgcatcagattatcaatgtacagtctgtctatttctctgcttgtctctagttttcatgacattggacgaagcttttgaaacttgcatgctatgttattaacatgataaggtcttccgttcatggtgttaatttggctttatgctacacttaatttcaaacttagtcgctatatatagttgaggtcacttggtgtcctccttgaatattggcccggcctatttcactagtcgttgaaccgttacgatttctatcttctcaaagttagctcgaccgtcaaatctctaagctcttgcaatctctgcttctaaggaacacaaaacagagataactttagctataaatatttagatttcaaaagcaacttgatttaggtaaatttgtgcacactctagaatagattatcatctgttacagattattactgtacaatccagcaaaaactaggcctgggatttcggattaacccaatgaccgaactgaacaaaccgtttttttggttctgataaccgactatgaagggaaggctaaaccgatcggcgaaattataattgaagttcggttctcggttcggcagacataaccgatcagttttctcggttaatagatactataaatataaagataaaaacattagatctaatctttttagcttcttctccgtttccttttgatcctcatccatggctatttagtcaattctctctatctgcatgtggttttcactatggtagcacgtcggggcatatttcgttacggagatatcgtcatccctcgctatcaccgtcaccgtcacagacgtagatctgctgattatgaagagggtagcggcaccaagataccatcaaccctaatttttaataggtttggatttttagttattttgggtttaagtttgtttttcgttttggcccaattattggtttgtaattataaaattttgtttatcttcgcccattctataatttttgttttgacccattatcttgattttggacttattcggtataaactaaccgaactaaaaaaaaaatcggtttagttcagagttgattttgaatcctataaccaaaccgacccgaaccaaatctttattcggtttaatttgacaaaattttaaagaaccgaaaaaaccgattaaaccaaaccgaaccgattacccgaataaaccgaatgcccaggccaaaaacaactgaaaataaaaaataaaaaatgagataggagaatatttaatccgacggtggagaaatgttgatataataaaacgtgatacagaggatcataaacccgcaacatgagaaacgtaataagttaagtcaaaaaaacgaaaaagccagaatcatatttgtggctctggtttctccatccaaacaaaaacaacacccaaaccttgtccacaccaaaatgttaaactcaaaatccaaccacacacacacaatttctcttcctctctaccattaacatcgatcagaaagaccgagagagagagggagaagctgattgattatg

SEQ ID NO: 13059 - DNA, 3000 bp, Unknown; identical to SEQ ID NO: 13050
  misc_feature (1)..( 3000): cDNA_ID_2710363_gDNA_ID_2214594_Annot_ID_135463 3000 nt of promoter + ATG

SEQ ID NO: 13060 - DNA, 3000 bp, Unknown
  misc_feature (1)..( 3000): cDNA_ID_2710374_gDNA_ID_2214595_Annot_ID_135465 3000 nt of promoter + ATG
aatactaaaaaagaaagtttggattcatttcctacacaaatttatggttttataaatgtacaaagaatattgaactaatatttcatgttccgattatatataagttcccattttcaatcgatgagattaataaagaaactttctggagtatatatttaacattttcgattttatattatgaagctaaagtatgtacagtatgttggtgaaaaaacatggatcgttaaataaaaaaacatattaaggaggagaacgaccgagcatcttctaaagaagattaaagcataagaacattggaataaggaaggtgaagtattgtcgtggacattcctgagtgggaagactcaccattacatacataattaattagtaacaaagacattggcgcctgtcttgttcccgttgcttttccccatctttatctccaattctctctctctctgtctctcttgttctactactttggggaagatgatagcttcttcttcttctccctccatcacttgttcttgattctacttgtggtcctccgcttctcttttcaggtgattggtcattgatctctggtttttttattttgcaaacttatgggttttgcttttcgtttttttctctgtcttactaatccgaatctgattcaaagtttacaactttaactaggggtttttctcactgaactcttatgagtgagacatagattcgtcttctaggtctgtttccggagggaattaattaataatagtatcaattttcgattatttttctttggttgattctctatcgaagattgtcgatgcttccaaagttgaagcctttgttacttctgaactcaggattgtcttgtgcctcgctgtagattatcgaagatagttgtggttctgggtaattagcttttggtgataaaggtttgtgctttacacatcttctgctactttttgggtatggcctaactaaaaaaagtaacttttagtatctctttccgatgatatcgattttataggagtgaatctctcatcttgcttcggagtgaaacaaatcatgtttttgttttgtcggaatgcttatctgattgcagtgcatatagttgtcaaagtttgttcttgatggtgatgtagaagctcttttatttgacatatttggttctttgtttagtttatttttagtaggatctagaagatcatggctcaaaggaaaggacctgatccgcctccgcctcaaaggcggattctgcggactcaaactgctggtaatctcggagaggctatgttggacagtgaagtggtgccatcgtctcttgtggagattgctccgatccttcgtgtagctaatgaagttgaagctagtaacccccgtgttgcttacttatgtgagttgaaataattaaaaaaatcgcctggtgatgtgatttggtcatcttatatgatcttgaaaaatatcgtcgtggatgtttctatcaggtcggttttatgcgtttgagaaggcacacaggcttgatcccacatcaagtggacgtggtgttcgccagtttaagactgcgcttcttcaacggttagaacgggtgaatatcgtctcttcatttactctgcttgagttttcatcttcaccccgttgtcttgctaggggattatgtgtcattttgccttatatcccaaacttctgcaggagaatgaaacaactcttgcaggaaggcagaagagtgatgcacgcgaaatgcaaagtttctatcaacactactacaagaaatacatccaagctttgcaaaacgccgctgacaaagctgaccggtttgttgacatccctgtcttatctctattgcaatctatctttctgtgattctcattcataatacaaatttgttttacttgtagtgctcaacttacaaaggcatatcaaactgctgctgttctctttgaagtcttgaaagctgttaatcagacagaagatgtggaagttgctgatgaggtgacctgattctagattatattttgtagtatttaagtctcttacttctgatcttatcccatgctttcgtggaaattttgatattctttattgatattatttgtagtatgaaagctgttaataaaaaattttgatattctttattgactcactgggttttgttcatcctttttcttgctggtagattttggaggctcacacaaaggtggaagaaaaaagccaaatctacgtgccttacaacattcttccccttgatcctgatagtcaaaatcaggctataatgagatttcctgaggttaaccaaacattccactaactgtttcaattctatgtttacttgtcttttgagacggaaaataaataacacttttctgcagatacaagctacagtaagcgcacttcgtaacactaggggtttaccatggccagctggtcacaagaagaaactcgatgaagacatgctagactggcttcaaactatgtttggttttcaggtgatgctagcgaatatcctgtttggttagttgattgaggatttatccctgtgctgattgtgctccaaacctttaaaatggcagaaagataatgtttcaaatcaaagagagcacttgattttgttacttgctaatgtccacattcgacagtttccaagacctgaacaacaaccaagggtatgtattcttttcaacttggatatgagggtttcttgctcgtctagtcctctgtatctgcactaacggcctaaattacaatttctgcctttagctggatgatcgtgcattgactatagtgatgaagaaacttttcaaaaactacaaaaagtggtgcaagtatttgggtcggaagagcagcctttggtgaggcatctccttgtaacacctgcttttgagaatttattttgttatttcttaggaatatagaaacagatgtagtacataaattggatactataagtctttgtgcttagttatctctcttttccctgcttgtaggttgccgacgattcaacaagaggttcagcagcggaaactgctatac

SEQ ID NO: 13061 - DNA, 3000 bp, Unknown
  misc_feature (1)..( 3000): cDNA_ID_2710378_gDNA_ID_2214595_Annot_ID_135466 3000 nt of promoter + ATG
attttcacgggaaggtaaaatagtacaatcttgtactgccatttagacagtcaatttgatcttggtgcacaaaatgatatcctactcgtctcgtttcttgtggcagtgtttcttctcttgcatggtttatgtcgaatcaggaaaacagctttgttactattgggcagagggtgctagctagccccttgaagtaagttttttttacatctcgtggtggaattctatgaagggagacctggatttgtaactttcattttgactcctccagggtacgattccattacggtcatccagatgtttttgatcgactgtttcaccttaccagaggtggtgtctgcaaagcttctaaagttatcaatctaagtgaagacatatttgctggtacttgcttcatcgccttttctccggtgacacatattatgatctgtttccatacgtttttgtttcgttctctcataccttcgctattttcaggtttcaactctactcttcgtgaaggcaatgtgactcatcatgaatacatacaagttggtaaagggagagatgtaggactcaaccagatttcaatgtttgaggcaaagatcgctaacggaaatggggagcaaactctaagccgtgacctatataggctggggcaccgatttgatttcttccgcatgctttcttgttatttcactacaattgggttctacttcagtactatggtaggtcatattcctttttctttatcttatctcacgatcagtatgatacatgggaagtttatctcagtctgaaacattatctgtgtctttcttacagttaaccgtgcttacggtctatgtatttctatatggacggctgtatctcgttcttagtggtcttgaagaaggattgagcaaccagaaagcttttcgatccaacatgcctcttcaagctgcacttgcttctcaatcatttgtgcagattggtttcttgatggccttacctatgatgatggagataggtcttgagaggggattccataacgccctaattgattttgtactgatgcagttacaactcgcttccgtgtttttcacgttccaactggggacaaaaactcattactatggtcgaacattgtttcatggcggcgcagaatacagaggcactgggcgtggttttgtggtgttccatgccaaatttgctgaaaactacagattctactcgcgcagtcattttgtgaagggtattgagctgatgatactcctgctagtgtatcagatatttggccatgcctatagaggagttgttacatatattctgatcactgtttcgatatggttcatggtggtgacttggctctttgctcctttcctgttcaatccctctggtttcgagtggcaaaagatcgtagatgattggacagattggaataaatggatatataaccgagggggaattggtgttcctccagaaaagagttgggagtcttggtgggagaaggaaataggacatcttcgacactcgggaaaacggggtatcatcctcgagattgttttggctttacgcttcttcatctttcagtacggactggtttatcaactcagcacctttaaacaggaaaatcaaagtttgtgggtgagagctcttacccatctcatgttgctcttcttgttttcgaattctcttggtttttaataaattgattctcaatgtttcacagatttatggagcttcatggttcgtgatcttattcattttacttattgtaaaggtatgataactatcaccatgaacatattcattcacattttgggtttcttaagtatgagataccaacaatcttttaatcgatcaaggttgtttactaaactgaatgtaactaatcacagggtctgggtgtgggaagacaacggttcagcacaaacttccagcttctcttcaggatcatcaagggttttgtgttcctcacatttcttggacttctcattactttcttagctcttcgttttttaacacccaaggacatcttcctttgtatgctcgctttcatgccaaccggttggggaatgttactcgtaagttctcattcctccattaaactcctccaaattgtttttaatacgtctttgtgtttgtcttgtttctgagatagttgctgcaattcattcaaaacattctctcttttcttttcaagattgcacaagcgtgtaagcctctgattcaacggctaggattctggtcatcggttaggacgctggctcgaggctatgagattctcatgggtttacttttgttcactccggtagcgttcctggcttggttcccgttcgtgtctgagtttcagacaagaatgctctttaaccaagcatttagcagaggattgcagatttcacgtattcttggtggtcagagaaaagaccgctcttccaagaacaaggagtgaaacaaaaatcatataagcagagaacagttacacatgtatatagtttaatactattgaagacaattatgcctcttttactacgttcttacaaagtaatctatggttctttaggagttgtgtattccggattttgattttgtttcggttcggcttacttggttcttaaatcttcggtttaaggaaatagcgatagtgtagatcggtttggcaaggttttgacttttgattgcattggttctattttgtattaaataaaagataagtccctgaaattgtagttgttttcaaaatactcaaaatattttagtacgcttctaatctaaccccaaaaggaagaaactgtatacgaccggaggttctcaatcgaatactacaccggttcaattcgattctgtttataaaccggtctctcgcgattcaattcgtcttctttttccaatttccagttccttcttcttccattgtcgagttttcatgattttcccgcaaaacccttctcgtttatgggtttaaccttcctgtgtcaccaaaattttctccgtaacttatcacctccactttttcatatctgtaatcgctgaaggtaaaag

SEQ ID NO: 13062 - DNA, 3000 bp, Unknown
  misc_feature (1)..( 3000): cDNA_ID_1580388_gDNA_ID_2214595_Annot_ID_135467 3000 nt of promoter + ATG
taaacctttttaagtactctttagctttcacaaataaaataaaaattatatatgaaacaacacaaaatattctataaacgtagctatcttatttattgacatcctataatatattggaagtgaaattttagtataacattaaaatcctaattttaaaggtttttaaagtatgtcggtcaaataactttttttgacataactacaaaataaagttcagttattactaataaaaatataggtatattctaccatttcctcgtaataactgacaaaattttgcaaatcacccaatttaaatttaaatttgatataaatttacaacattcaattttttaacgtgtatttttggtccgtccgccaaattttctttttgacaaaatagccaattaaattaaatattttgtttcttttatctctaattgaaattaaatgcagatatgtcaggtaaaaaccatttccttgtaaccggtcggatttcacgagatttccggcgaaactccggcagtaggtcagcatggggaaccaacttcatgctcttatctgagtcgctaaacctcactttcctcagcattgaacgaagtctaacgagccacaacgagttcgcaattccttatcctacttactttcaccctacgtcaacccccgagatccttcagtggcaagaaaagatcaggcttacaaaccggacggtcctcttctcatttgccggagctcaaagaccaagcagaaaccagaacggtgtggttcgcactgaagttataaaacaatgcaagagttcatctaaaacgtgtaggtttcttgactgtgacgtcaatgcaaatagctgtgatgatccgatcagtctgatgaaacttttcgagagttcgactttctgcttacaaccgccgggtgattcgttgaccagaaaatcggtatttgattcaatcttggctggttgtataccggttttctttaaccaaggaagtgcatacaagcaatatttatggcacatacctaagaatagtagcaaatattctgtttatataacggttaaggagctgagaaccggtggaaagaacaaaatcgaagagattttgcgtggaataccaaatgagagagtggttggtatgagagaaaacgtaataagattgattccgaagattgtgtatgctaaaccaaaccggaacaaaccggatggagagattcttgaagattcttttgatgttgctgtgaagggagtgctagagagaatagaagggataaggagaaacgaattcaaaactgattagcaaattttatagttagcctaaacaaatgaagatgtcctacatttgttattgtatttaattgttcataggtcttgtacaaagataagtctatcaaacatggcaaactttctccccaattttaaaaccttttgatatgcgaaaatttcaggatctatgatgtagtaggatacgtatgtctgtgaatgaccattttaatgtcccctttgagactcttacgcttagggagagaaacagacgaagagagaagacatagaatgtcattgaatcatctctcgatagctttcattaatgtttgtcaataaggattggttaaagcattagtatatttagtctcttatcttcggcccaaagcagcgtaaagctttgaatggctttgttggaagacgtaaagcagtagtagcttgaagcaaagtgtggtgtggtctatggggttcttaattttaacggttctttctaaaggtgattaccaaattttggttgatatcaaattttataactctcagttcttatatgtatatctctcgctcttctaatgaatatatctattcatattttggcaaaacatataattatattttattttcaaattgtgtatacctaccaatctaccatcatggttaaccaaaaatttgtatcataactaattaactatttttgttttgttttccgttgaactaggaggccaggaggggagaggggtttataaagttatatgaaagtattgttgtgtcgaaaagaaaagtttatttcgttaaagagcttgattgttaacaaatacataaagacattatacatttcctcttgtccgtaacggattgagttgttaattattgaatagttcggcatacgtataagagaaggtgctacgtgagcagcatgcgaagagaagatagggcagatgtcaaattcagttgatacgtgtcgctctcctaaacaaaaactctctcttgcatgataacaaaatcagcaaaacgacaacaatatttcaacaccaaatcgaggcgataaggaaaaggctaaagcgacccatgatccctcgctcctttcgtcaaattagaatttaaaactgtttcattggtgcaattaaatgatcctctaaaaagtgtttgaacataattatttttccatatacatccataattgtataaacttttgtgagaagaaacctacgaaatttctgtctttttaacatattaatatcaactaatagatggtgatctaaagtttaaaaatcaggtatcaaataatttcaatttcattttgaattataagtatggactagttgacaatcataaataaaaaccttaaattaccaaaaaaataatccaattgcttagattaggatatataattagtgtgttcgaatccgatttacaataaaaacaaaattacagatcggagcaattcacatatatacgttaaaaaggtgggggctcacttcacgtggagacttaattggatcagaaaagtaacttaaaagatgcggaaccccgaaggtgccgatggcatggggacccattcacgtacacccaaacacaaacaccaacattgcctaaactctttctctatataaacacttctctttctttttctttctctcacacaaaaatacaacaacttagatcagtctcaaagggggaaaaaaaacttaaaagaaacattaagaggcaacacaaatcacacaaaagatcaaattgaagcctaagaagaaggcaaaaagtgagaagcaatg

SEQ ID NO: 13063 - DNA, 1289 bp, Unknown
  misc_feature (1)..( 1289): cDNA_ID_3027952_gDNA_ID_2214595_Annot_ID_186905 3000 nt of promoter + ATG
ggctctgttcatcttttgctatgttaattatctgattcgtttgagaaattctgcgatttgagaacgaagtttaagtttcttgttgatgtcattgatcatacagagataaaattgatttgtgtctttcgaagtagagatctgttgtgtgtaagcttactcaagatggtgataatggcagatgctgtatattatcaaggatggagttcgtgaattggatcaatggtgtaacaagcttcttaagtacggtgaagcagtctcctctggctctgtgaaacaagacgacagtcctaaggttcgagaatcttcttgacacacaatctcaatggaatcttgctggtgaaatgcatttggaacaatcgtattggtctatcaaacatgtccttcattgagttgttcatttacttggctcttatctaatctctgagttaaagtcctgtttttaagcacaatgattgttgctcacttacttgtctcttatgatcttctgagtttaagtcttgtttttgagcacaatgattgtttgttgcggtgcaggcagtagatgaggtagtacaacaagaggagcaaccaaaagagtgcaaagaaggtgtgaaggtcaacagactcggtgaggcctttgtggttgagatcaactgtccatgtggaagaaactaccaaactctcttctcaggccgtgactgctactacaagctcttgtagaatggtgaccgctacctttttgcagttgttagacattcacattctttgatcatcatcaccattagttgaaggatctatcatgctgcatattcatcacaaaggttttctgtagataagaagacattcacactctgtttcatgcttgtatagatactaggtagctatacgttccattgtcatatactctcttgtgcattcgcttacttgtaatactcttaaatatgtttcattcgttaaaatggaagtgatttcttgtgtgtttgttatcattcttcttttaatgttttatgcgctaaacaatgttgtaaacacaagacggaaccatgaccggtctgggttttatctagatcagtaagtttgtaacccaaaatcaaaattgacaagccgaaaaggagaaagaaaaaacccaatttttaaaaccctagcgttttcttctaaagccctaatgtgtaaatattaggccgtttttgggcttcacaggatagaaataaacagagtacctaaaacgacgtcgttagaaagtagcatccaaaatctctatcccatgacactcttatatctcaatctattaaccttggagataatccatg

SEQ ID NO: 13064 - DNA, 3000 bp, Unknown
  misc_feature (1)..( 3000): cDNA_ID_2713048_gDNA_ID_2214595_Annot_ID_186901 3000 nt of promoter + ATG
cgtgacaagaatcatacatgaaaatgccatgaagattcgtgacgatggtgtgcctgtgaatttggtggacctcggatgaataagcatgcgcttgagttgaggaagtggaagatgaggggaaactggaattatgtctttgttaaaggttggaacgatgtgcttgatgctaacaagtcgaattcgtttaaggaaaaagacgtctttcctctctggtctttccgatctggaacaggtaaactctgttttgctctcacccctaaaaattccagcaacggctctacttcaggagaatctggcagtggcggcgatggtgcttctacttgaggtgaatctggtcaggtaccgttacccattcctccggcaatagattctagccactctggccaaggctgttcaggagagagcagctctagttcttcctaatcataactctgcttattgcttaagccacaagtaaaacggatttagttttcaggcaaatctggcttggttttctttcttttttttgttcagttgatgaaatagtggggttttgtccaaattgtgagacccatgatatgatgttttgatttgagtttctttctttatgtttgatttttttttatctctctctgatgctgcctatgtttacttatgattagcattgaaaatgcagaacaaaggagagagaacttgttttcttatattatcacaaaaagatccatcaggctacaacaacacacaacaagtgtaaagtttcttggctctactaaaaactcaaaagtcaaagttggatcaatcatcaccataggccttgaaacaataccgctcaatataaggagcgttaaagaaaagatcagcttccaaccatttcggataccgaacaagatctccagctaaaaactgcatatacctcttgcttccttcgggaacaactcgaacctctccttgttcaatgtaaaccaactgatccacctgccaatcccatggcaatttgcatttccctgtcttccaaactgaccatctcgaaaccccaagttcctccaaccgtttctgtgaaactttccgttccactttaacattgtatagctcctctaatggtttctctgtctgcatacaagtcaccctaaaggctctttgaactgacaggttatttgtcttcttacatgtagtgacagaacctgggaatggtgtagtcattatcagacttgccatggctgcttttatccaatcttgtcaaacctgagatccacaatgaactttaaataacacatatcgaaaacattgtgatgtgttaaagtcttgtaactcctgaaacagagaaagaaggtgaatttcttaactctagtgagtaaaagtgaattatattgtaaagctgaaggctttatcatttaccctctttgcaatagcttatatgaatcaatgacacagcgtaacacaaaaactcacaattcaggaaattagctaatgcccatttgctatttcgattggaaaagtgaaaactcatcgcaaaattgatgatatacgaatttaacccaacaagcaaaaaaaaggttgtcgatttcaaaaccaaaaaaaaaagcggaagacagattatacgcatcgaaatcgaatttcttaccagcggaagtgtgagtgagagtaacccttaaaccctgaagcagtcaggcttatccgatccccgatataataaatgttacagaaacgaccctaatatttatatttgttttaactttagactagaagtttgttttgagttaatgtgacccaaatattttttctatagacgtaacgttttcagatttgacgtaatccattggtcaaacttttgcattgagaatgttgacgtagatgatcttttgcatagcgcgttatatcttcttttttctttttctaggtgtggttatacgtgacgaaaataaattacgtttagtaaatggagaactacattggtcggttaaccaaacaaacaaccaaacttctctaacgttgatattctatattattaggtatacactaattaaatcacaacttgcgttcacattctcacctgatatgaaaccaatactcaatttccttaactggaaaaattccatgtggcctctagaagataaagttttcggatttaatattttttcgtgaattcttacagaaaggaaaatggttagttgaatctctaaatgaaactattctcaaaataacatatattttgttttacgttgttaagttgtttactattttgtcagcattgtgaggtttagttgtaatattctctctttttcttaattaacatgtagatattcccgtagagaaagcactaaacttttgctttgagaaagaaaagaaactctttattaacaaagaaaggaataacatataactcaaataaagacatgctgaatttatcatttcattcatggtgcatattctaatgttgttaaaagtaaaatatttcgcattagaaaggttaacaaaaacaataaaaaaggcatatcttcatatcattgttatattatattttttggtttaaaatatttaaatcctctgtcagaaaccagagagaggcgtattaaggtttctgcgttttgttaaattgatcttgagctctaaaggctgtctaatgcagtgttttatttaattagcctttataagatttaggcaaatatacataaacaactaagtaaatatatacttcctctgtttgaaaatatattagcatatctcaataaatattgaaataaatattattccttgcatgtgtgagtcatttacttattcttaaaatttgagttacataacaaaaaaaaggaagcttcgtagcagttttcgttcgtcgttggaataaatatatggagacttagcaattaatggtgccctcacgcggttctactaaaccgacctcctttttgcttcccttacctatatatacatatatctctatcttcacttcatattaatctacacctctacatacgattttcattaaacacttttcaaaaacaaatcataatctgttcgaag

SEQ ID NO: 13065 - DNA, 3000 bp, Unknown
  misc_feature (1)..( 3000): cDNA_ID_3027964_gDNA_ID_2214595_Annot_ID_186898 3000 nt of promoter + ATG
tcatgctatttatttgatttgtaattcgtaatttgaaccatgtcctgtaattatttggcaggcttttgagccccctatagacttgagtaaacacatgcgcgagccaataacaggagcactgtctatggaggtcagatcaagacttggaaatttatccttttcattttgaaatctttaatttatatgtataaatgcaggagctccaaagggaggaacatcatcatgatcattccctcaagaatgcagagataagactcaataacaagacatgtgaatttgatggaggccacttaaatcatgaccatggcagtgtaatcatgccaactcatatacttttatacctcatatagtgtaattctaattctaatgttgctctcttttctttcttaggtaccattttcatctcatgattggttggattcttcgttacaggcgcatgttcctctggttgatgtaaataaggtatgctttttcacttttactatggttgattatattagttttttttcatcctagcaactcataattgttgtagagctattttagtgtgaacaaagataaaaagaatatatcctcaattctcaaaatgtacatgaaacatgttagaggtgagaggtgacacgcacaccagtacaattgtatatatatatatatatatatatgttggatgttgtgtgtattgctcaccaatctattacttagaaatgtgcatgcatggtttttgttgtattctaacacaggttcgttgggtaataaggaatatagttcgagactggggagcagaggtaatcatatttttgtttgtcatgatggcaaggatgagatcctttctctaatatcatgatcacaactttagtggtatatacaatcttttgacttacagggtcagagagaacgagatgaatgctacaagcctatccttgaagagcttgattccttgtttcctgatcgtcacaaggagaggtacactttctgacttttgagtttctgacctcccatcaatgcattctgagtatttttgttttaccattcaatatctaaatttggtggctttgctgtctaatccataaactctgcttacaaagttaacgtatatgatttgcagcactcgtccagcctgtttagtccctggtgctggacttgggcggctggcccttgaaatttcttgtctaggcatgcagtggagaagcaaactttttttttttgttttttttttgtagctttgatgatagcgaggaattaatataacaactcttgtacattggaacaggtttcagaagccaaggcaatgaagtttcatactacatgatgttatgctcaagttttattcttaattagtaagagtttcttacttttctcttatacatttttaacatcagccagcaacaaacttataagtgtgtttctaagttgcttttggagagtctctaaatttgattgagttaatttcttgattctgttccagttttgagttttgctctactttttttcttttttctttttcataagtacacaattgcctggtgagtggacaatatacccctggatacacactaactgcaattcactctcggatgatgatcaactacgccctatttctattcctgatattcatcctgcaaggtatgccttatcagagagagtactttgcctatggtttggaaatttttgatagctttaaggataaagggactaagcaacttgtattggggatttcatggagctactacaatcatttatttcaatttactaaaaagtttaatgtaaacactctctgagagcagtgcaggagtaacagaaagtttctcaatgtgtcgtggtgattttgttgaagtattcaatgaatcaagtcaagcaggtaagaaatggtgactacttgcttttgtttaagccaatatgtgtatgttttataccaaatacaccactcatcactgagtttcaggaatgtgggatgcagttgtgacttgctttttcattgacacggctcataacatcatcgagtacatcgaaaccatatccaagattttaaaggatggaggagtacgtaatttcctatacgtaccctcctttccaacgtctttgatatttcatcactcgcctatctaaattaatgaatttatccatcaggttttgataaatctaggacctctgttgtatcactttgcagacgagcagggccttgaaaatgtaagcattggaattgtcacacaatctctcgctagataaataaatttgatataacaataatatatcttacttgtttctccttaggaaatgtcgattgagctaagtttggaggatgtaaagagagttgcttcacattatgggtttgagatggaggtaaatctacacaatataatgacaatgacatttgcctgtcagaaataaaacatctcatgatgcatgttcttcctcacttatatgagtggttgtcctaacaatatttgcagaaagaaaaaacaatagaaacaacgtactctacaaacccccggtctatgatgaaggtcagatttttttccatgtctttggatttgtggttgacttttggatccagagatgggtttaatttgtgcatgatgttgtgtgtgtctgttgcagaaccgatactatcctgtcttctggacaatgaggaagaagtgtgctataacaacaacttaaccaaatattcctcaaaactatatatgttttattctgttgcatttgtttttaaggaattaacgggtccaatctaaaacacatactatttcttttgttgttgcaaaataatgaaactgtgtttttcggttgatgtttgaaaaccaagtaaccaacactcaaagctaaacaaaacctttggcctgtgggcacaaagctaaaattttattattttctcggcactactacgcaaataggctaactaaggcccattaaataatatgaggcccaacttgaaaaagactcgtttcttgttactaataacctttccgatgaaatcaactccaaaaccgaagagccaccacc

SEQ ID NO: 13066 - DNA, 3000 bp, Unknown
  misc_feature (1)..( 3000): cDNA_ID_3027968_gDNA_ID_2214595_Annot_ID_186897 3000 nt of promoter + ATG
ggaatagcgccagctgtcaagaagaatattgacggtaactaaacaaaaacaatcttaattagtgcttaattacttatatttttcttaagacatttgggtgaatgatattattatctgggcagattttctagtggagaaatttggattctcagaaagtaaagcttcaagcttaagagttgaactcttcaagacttatggaagtactctcgctggtcttagggtaatttcacttctccattttctaaagaattactagttcattatatatcattgctttctaatttatttatttctttcttataaattgtaggcgttaggtcatgatgttcatcctgatgaatatcacaggtaataatcaatcatcttcaacaactatataaatattttgatctcaggaaagcgatttttgttcttaagcttttttttcttgcaaaatctgttttgtagtttcgtgcacggaaggttaccgtatgggtcgatcgaaccaaacaacaagctacgtaaccttctcaacaaaatcaaacagagaaaaattgtaagtttaatcttttatttattgtggcatgaatttttcttgggtccatacagccaacactaataaatgatcatttgttttttcttgggtccagatatttacgaattcggacaagaatcatgcggtgaaggtcctcaagaaacttggtttagaagattgtttcgaagagatgatttgttttgagacaatgaacccaaatttattcgggtcaacaacccgacccgatgaatacccggttgttctcaagccttcgttgaccgcaatggatatttgcattcgtgtagccaacgttgatcctcgccgaacagtaatattcttatttatttaattatttcttatgataaaactattgtatcatcattacaataagcaaactgtttttgtaaataggtatttttggatgataatatccacaatattaccgcgggtaaatctgtcgggcttcgcacaatcctggtaaatttttgttacatttcacatttattaattccctattttgcgacatttgtatgtgttagtttcaagttttaaaaatttggttacaaaaaggtgggaagagcagaaaagacgaaagatgcggattatgcggtggagacggttactgagatagctacggcggtgccagagatttgggctacggcgacggcgacaggcggatttgacgttggtggtgagaggatcagacggagcaagagtgagctggagggtatggcttcaatagcagccgtcggtgcgtgacgtgatcgagtgggcggatcgtggccgttggataattttaacgtctagtggttgggattgtacaggtggcgttaaaatgttgataatgcatatgtgaatataaataatagtggtggtggacaatattcatcccatgtggacaccaaatgtgaatacgcaatcagataatattatgtatgatgattatgatttcaatatgtgtacatttttattcaactgatttttttaaagtttgattgggattttataattagtctgttcgtttcgtcgccgcgggtacctgcggctgcggtagacgcaactagttgtgtttgtttggttgccgcaactacttgcggcaaaacgcagcgtcaaacgcagttttctgcggttaaaaattttagacgccatttaaatttagcgtcaaagatgaaagagttgcgttatatatcctaaatgacaaaaatatccttattatttttgaaaattcacaaacaaaccaagcgattctcttcttcaacaaacaaaccctaaatcccaattctcttcttcgtttcttctgtcaagatcaccaaacatgcggcagcgtcggtggcaacgatggcggcatcgaaacgaacacaaaacctgcggttgcgacagcggctgcggcaacgttggcggcgacgaaacgaacaacaacctgcggcagtgttaccgttgccgctgccgcaaccgcagccgctgccgcctgcggccactaaacgaacagactaaatatagttttttattagagatatgctgtttataattttatctccaaccaccatgatacatattacagttaaatctctataaattaataaattctttcactcccgaattgggaccattataaaaaataatataaatcgataaattaataagataataactttttgaaaagtcctatgtaaatatatggtctcatcaatatcataaattaataattttataaatatatcaattatatatacattatatgtaagaaattgttttgaaatataattctaatatttttttgcttaaaacttgtatttattcttatttaaaatttagttatagtattttactttatcaaaaacttttgatgttgttttctaaacatgatattattatttacttgtaattgatttttgaaagatattttctataatgaaaaaaatcttatagaaatttttgaaaagttactaaattaagaaaatctctgtataaattaataaatattaatttatcgataaattaaaacatctataaattaataaaattttgcagtctcaacattattaatttataaaggttttactgtatttgataaacgaatcccttgcgatttatatcttgctgtatttctaaatcctaccgaagttttttttctactgtaggaagtaattcacagttttatatctatggtatttataaattctgaatgtctggcattacaacatttaaaacgttcctaacttactccattttcattgtaggagaaataatataacatttatatctatgttagtaatataacattttcaaattgctattgttatattttcaaatttggacctcatgttccttagtaggccaaactttaccccattttcatagtaggagaaataataaaacgtacctttcagaaataatcttacgtcaaaatatatccttaaataacagaaaagtctttttagtcttcgtgtatacgaggaaccataatgatttcatcgtcagagatg

SEQ ID NO: 13067 - DNA, 3000 bp, Unknown
  misc_feature (1)..( 3000): cDNA_ID_3027979_gDNA_ID_2214595_Annot_ID_186894 3000 nt of promoter + ATG
accgggtattcatcgggtcgggttgttgacccgaataaatttgggttcattgtctcaaaacaaatcatctcttcgaaacaatcttctaaaccaagtttcttgaggaccttcaccgcatgattcttgtccgaattcgtaaatatctggacccaagaaaaaacaaatgatcatttattagtgttggctgtatggacccaagaaaaattcatgccacaataaataaaagattaaacttacaatttttctctgtttgattttgttgagaaggttacgtagcttgttgtttggttcgatcgacccatacggtaaccttccgtgcacgaaactacaaaacagattttgcaagaaaaaaaagcttaagaacaaaaatcgctttcctgagatcaaaatatttatatagttgttgaagatgattgattattacctgtgatattcatcaggatgaacatcatgacctaacgcctacaatttataagaaagaaataaataaattagaaagcaatgatatataatgaactagtaattctttagaaaatggagaagtgaaattaccctaagaccagcgagagtacttccataagtcttgaagagttcaactcttaagcttgaagctttactttctgagaatccaaatttctccactagaaaatctgcccagataataatatcattcacccaaatgtcttaagaaaaatataagtaattaagcactaattaagattgtttttgtttagttaccgtcaatattcttcttgacagctggcgctattccagtttttagagggtataatgtgtcatccaaatctgatcacaattagagaaacaaaccaaagacaattagaacaactttagtaaacacattttaccaaatttgatatcacgtatttgtataaatgttttaccgaaaatgaggcagttgatcggagagaaatccattacaagagaacaagtaagtaagaaaatatataatttgtttagaatattgagaaattggaggatttatatagcaaacaacaataagaggcgtgaagaaagggagatgtttgaaggtatttataggaagacgagtcttttctttttagtgtttgtttttctctattttttaataatggatactgactgctgactcatggttcaaatccctttcgtctattttatctggttatacattttctttgaacatccattacattataaaatatgatttgatatttactcggatcatattctatcctcatttgtgtttcaaacttgcaatggccgctttctatcttaattaaacaatgttaaaccactttttaattaacctaacgtgttaagtctctaaaaatgttctaattaacttgtattaaaacgctatgaaatattacttattcgatgtcttcagcgagcatggaacttcgtccatgttttttttttttttttttttaatgttaaacttaaacttcgtccatggttgatagtaaatgttactataacgttccaatattttaacttaatagaatttagtttttcaatgccatcacaagaaaagttacagaaaaattaggcaacgcgtcgctatagtttgtactaaacatcgatgaagtatcatatgaaatgtccatcattaggttttaacttttagcttttagatgttttcttaacaacatcgcctttatgtgaaattcaaatatgatgtcacgatcgactcactagcctaattaagtttgtgcacacaaaacacgtgtgtttcacacaaaaaataatatcaattcctagtaggctactacgcgttgacagaatatgcttcgttcagttgtacgtgtttcacatgctacaccagattattggagaatgattagcaaaaatctcatgtactactgattagcattacaaattcctaaaaaccacgaaaaaaagaagaaaaaaatgccatgaatctatctaaccagcagaaattaggaatcgtgttcttttcacacataagaaatacgatattgctagtgataatgttctgatttttttaaataaaatagtatacttattaattgatagttgttgagttgtctgtggacctctcccaaacatcagcacttccccatcaaaagatgtcaccaatatgttgcgttattggttggacattttctacaacttcttcatcttctatcgtgaaagattccaacatgatactcttattattttctgctttcattattcatttattaaaatttcaattatcatatacttatttgaataaccattggagccagagaagaatgacaattaatatttctagtccaaatcatcacatttgttctcttcatctggagtctagcaacaacaactttcatcatcgtatgtaactagataagactcacctaaataagttgtaaaaaatatataaaatttttaatagaatattttaagttctaataataatttatattttttttatctaaatattttaaaaccaattctaattttacaaattggattctgcaatacaatctaactatttatttcatgtaactttgagtattagtaacttgtcttaaacatatttgagtagtgtagtacaaaacctgagacaacatatttgaggcaaattttccttgaattgcaaagaaattacgtcgaaatttttctgaaattcaggacgaaattcctttccccctatgcgtggtcagagaagtagtcacttgttttccagagattcttagaaaattcttttctccattcaattattggggcttatgtcgtgttcttcctttgcaacttccgtgtttaggcaccgaagtttccaggaaatataccaaaaagtttcttttgtctgaatattaattattaacgacgataggatgtaggtaatttcaattccaaccaaaaaaaaaaaaaagacatacagattttgctgtcccagaacaagttccttcattgcgtcttccagattcttcttttctttcaaacaagaatcgatcaaactccttttgtttctaagaaagaactcgagatcggatg

SEQ ID NO: 13068 - DNA, 475 bp, Unknown
  misc_feature (1)..( 475): cDNA_ID_3028020_gDNA_ID_2214595_Annot_ID_186874 3000 nt of promoter + ATG
tgtattgagaagttttaaaataatatgttacttgtaaatatgattagtattgaacatacttattttaataataaatttttcaatatacaaaaaaaaactaaaaacaatagtgaatttgtaagaaaaaaaatagaatgtgatgtggaataattttattttaagaaattgttttcaatgatatctaattatctatcccttttactagctcaagagatataaacataatctcatatatgaattggtgttaaataatatcagatttattggtgttaagaaaaactaatttgattccacatgtttttgttgttctcatattcacattcataaataatatatgttgatattttaccaactaagctttatacttctgtttactataaaatgcagacctcttcacattatttcttacaagtcaattccaatatcaagagctctattctctcttaactcttttgatcaagtagttatcaaaatg

SEQ ID NO: 13069 - DNA, 3000 bp, Unknown
  misc_feature (1)..( 3000): cDNA_ID_2710382_gDNA_ID_2214595_Annot_ID_135468 3000 nt of promoter + ATG
tgaggggaagtcatttccactatgcccatactgctacaactctcctccatttgaaggcatagacacactttttggagcctctaagacgcccaatgctcctgccaaaaccaaaaccggtgcaggcatgccatgttctctctgtcctcatcccacatgccaacactctgtcagaaaccaaggagtctgcgcttgtccagagtgtgaaggcacgctcgtcttggacccggttagcttccccaagtggaaactcaactgcaacttgtgtagttgtatcgttttgcttccggaaggtgctcatcgcatcaccaccactagtaaccgctgtcccgagtgtgattcagccatcatagagatcgatttcaacaagaaaactactcctctggagaacggagccactctgcatcaaggatgtgttctatgtgacgagttgcttctctcacttgtagaagtgaaacatgggaggtcctttgtgaggcgtggaggaaggggaaggggacgagggagaggccgaggcagaggagggagaagaggctcaaaatctgtcgacccaaaaatgagtttcagagacttttgaaactctaaactttgtgtttatgtctttgcgttacttgcatatcattggaaattcaaaattctgaaatactgcctgcgtttcaaggaacagtttataatctttttagctttacttcgattttttccacatacacttatctaaaacagctccccaaaacttttaaacatttgactaattcttgtttatgccctaaagaaaagctaaaaaacccaagtgtaatcttttgggcttgtcacgtgtcacatgtcatgcatacaatctttccttttttagatcataacaacatagttgaatgcatgatctattctctttgcaattactctgttttttgcttgtttaaaagtttttgaagaggaagagcaaatcattgattaggaaaatggagaaagcagttcactcgtcgaccacgtctggaccggcggttccaggggagacaacaaagaccggaacctccataattgacactgcagcctccgctgttcaaagttttgcaccggttaaccaaatccaccaacatctctgcgcgtacgtaaaacccgatctttgtcaactccacctctttttaagcctcttagatttgtgattctcactatgaaagtaaaaaacatatagctacttgttttgaatatatatatatatatatatatatattttgggccaacaaaaaattatgtgtaatcaattttaactaacaaggcaccaatgagcaatctcgtctaatttttttattcgtgataaattctatttcgatttggtttaaccgtatttacaatgttacagagaaggcatgttatttaatttcttgtgatggcaggttccatttctatgctgacgacatggcacgacaagtagaggctcaccatttctgcagtcacgtgaacgaagagatgcgtcagtgtttgatctacgacggtccggatgcaaacgctcgtctaattggattggagtacatagtgtcagagaagctgttcatgactttgcctgacgaagagaagaagctttggcactcgcacgagtgggaagtgaaaggagggttcttgttcatgcctggtgttccaggtgccattcagcgtaaagatcttgataaagtcgctaagacttatgggaaagttttccatttttggcaagttgatttgggccatgagcttcccattggtttacctaatgtcatgatggctgttacacgcgatggccagcttttccacgagatgattcagggtacgtaagaaaattcgtatattagttatatcatgtcttatattaatgtgagatttcttgtggttttacattttaattttcttagaaaaaacaatagacagtgtttagtttaatgttgaaaaaacggtctaggtagttatgactattattttttaggcattgaaattaagcgtttttgtcataaaacaattataggctgtctatatttaactcttaaccaattatcgtttaattgtcaattatttgctcgttgacttttcaatttatatttatgtagaacggcgtctagacatgtttagctaatgctccttttatttatggcataatgtagtaaagactaaagatcattggtaggttatgcttggatttgggtatggattcagagacagataagcggtttagggtatcaatagagaaacaacctagaccggtttagctagcaatggcattgatatggcacactgtagttagtatatatcatttgtagttgatcggatttggatttgatgatggatgcagaggcagagaagcggtttggggtatcggtagagggggagagggactcacgggcgtatatgtctggacctgagctcgggatccatccattggcgaatggaggaggcaaagggatgaaactagagctacgagaggtcgatatcaagccggttgagtctgtcggcagcgtctttgtctgagtttacttaaaacctctaataatgccctcaaagcaagcaatgtatgttttggtaaacacaaaacgtacggaactagacaacaagattacttaaaatagtttggattatttctttgtggatcttatttataattagtaataagataagaaataatatctataagaaaaggttaactaattcacatgaattaaattaagtaaccatgaaaagcaatgtagtaaacaatttagttagaaaggttgatatatactattatataattcagctccgagcaataggaatcagactcgagagccatactactctgacttgatttttggaaataaaaatcacaagaagaagtttctaaccaccctacgtatgtatatgattataaaattgagattatgaaacatcatgacttttattccccaatcaaaaaattcctctgtaagacaccacaccaaaatatttattaataatatattatttgcgtgtgactttctgacatttttctctctaaactttgacatg

SEQ ID NO: 13070 - DNA, 3000 bp, Unknown
  misc_feature (1)..( 3000): cDNA_ID_2710386_gDNA_ID_2214595_Annot_ID_135469 3000 nt of promoter + ATG
ccttaacgattttgtgcttcttggtcataaactcataaaatatccctattttaaaattttgattagtagtatttcattttcatatgaatcgtcttaaaaatatgctacttgttcatgttttagtgatttctttattttcatcactcacaacattgataatttttttttacgtttttgataaatgattattttgaaaatatgtatatttcgtatttgtatttcttgtcgtatatccttgtatacatgcttagggcaatgttttatataggcctacatctcttataatataaatcattggaaatccacagaaatttccatatgtacttccattttcttataaaacatcttgtctaggttaataatacactattatattttaatttttaaataatgattctgaacaaaatataaaagcaatagtaattatgtttgatgtgattataaaactaatactaaataactaataaatttattttgaattaactccttcataatcaacttaagaatatgagtgatgctagggaatcgagaggtctgtgtctgtgtctttgtatcattaataggtcgaagaaaacctataaggtaacaagatcatgacggatattaaatcattagaccaaacacacacgcaaattaacaatcattttgaaagttttcagtttgtaaatgctaaacgatgtgatcaacgtctataaccaaatgagcattacatagccttccattcaacaacaactatagaaaagaggattaattccacacaactatacacaagcataaagcaattaactaattatataatactcacatatatatatatatatatatatatatatacatgtgtgtgtgaactgtgaaatgaattgtaaaacatgatgaatcttgtttgcttttgactgcctcgtaaatgttgaaattttaaggatattaaagggagtcttccaaatcattttggattaggaaggagcaaaaagttaatcattatatagtattatagaatcaactaatgatgcataatactacactattataaatttataatatagcaaagtttttctatagtcatgcttttaccgtttttgttacttacatacttcttgtagaaaacatctatttgccattcaactgcttaacaaacgtgtaattttatctgaaaaagacgcccacgtttaatttcgttggatgacaatgactgtatacatgtatacactattttaatctacgattggtttatataagtatacatatattgtatagtatatgcatggatagtcattgtagttataatatcgaaacggattcttttgctttaaaaaagacaaaaataattaaatatttggataggatgggttttggcttttagaaggccagatgccaaacatgccttcatcatttcgtctttcccattccaagtccctgcctcacaatgttggtctttttctgctttgatttttcgtacgtccaccttaaattattttcttggtaaaccatattaattatattactttatatcatagtataaactgtttatggtctatgccgttagggttcactttgatgcgaatctatgcaaatatgtataactgtataaggatcaccaagtagttctatcgtttttttgctaatcacttaccaaataacagaagttcactactgtaatatatgttgaattaaaaaacataaaagggtatcataagataaacaaattaaaatatgagataaaaaaacaaactaaacaaaacaaaactacagtggttggttttctacatgatatatccatatagaaataatttgccgccacatcaataaacgatcttcccacgagtcgtttcttcgtcagtccactatcacacacacgttgtcatttattctgagttgtatttaacacactttgagtttttgacctgacttttcgattttcttatatattcaaaacgaaattatactacaaaaagtagaagactattcacaacattgtcaacagaatttctcaaaataaactgttgtactcgtacgcgataatggatatatgatatatccaacgtttcaaagatatcatcaaaaatattagggtttgtttcaaaggaagaaacactttttgtcaacaaaggctcaaagctcgctcacatctgtacacatatgatgatatgatctagtatttgtatcatatatatgagcatgcatgtgtatgcactgatgcacataacacagactttagtagagtatcctagtatcttatgctcaaacaattgtgctccaagaaaagaataatgatatagtttttaaaacttggaaatttcacagaatctataacttaataagtatagcaaaatataaaaagaaacaaaaaaagccgaaaaaagaaaacatattgaaagggaaagatgatatgtcactacaacaagacacattaccctttattgtttgctttttactttgtctggtagaccaaaatctaggactaggagggatgggaaatgtaaattttagtcagtattaaatgtttggattgtgatatcgtctttacttatcgagcatgatttttgccaaatatatctcctatatatgaatggacacgatcaaattcaaagaaaccttttgattacatcgcatgttattaaaaaagcttagcaaatcctatttttattcgtttacgattttaaagtaaataatataaactcaatctactctacctttttcggatatttaaatgtaaatcacacatacacaacttactctattaaacaagagaaatacgatttatggattcaaggaattttgttgggaatttgttcaattttacggtatacaaaagaaccaaaccgaaaccaaaccgaattttaagatgtatactaaacgatgccgtttaatatataggaaaaaagcggtgtatagtcgtcgtttctcgtttaagctgattttagtttccgtcgccggctaaaaagctcattcgacgccgcctgagctttgagttttgacccgattctgacgtcttcttcaatg

SEQ ID NO: 13071 - DNA, 3000 bp, Unknown
  misc_feature (1)..( 3000): cDNA_ID_2710390_gDNA_ID_2214595_Annot_ID_135470 3000 nt of promoter + ATG
aaaatcaaagcagaaaaagaccaacattgtgaggcagggacttggaatgggaaagacgaaatgatgaaggcatgtttggcatctggccttctaaaagccaaaacccatcctatccaaatatttaattatttttgtcttttttaaagcaaaagaatccgtttcgatattataactacaatgactatccatgcatatactatacaatatatgtatacttatataaaccaatcgtagattaaaatagtgtatacatgtatacagtcattgtcatccaacgaaattaaacgtgggcgtctttttcagataaaattacacgtttgttaagcagttgaatggcaaatagatgttttctacaagaagtatgtaagtaacaaaaacggtaaaagcatgactatagaaaaactttgctatattataaatttataatagtgtagtattatgcatcattagttgattctataatactatataatgattaactttttgctccttcctaatccaaaatgatttggaagactccctttaatatccttaaaatttcaacatttacgaggcagtcaaaagcaaacaagattcatcatgttttacaattcatttcacagttcacacacacatgtatatatatatatatatatatatatatatgtgagtattatataattagttaattgctttatgcttgtgtatagttgtgtggaattaatcctcttttctatagttgttgttgaatggaaggctatgtaatgctcatttggttatagacgttgatcacatcgtttagcatttacaaactgaaaactttcaaaatgattgttaatttgcgtgtgtgtttggtctaatgatttaatatccgtcatgatcttgttaccttataggttttcttcgacctattaatgatacaaagacacagacacagacctctcgattccctagcatcactcatattcttaagttgattatgaaggagttaattcaaaataaatttattagttatttagtattagttttataatcacatcaaacataattactattgcttttatattttgttcagaatcattatttaaaaattaaaatataatagtgtattattaacctagacaagatgttttataagaaaatggaagtacatatggaaatttctgtggatttccaatgatttatattataagagatgtaggcctatataaaacattgccctaagcatgtatacaaggatatacgacaagaaatacaaatacgaaatatacatattttcaaaataatcatttatcaaaaacgtaaaaaaaaattatcaatgttgtgagtgatgaaaataaagaaatcactaaaacatgaacaagtagcatatttttaagacgattcatatgaaaatgaaatactactaatcaaaattttaaaatagggatattttatgagtttatgaccaagaagcacaaaatcgttaaggacaatatttaattattcaaaccattaccaataggaaagacaacaaaaacaattgaataagcctcccttaatttcttctaatcaaatcaaaaaactttttttgactaattaatattttagactcagccaaaaaaaaaaaaagtgattactgattaatctaagaattgaaggttccttataataagctcattctcattctctctctctctctctgcgctttattctgttcaaaatcctctgcttttactttgccgtttcactgagaacgaggctcgctcactcactctctctctttctctttctctttctctttctctttcatagaagaagaagaagattcaggacctaagtagaaaagcttaaaccaccactctctcttcaaatcacacttttgtttgtttcctctctctccaaaatctttctcattgtcttctttgcctcctccttcaagaactcttgtctcttccaacaacttttttccttcttattctgaaaaccaatcttcacttctcatttgtctcaaaacactatacccatttcctaattcctgtccctgagagcattagtagagagacacaaaacactttaatcctaatccaacttgtctttactttagcttctgtctgattcaatcaaaggacaagaaagaagccaaatcttgtcaattctttttaaacagtgattcaactaaaaaccccaaattagttgatttgatctctattgtcttcttttttttggatggattgagtctcaagaacaaacagtgaatcaaataagagcaagaatgagagacgataaaaccaagaaaagcaaggtttgtttttatgtttcttcaattctttgccatctttcatgaattttacagatgaacagtttcatttaccttctttttttttatgcttcaatgaagttgtcatggtccaagaagatggtgaggaaatggttcaacatcaaaagcaaaactgaaaagtttcaagcagatgtttctcttcctcaaggtaaccaaaagtctacttcttgtcaaaattttgtttctttgttctgttctgcagagctttaatttgtaatattttgtcttttctgagaaaacaaaacatctcagtttcactttctttcttttcttttggggtcaattgacagttactgtttcttttgctttaaccactcttctctgtggaaattaaagaattagcaattggcttgttatgtactgatttcaaattctgatcttttattcaataaggagttgaagttgagcacagaaacagcttctcagagagagagccctgcacaatcaagaagagcaaaactggtatataatcatttaccaatatgatcaaattctctatgagagagttttcttctttggtctcatgatttctgagtttcacagaaaaactcaataagaactgggagcagcaagctagacaaaggaaaatgaactatgaaaatcccagaatcattgatgtccaaaaccacaggtaacatatatatgaacacaatcacacacacacacacacacacatatgtgacttattttagtagaatctc

SEQ ID NO: 13072 - DNA, 3000 bp, Unknown
  misc_feature (1)..( 3000): cDNA_ID_1029586_gDNA_ID_2214595_Annot_ID_135473 3000 nt of promoter + ATG
aatttcgacatcaaacaaacttaatatatatatttgatatttgttaattcaaatcagatcagtgcaacgaatcagaaggcaagaaactaaacatgaccatatctctaacatttcctttaagatacataaatttcctcatcacaccttctttcacaaacccaactttttcaagaaccttttgagatccaacattgtcaacgtcaacaagtgcctcaagcctctgcatctctggcttctccttgaatatctcccccgccacaagcctcaccgcttcagtggcgatccctttcccccaatacttgcttccgaggacataaccaatctctcctctgatctcatcgactggcgttacggagatcgagccaatcggacggtcgttatctaagcatatagctctaagccaagggtgtggcaaaagagcgtcgtttaagtacgcgatcgcggcttctcggctagtgtaaggctcccacgtgcaaaagcgtgtgacgtttgagtcagtggcccaaaccatgaaatcgtcgacgtcggaaagagtcattggccggagatggattttctccggaggtgaggaactcacggtggatagggtctccggtttgatcgtagtagttgagtccatctccattgactttttcttggttactttcctttttgagtctttgaagcttctttgggattctttaaaataaattatctctctcaattcttacagatttgtgtagaggcattatgataatacttcttctacaaatcacgatttaaatactgatttttttttaacaaaaaagaaaataaacagaacgttccttcttgcttcgatcggtcaaatacgcaacaattagttcttgttgaatggaaggtgtgaaaaagacggtttataatgggtatgggtgaaccgtatatttaccatccattcatcgtttttgatttaaaagaggtatattcaatctagtatttaaagtgactttcgtaaattttacaagtatatgttatttaattatggattttgaaaattctaatgaaatctagtgttattaaaataataatttaaaaatctacctttaaattcactgttattaaaaataatttatggatttgatttttataagaatgtattcaatctaatattttaagtgatttgtgtaaaatttataaattctatgttgttcgattatggatttgaaaaactttaatgaaatctagtattattgaactaaagatttaaaattctatcttaaaatctattgttattgaaaataattggtagatttgattcttattaattttgaaggatttgagaaagttctttagttaaaaataacaaaatcgaaattcatggtcttatatagaattttaaaatattttataataaatcacatcaattttcctaaaatcatcaaactcatataaaaactagctaaaactcaaattgtaaggtccaaattaatgagtcaactcaactcaactcaactcaatccatgaaccctaatgagttgaaaattttgactcaaatgagttgatgagtcaaatgagttgatgagtcaattggtttgatgagtaaaatgagttgggttgtaatggttaatggtttcaatggtttatccaattaacccatcaaattttgtaaaattgaattaaaccaactaaaatctctaaaccaatgccaatttaagtctaaccaacacatctaaaccaatttaataaaattaatatttttccaaatttcttaaatatacaagcgatgaaattgagaaaaagtaaacccgtaatttttccgccaaaaacgtaaatccgtgattttcccgccaaaaacgtaaatccatgattttcccgccaaaaacgtaaacccgagattttcccgccaaaaacgtaaacccgtaaaaagtggaatccgtaaatatattaagttttgatgataatgaattaataatgataattatttattattattttataataataattaattaaattattacttaaatgggttaacccatttaacaactcaacccattaaattaaatgagttatgggttgacttaacccatttaacaaaatgagttggatcaacccataactcatttaaccctaaactcatttgattatgagttgagttgagttgtgttacccattttgacacacttagatctaatacacctctttattaattttaaaggatttgagaaaatttaaaaagatttatttagttacatatataaaaattcaaatctcatatttttactggaatttgattttttttttttacaataaatcacataaaaagacattaaaactcaaaattatttaaaatataaggttcaatacatattttgtcaataaaaatttaataagctgctaatatagttcatgagaaaaatcaaaaattaatttatcaatcgaaaaaaaagacgaagaaaaattaatttatctacgtagcgcaagagacggagtgttgtttatttaaagaaaagaaagaaaaaaaaaagaacgaatattaaaatggcgagtcgctctcttttctctatctcaatctcaccttctcaatttacagttttgccatccatcaacaacgagagacgacgccttgctatcgccgctcgatctcaccgactatcacgccggaagattcgtaagagacctcctgatagagatatgtcctccatagtttcaatcccggagcttcctcgccggcgggattctgaggaaagcctgcttttagattctcgaatcagtaagttcttaaagcaacagaatcctcagaaattggcatttgggattaggttttgcaagtatcgaagctccattaactgaatcctcagaaatgtgtgtatatgaataggtgtagctgaaggagatacatcgaatacagatgtagaaggagacagagatactacttctagtattagaacacagcctccccctcgtaaaggaagaaatcttagtagcagcagaatcaaattctacggtgttgaattatcaccagataatgttgctgtagca

SEQ ID NO: 13073 - DNA, 3000 bp, Unknown
  misc_feature (1)..( 3000): cDNA_ID_1031052_gDNA_ID_2214595_Annot_ID_135475 3000 nt of promoter + ATG
cataatgtggatcgaacaattgactcgccaggccaggaagaaaccggaatgactggtgtttctaaagtaatcagagctgaccagaaacggttcttctttgatcttgggaacaataacaggggccatttcttaaggatatctgaggtaatcttggaagaacaatcttttgctggcttatctcttgagagcttgtatttaccatggttttaacattaaagcatttctcaatataggtggcaggttctgacaggtcttccatcattctaccgttatcgggtcttaagcagtttcacgaagtaattggtcactttgtggagatcaccaaagataaaattgaaggtatgacaggtgcaaatgtcaggacagttgatcctcctcagagataagtattgattctcttagaggatggaaattttcaatcctctaaccatttgaatctggcaacttcaagtcgactgcctgatcgcggtgtgcaatagtttcacgtaatatctctcgccccttcacatcttctaaaaataattcagcaggatcatcatttgccttaatagtagataaaacaaactttggagtctgcaactgggaataagctgaaaatcatccaccatgtgtatctctctctctctctctctctctccctccctccctcatttgcttctgttctgttttaactttttttgtttttgttcagtttgggtcattgggtgtatatctgttgacggcttgatgcatttcaattgtaaaagaatattggggtttatatgtttgggctaatgcctgttggaataaaagatgaagtgtaagttctatacatgagttacgaattctttttggttttgtctgaaaatgatttagttctactaccagaggttctaagagcagttgcgaattgtatatactgtcctaagcatgctttggttagacaaaaatttcgatttttaggttaatcgaaaatgcctcaataataaaaaaaaaagaaaaagaaatcaacgttgcgtataaaacaagggagaagataaaaaaacagcgtttgtaaataaaaaacaaaaaccctaaaaaaaggagcaactttgggcacagtccgagagagagaaaaaaataaaaaataatctgtcggtgatttataacctcctctctaataaaccaccacatcctctgaaaccctagcctgaacaactcgccgtcttctcgagaaacatctttcttacttcgcttcattacaaggttcgaatccagctgtctctcttagtatttgtctatgtatctgtcgagtttctctgttttcattgatttatgtaaaatcagaaggttttggtttttgtaagtgattcatttgttttgtgttaaatctattgcagatctgatgaaaccagatcggatcttgctctagatccagatgctccttaacttatttactcgaattcatcatcatcgttatcatcaccatgtcactgtttctaaaagacgattcgattcaaatccgtgaagtatggaacgacaatctcgaatcagagatggctctgattcgagaagtcgtagacgatttcccattcgtagcgatggacacagagttcccaggaatcgtgtgtagaccagtgggaacattcaaaaccaacacagagtaccactacgaaactctcaaaacaaacgtcaacatactcaagatgattcagcttggactcactttctctgatgagaaaggtaacctcccaacttgtggaacagacaacaagtattgcatctggcagttcaatttccgcgaattcgacctcgaatccgatatctacgctaccgattcgatcgagcttcttcgtcaatcaggcatcgatttcgtgaaaaacaacgaattcggtatcgattcgaagcggttcgctgagcttttgatgtcttcagggattgtgttgaatgaaaacgttcattgggttacattccacagcggatacgatttcggttacttgttgaagctattgacttgtcagaatcttcccgagacgcaaacagggttcttcgagatgatcagtgtgtatttcccgagggtttatgatatcaaacacttgatgaagttctgtaatagtcttcatggaggtctgaataaattggcggagctgcttgatgttgagagagttgggatttgtcaccaggccggatcggatagcttgttaacgtcgtgtacattcaggaagctgcaggagaatttcttcattggttcaatggagaagtattctggtgttttgtatggtttaggtgttgagaatggtcagattgttcattgataaaagcttaaagttttaaacaggttatgttatttattttagattattacatcataggttgttttaagaagtgtatgatcacaagaactaaactctgattttggtttggtattgtgctctcttacttgtttaaagatagcatctcacttaatttatgaaaaaaaaagtttgatatatgtcctttttcatcatatcttaaagatattatcaaaggtatacgtatttggcctattaataaaatttcacaatgtgttaaaagacttaaaggacaacataaattgtggattctgtgaagtgtttaaacattaaagatgaaaattgggaaagattaaacaaacgacagcgttttttaaaaggacccagatattgaaggaatggcccagtaaagcccattaaagtagagcccaggttcgtgacaaatctgttaaaatcgtataattcagggttcgtaaaaccctaatatataacttcgctactcattttttgctcttcgttgcagcctctctctctttaaggttagtctcttactcacttttgcgtagttcctcactgaaaattgatctgtgttcatgtatgtgattgtcttactttgttcatcttcctccgatttggttgtgtaatttcgatttatgtatttattgagactgatttgcttcatttccttggcagatttggaaaagacctttgcttctcttcgttcggaaaaccagctcaaagattcaatatg

SEQ ID NO: 13074 - DNA, 3000 bp, Unknown; identical to SEQ ID NO: 13067
  misc_feature (1)..( 3000): cDNA_ID_2710400_gDNA_ID_2214595_Annot_ID_135482 3000 nt of promoter + ATG

SEQ ID NO: 13075 - DNA, 3000 bp, Unknown
  misc_feature (1)..( 3000): cDNA_ID_2713056_gDNA_ID_2214595_Annot_ID_135483 3000 nt of promoter + ATG
cctcatcgtcgacgtcgaaactctattacatgtaaaacatatgttatacggacgatcatttgattattttgttacccttatattattcatatcatatacgagtgaatgaaactgtagtatgagaaatggtctaattaatgttttaactatatgaaaaaaagctcttactctggtgtatcgtacatatcggtagtgagtttcctttcagaaaccacgaaacagtcgtcaatttcttctctatctccatttctttctctggagatatttgacagggctttcttaacttccttgatgattgaccttatgaaatccttctcagatttatcactttgatgtgtaaaagaaaagaagattaatgggtttagtagctttcctttacacttacttggtatcttgtgctacaagaaacagacaatttttatgattgaaaaatcgtaacctgtgttctggtaagcacaatgcaaacgttcgggaaacagaagtcaaagcttccgtccatttctggtatctttctggttcatgatgatatctctcaatcagatccctgaatttatcgccgaattttcctttaagacccttcaccactgcgggatcaagcttgtagaagatgggaatcgctatgattttcttttgatcaacgcatttcttgatctgtaccagctcgtccaaacaccattttgactcggtgtatccctcagagaagattaccaacgcgatttttgactcacctatcctcctaaacaggctgattaggtcttttcccctcacctcgtgctcatctataaagacgttgatgttttttttcttcaaggcaggcacaagaaaactgatgaagcctttgcgtagctcttttcccctaaaactgatgaacacttgaggtcccgttgggatcactgatacattagaagaagaagaaggagaagaagaagctattgccatccgatctcgagttctttcttagaaacaaaaggagtttgatcgattcttgtttgaaagaaaagaagaatctggaagacgcaatgaaggaacttgttctgggacagcaaaatctgtatgtcttttttttttttttggttggaattgaaattacctacatcctatcgtcgttaataattaatattcagacaaaagaaactttttggtatatttcctggaaacttcggtgcctaaacacggaagttgcaaaggaagaacacgacataagccccaataattgaatggagaaaagaattttctaagaatctctggaaaacaagtgactacttctctgaccacgcatagggggaaaggaatttcgtcctgaatttcagaaaaatttcgacgtaatttctttgcaattcaaggaaaatttgcctcaaatatgttgtctcaggttttgtactacactactcaaatatgtttaagacaagttactaatactcaaagttacatgaaataaatagttagattgtattgcagaatccaatttgtaaaattagaattggttttaaaatatttagataaaaaaaatataaattattattagaacttaaaatattctattaaaaattttatatattttttacaacttatttaggtgagtcttatctagttacatacgatgatgaaagttgttgttgctagactccagatgaagagaacaaatgtgatgatttggactagaaatattaattgtcattcttctctggctccaatggttattcaaataagtatatgataattgaaattttaataaatgaataatgaaagcagaaaataataagagtatcatgttggaatctttcacgatagaagatgaagaagttgtagaaaatgtccaaccaataacgcaacatattggtgacatcttttgatggggaagtgctgatgtttgggagaggtccacagacaactcaacaactatcaattaataagtatactattttatttaaaaaaatcagaacattatcactagcaatatcgtatttcttatgtgtgaaaagaacacgattcctaatttctgctggttagatagattcatggcatttttttcttctttttttcgtggtttttaggaatttgtaatgctaatcagtagtacatgagatttttgctaatcattctccaataatctggtgtagcatgtgaaacacgtacaactgaacgaagcatattctgtcaacgcgtagtagcctactaggaattgatattattttttgtgtgaaacacacgtgttttgtgtgcacaaacttaattaggctagtgagtcgatcgtgacatcatatttgaatttcacataaaggcgatgttgttaagaaaacatctaaaagctaaaagttaaaacctaatgatggacatttcatatgatacttcatcgatgtttagtacaaactatagcgacgcgttgcctaatttttctgtaacttttcttgtgatggcattgaaaaactaaattctattaagttaaaatattggaacgttatagtaacatttactatcaaccatggacgaagtttaagtttaacattaaaaaaaaaaaaaaaaaaaacatggacgaagttccatgctcgctgaagacatcgaataagtaatatttcatagcgttttaatacaagttaattagaacatttttagagacttaacacgttaggttaattaaaaagtggtttaacattgtttaattaagatagaaagcggccattgcaagtttgaaacacaaatgaggatagaatatgatccgagtaaatatcaaatcatattttataatgtaatggatgttcaaagaaaatgtataaccagataaaatagacgaaagggatttgaaccatgagtcagcagtcagtatccattattaaaaaatagagaaaaacaaacactaaaaagaaaagactcgtcttcctataaataccttcaaacatctccctttcttcacgcctcttattgttgtttgctatataaatcctccaatttctcaatattctaaacaaattatatattttcttacttacttgttctcttgta

SEQ ID NO: 13076 - DNA, 3000 bp, Unknown
  misc_feature (1)..( 3000): cDNA_ID_3027983_gDNA_ID_2214595_Annot_ID_186893 3000 nt of promoter + ATG
aaggatttcataaggtcaatcatcaaggaagttaagaaagccctgtcaaatatctccagagaaagaaatggagatagagaagaaattgacgactgtttcgtggtttctgaaaggaaactcactaccgatatgtacgatacaccagagtaagagctttttttcatatagttaaaacattaattagaccatttctcatactacagtttcattcactcgtatatgatatgaataatataagggtaacaaaataatcaaatgatcgtccgtataacatatgttttacatgtaatagagtttcgacgtcgacgatgaggaaggtctcctccaacaatggagtcggagtcggtacgtttaagtcacagaaaccaaatttcgacgatgaagatgacgacggagactcccttttaaaagcgttggttgcgaagctcgtcgctagtacaacttccattgtagctgcttacgcagagcttcagagggcgcatagcgacgctatacaagcggcggaaacggtggtagttgatgttaaaactttatcggagcttatacggagtagtaacggaggaggtggtggaagtggcagtggaagcggtagctcccttgagaatcagccgaggagatcaaaggtgaggaagcaagtgtgggctgaagttctcggcatctcatccgactccaccatcatattagagtgtatatagttggtttagttatggtttagattcgttagtattttgatttagtttacttgtatttaagtttaattatatatcatttttacacttaactagatattgacccgcgatacaccacagattgatattttcattacaaggtgtatcatatattaaaaaaacaatagcctatatattaagggtaacaaaataatcaaatgatcgtccgtataacatatgttttacatgtaatagagtttcgacgtcgacgatgaggaaggtctcctccaacaatggagtcggagtcggtacgtttaagtcacagaatccaaatttcgacgatgaagatgacgacggagactgcctttttaaagcggtggttgcgaagatcttcgctagtacaacttccattaaagctgcttacgcagagcttcagagggctcaaagtccgtacgatagcgacgctatacaagcggcggatacggtggtagttaatgaactaaaaactttatcggagcttaaacggagttttatgaggaaggaattgaatctttcaccaaaagttgcgattatgttagctgagatccatgaacagcagagtttgatgaggacttatgaaatcgcgatgaagagacttgaatttgaagttacggagaagaaagtgaagatcgatgagttgaagatgaatcttgaagagaatttggtgatgaataaatcgttggagaagaaactcacagctacttgactcatcgcttgaattgaaaattattgtattttcactaacttgttggactttagatatgagccgagcttgcttttaagttgacattgaacgaatttttgtagaaattttgcaaaataactattcaacgtccgtgaccaagaaatttaaaaagttaagtgagacaaccctattaattatcatgctaatattgttattttatacaccaaaaaaccagcattgttgccttgttggccacataaacatcaaccaagaatataaacacattatgcaattttttgaaagtaaaagtctccaacaatattaaaaaccaaagctaaacaaatgatcatttaccatactgtatataatttggaactctagcgagaagcacacttgatttcatggctttccgagagcctatacttcataatgactatgccacatatatagcgcaattcttgattaaatcgaatgactatggtatattggtataaatttaggtttgagcctttatgaccagatgaacattctagatacttcttagcacaatcatgtacatataaatcgataaactggaaattgttgagagctcacgtcttaaagcatatgttggccaaaaacgccaatcacgtaagatgcataatttatgcatctcttaacgttgattactttgaaatctcatcttgtgatgatgaaatttaatcccttaaggcgaagagaaataagcacaatgaccaagaaaatcctcttcttaaacttctttgacgattggagtttctgatgctaattctttgatattctgtatatgcattggccaattttcatatatgtaattaataaacacactgattgatatactaattcattgaaaaatttagaggaaaagaactaattgaaacaaatattataatttatgatctagagttgggccagtactattctacaggcccatatgatttgttaaaattaatatatatatacaagtttacttcaaatgggcccattttttagagaaaaatagtaaagtaaattattttcttgggtcggcaaattaatttagcgagaaaaaaaaaggaactccctcctcttttctctggcaaactctagaagaccaaggaagcacagtaacaatctctctctcgcaccttcttaaaagctgctctatttcttcgcttccctcttctcttcactcacaaaacattttgttctaatcccgcaactgctaaaaacaaacccttttgtcaaaaatctctcctttcggtggtgacaggtttgttctttccgagtcctctctttttgaataatactttgtttggttttagctcagttcttgtacttattgaaattgcaattgttagattttctgattactagtctaatccttaatttgatttcaagtttatttgtcaattttgaatctttatctgggtggaatcgtacgactgtaaaatcctgataaaatcctacaagacactttgaaattagtttcagtttgtggtagaattggttcttaatttgttttgaatgttgagtgatgaactcaaggataaatctttgattgtgttgataaatcttgaatcctgaatcagaaatctatggcaggaaatg

SEQ ID NO: 13077 - DNA, 3000 bp, Unknown; identical to SEQ ID NO: 13073
  misc_feature (1)..( 3000): cDNA_ID_1031052_gDNA_ID_2214595_Annot_ID_186888 3000 nt of promoter + ATG

SEQ ID NO: 13078 - DNA, 3000 bp, Unknown
  misc_feature (1)..( 3000): cDNA_ID_1029586_gDNA_ID_2214595_Annot_ID_186886 3000 nt of promoter + ATG
aatggattaaatattttaatactgttaatatttgtggtgcaaatgatcgtaatcgtttgttatatactgtcaaaatcaactcaagaatcaagtcactcaacatgttgtatgattaagtaatttagctaaagattaattaatcgaatgttatcagaattccattcatctatcgctgtaaaactagctatcacactatctttttattgtataaaatatttcatgtttagattcaaaaagaaaatatatatatatatatcatgtttcattttgtacttttaattttcaatataaacttacattttttctgagatagtgaagctttgttttatttggtgaagtgaacatggtaaatagtaaatacattactctcaaattataaaaaataacttttgtatgaaatagttaatatataaggttacaactaacaattacataagaagaagaaagatagagcatcacatcaaattatacatgtgatttttacaaactaagcaaaatataaatttcgacatcaaacaaacttaatatatatatttgatatttgttaattcaaatcagatcagtgcaacgaatcagaaggcaagaaactaaacatgaccatatctctaacatttcctttaagatacataaatttcctcatcacaccttctttcacaaacccaactttttcaagaaccttttgagatccaacattgtcaacgtcaacaagtgcctcaagcctctgcatctctggcttctccttgaatatctcccccgccacaagcctcaccgcttcagtggcgatccctttcccccaatacttgcttccgaggacataaccaatctctcctctgatctcatcgactggcgttacggagatcgagccaatcggacggtcgttatctaagcatatagctctaagccaagggtgtggcaaaagagcgtcgtttaagtacgcgatcgcggcttctcggctagtgtaaggctcccacgtgcaaaagcgtgtgacgtttgagtcagtggcccaaaccatgaaatcgtcgacgtcggaaagagtcattggccggagatggattttctccggaggtgaggaactcacggtggatagggtctccggtttgatcgtagtagttgagtccatctccattgactttttcttggttactttcctttttgagtctttgaagcttctttgggattctttaaaataaattatctctctcaattcttacagatttgtgtagaggcattatgataatacttcttctacaaatcacgatttaaatactgatttttttttaacaaaaaagaaaataaacagaacgttccttcttgcttcgatcggtcaaatacgcaacaattagttcttgttgaatggaaggtgtgaaaaagacggtttataatgggtatgggtgaaccgtatatttaccatccattcatcgtttttgatttaaaagaggtatattcaatctagtatttaaagtgactttcgtaaattttacaagtatatgttatttaattatggattttgaaaattctaatgaaatctagtgttattaaaataataatttaaaaatctacctttaaattcactgttattaaaaataatttatggatttgatttttataagaatgtattcaatctaatattttaagtgatttgtgtaaaatttataaattctatgttgttcgattatggatttgaaaaactttaatgaaatctagtattattgaactaaagatttaaaattctatcttaaaatctattgttattgaaaataattggtagatttgattcttattaattttgaaggatttgagaaagttctttagttaaaaataacaaaatcgaaattcatggtcttatatagaattttaaaatattttataataaatcacatcaattttcctaaaatcatcaaactcatataaaaactagctaaaactcaaattgtaaggtccaaattaatgagtcaactcaactcaactcaactcaatccatgaaccctaatgagttgaaaattttgactcaaatgagttgatgagtcaaatgagttgatgagtcaattggtttgatgagtaaaatgagttgggttgtaatggttaatggtttcaatggtttatccaattaacccatcaaattttgtaaaattgaattaaaccaactaaaatctctaaaccaatgccaatttaagtctaaccaacacatctaaaccaatttaataaaattaatatttttccaaatttcttaaatatacaagcgatgaaattgagaaaaagtaaacccgtaatttttccgccaaaaacgtaaatccgtgattttcccgccaaaaacgtaaatccatgattttcccgccaaaaacgtaaacccgagattttcccgccaaaaacgtaaacccgtaaaaagtggaatccgtaaatatattaagttttgatgataatgaattaataatgataattatttattattattttataataataattaattaaattattacttaaatgggttaacccatttaacaactcaacccattaaattaaatgagttatgggttgacttaacccatttaacaaaatgagttggatcaacccataactcatttaaccctaaactcatttgattatgagttgagttgagttgtgttacccattttgacacacttagatctaatacacctctttattaattttaaaggatttgagaaaatttaaaaagatttatttagttacatatataaaaattcaaatctcatatttttactggaatttgattttttttttttacaataaatcacataaaaagacattaaaactcaaaattatttaaaatataaggttcaatacatattttgtcaataaaaatttaataagctgctaatatagttcatgagaaaaatcaaaaattaatttatcaatcgaaaaaaaagacgaagaaaaattaatttatctacgtagcgcaagagacggagtgttgtttatttaaagaaaagaaagaaaaaaaaaagaacgaatattaaa

SEQ ID NO: 13079 - DNA, 3000 bp, Unknown; identical to SEQ ID NO: 13070
  misc_feature (1)..( 3000): cDNA_ID_3028000_gDNA_ID_2214595_Annot_ID_186882 3000 nt of promoter + ATG

SEQ ID NO: 13080 - DNA, 3000 bp, Unknown
  misc_feature (1)..( 3000): cDNA_ID_3028004_gDNA_ID_2214595_Annot_ID_186881 3000 nt of promoter + ATG
ttgttaattctgtttttaatgttgggattagagctttgccattgcttagtcttgttcacgagttcaaaggtcaataaaagctacttttatgcgaattactctcctgatcgagcataacattagtggttacacaggttgcttcaagtgctctagggtttgggcctcagacggctatgcatcttgcagagcgattgtatactcaaggtttcatcaggttcgattgctccattctccagattattatttttgtcatttaactcctctttaccagcgtataattggctaattttggtaaatcccaattcgttattgaatggtagttttgtttgtttaattaagaactggtagataggaaatggaaaaaaccgtcgctgacgagaacatacatacatcacaattttcgctgtataatttatttaaacatttaaagtgacggaaacttttgactcaaagtcctttgttttgtgctagctatccccgcacagaaagcacagcctatccttcttcattcgacttcacagacacactcagagcacaagttagtaatccagtatggggtggttacgtacagagactgctctcagacggatttcatatgccaaagtcaggaactgacgctggagaccatcctcctatcaccccaatgagagcagcaaccgaggtcatggtcggaggagatgcttggcgactctatcagtatgtctgtcaacattttcttggcactgtttcacctaactgcaaatacataaggtaaataaagccttgtttgtagcttaatccatgtcagttacagcttattctttgcacattttaaatgtggtattctcttggatgggtatctcaggactaaagtggaattgtcaattggtggagaaactttccattgtacggggcagcgtgtgacagaaaaggggtttacagctataatgccatggtctgcagtagatgagaaaaaactcccttcttttctcaaaggagagaggattgaagttttaagagtggagctttacgaggtcacattcttctccagtttttgttactgctctctttgctttgtactaggacacaaattactataatgtttccacttttagtttattttttctgtttgtatttgaatgttgtaaaatctacaggggaacactgcgcctccggactaccttactgagagtgagctgatatctctcatggagaagcatggcataggcacagatgcatcaatagctgtacatataaacaacattggtgaacgtaattatgttcaggtgggttaacctacccaaaggcggtgtgcttttcttcactgttacaatgttactctctcaggaagatccttttttgttttctgaaaaatctcattactcttgtttggtgcttacacacttttgcaggtccaatctgggaggaaaatggttccaacggcgttaggaatcacgctaataagaggctatcagtgtattgatccagacctttgcttaccagacatccggagttttatcgagcaacaaatcactcttgttgccaagggccaagctgatcattcacacgttgtgcagcatgtgattcagcaattccggcgtaaattcagttattttgttcaacaggttgggaaaacctggctgatattatgttttcttcggaggcatttactgatattgtcttcgatttaatctgttcctccttaacatctttcgtatattgtcctttcagatcgaacacatggatgccctctttgaagcacagttctctcctctggctgattctggtcgtgctttaagcaaatgtggaaaatgcttgcgttacatgaaacatatcacagcagtcccaccacgtctcttctgcggcacatgcgaagaagtttattatcttcctcaaaagggcacagtcaaggtaaaaccctttcgtcaccttaacccttgagctgaaacctcagtgaatctctagtttttcttatcctttgctaacggattttctcacagctatacaaggaactcacatgtcctttagacaactttgagctcgtgatctattcagttccaggacctgaggggaagtcatttccactatgcccatactgctacaactctcctccatttgaaggcatagacacactttttggagcctctaagacgcccaatgctcctgccaaaaccaaaaccggtgcaggcatgccatgttctctctgtcctcatcccacatgccaacactctgtcagaaaccaaggagtctgcgcttgtccagagtgtgaaggcacgctcgtcttggacccggttagcttccccaagtggaaactcaactgcaacttgtgtagttgtatcgttttgcttccggaaggtgctcatcgcatcaccaccactagtaaccgctgtcccgagtgtgattcagccatcatagagatcgatttcaacaagaaaactactcctctggagaacggagccactctgcatcaaggatgtgttctatgtgacgagttgcttctctcacttgtagaagtgaaacatgggaggtcctttgtgaggcgtggaggaaggggaaggggacgagggagaggccgaggcagaggagggagaagaggctcaaaatctgtcgacccaaaaatgagtttcagagacttttgaaactctaaactttgtgtttatgtctttgcgttacttgcatatcattggaaattcaaaattctgaaatactgcctgcgtttcaaggaacagtttataatctttttagctttacttcgattttttccacatacacttatctaaaacagctccccaaaacttttaaacatttgactaattcttgtttatgccctaaagaaaagctaaaaaacccaagtgtaatcttttgggcttgtcacgtgtcacatgtcatgcatacaatctttccttttttagatcataacaacatagttgaatgcatgatctattctctttgcaattactctgttttttgcttgtttaaaagtttttgaagaggaagagcaaatcattgattaggaaaatg

SEQ ID NO: 13081 - DNA, 3000 bp, Unknown; identical to SEQ ID NO: 13069
  misc_feature (1)..( 3000): cDNA_ID_2710382_gDNA_ID_2214595_Annot_ID_186880 3000 nt of promoter + ATG

SEQ ID NO: 13082 - DNA, 3000 bp, Unknown; identical to SEQ ID NO: 13062
  misc_feature (1)..( 3000): cDNA_ID_1580388_gDNA_ID_2214595_Annot_ID_186879 3000 nt of promoter + ATG

SEQ ID NO: 13083 - DNA, 3000 bp, Unknown
  misc_feature (1)..( 3000): cDNA_ID_3028012_gDNA_ID_2214595_Annot_ID_186877 3000 nt of promoter + ATG
aaaatataatcaaaagtgagagaaggaggaagaaaagagatgacctttggtaaacggagagagtctttgttcaaaataaacgactacgttgagaaaatggagacggcactctcaagtagagagagagagagagactagagagagtttggctaaaagcctaaacaaaaaaaaaaaaaacatgaaactctttcgtcttttctgatgatatctgtcggtctcgccggttaccggttataggcaatcaaaccgacctcaattggtaaatttactggtccgagtgaaattcagattgcatctggatcggatatgtcattagaataataatttattaactgtgcttacatcattgtttaatgtaataaactattaaattttacaatctgcgaattatgtaacaaccaaactccaaacatttgtactaaattttttatttctctgtatattgatattatgttaaaactttatagataaccaaatttatgattgattgattaaaacgatggtttcctatctaagcaagttagtgataatgtaatctaaagttaattttaggctgtgtgactggctttgatcaattttgtacgtaactttgttttattggataaagatataaactcaaaagtcaaaacacaccaaaatctaaactacaaatatatcattataaaggaattttttttggaagaacttatggaggaatggttttttgcatatctgtctagcttcacattagtctaaattcatctatgatattactaccactttgtaattttcttaacactctatagtctatacgttcattgtatcagtcccctcggcccactttaactatgttgattcaatctcttctcttatggtagattgtctattcatagtggttaaagaaagaaaaaatcattagcatatatctttaaccagtacagtacagtactagagatatatataaacaacaaaatattctcgtatgtgtatttgcagatatttttcgtcaagatcagattcttttccacatattcctattgttcttcattatcgtatgcatacgttgatataccaaaaaagctttgtgcacatgtttactataaatgcgacattctcacgctaattttcaatatcaacaattctccccacgtattcatatcgcttaactagttagtaggaaataaaatgaagagctctactacctctatgcagttaattccaacacttttcttcttaaccattcttcttgcttcaccaggtatgcaaatctagtttctcacaaactcacaatattaaaaagttactaaaacatataatatacgcttatattttaatatttaatgcatggggttttacgcatctacttgaataatttaatatttgatgatattgaagaataagtcaattattgattgtttatatgattataattatattattattcaattatttattgaataatgataatgtattatattatagatatagagatggttgaaggacaacaaatgtgtgaagcaaagagcttggactggaagggtatgtgtctgaaatggaggaattgtcgccaagtatgcattagcgaaggtttcactgacggtcgttgcaaaggattcacccgcaaatgcatttgtagcaaaccttgttttgtccttcctaattaagttcttgtttctcattattttgatattaaaattttaaaataataacacaattcattattgattgattaaaaagattatggttttttaatttatatgtaagctgatataaaaaaaaaactcagttttaagcaatgattttctctaagtttgttctaaaatatcatttttcaatacatgaaatactaaaaaagaaagtttggattcatttcctacacaaatttatggttttataaatgtacaaagaatattgaactaatatttcatgttccgattatatataagttcccattttcaatcgatgagattaataaagaaactttctggagtatatatttaacattttcgattttatattatgaagctaaagtatgtacagtatgttggtgaaaaaacatggatcgttaaataaaaaaacatattaaggaggagaacgaccgagcatcttctaaagaagattaaagcataagaacattggaataaggaaggtgaagtattgtcgtggacattcctgagtgggaagactcaccattacatacataattaattagtaacaaagacattggcgcctgtcttgttcccgttgcttttccccatctttatctccaattctctctctctctgtctctcttgttctactactttggggaagatgatagcttcttcttcttctccctccatcacttgttcttgattctacttgtggtcctccgcttctcttttcaggtgattggtcattgatctctggtttttttattttgcaaacttatgggttttgcttttcgtttttttctctgtcttactaatccgaatctgattcaaagtttacaactttaactaggggtttttctcactgaactcttatgagtgagacatagattcgtcttctaggtctgtttccggagggaattaattaataatagtatcaattttcgattatttttctttggttgattctctatcgaagattgtcgatgcttccaaagttgaagcctttgttacttctgaactcaggattgtcttgtgcctcgctgtagattatcgaagatagttgtggttctgggtaattagcttttggtgataaaggtttgtgctttacacatcttctgctactttttgggtatggcctaactaaaaaaagtaacttttagtatctctttccgatgatatcgattttataggagtgaatctctcatcttgcttcggagtgaaacaaatcatgtttttgttttgtcggaatgcttatctgattgcagtgcatatagttgtcaaagtttgttcttgatggtgatgtagaagctcttttatttgacatatttggttctttgtttagtttatttttagtaggatctagaagatc

SEQ ID NO: 13084 - DNA, 3000 bp, Unknown
  misc_feature (1)..( 3000): cDNA_ID_2710406_gDNA_ID_2214595_Annot_ID_135485 3000 nt of promoter + ATG
cttacttgtttctccttaggaaatgtcgattgagctaagtttggaggatgtaaagagagttgcttcacattatgggtttgagatggaggtaaatctacacaatataatgacaatgacatttgcctgtcagaaataaaacatctcatgatgcatgttcttcctcacttatatgagtggttgtcctaacaatatttgcagaaagaaaaaacaatagaaacaacgtactctacaaacccccggtctatgatgaaggtcagatttttttccatgtctttggatttgtggttgacttttggatccagagatgggtttaatttgtgcatgatgttgtgtgtgtctgttgcagaaccgatactatcctgtcttctggacaatgaggaagaagtgtgctataacaacaacttaaccaaatattcctcaaaactatatatgttttattctgttgcatttgtttttaaggaattaacgggtccaatctaaaacacatactatttcttttgttgttgcaaaataatgaaactgtgtttttcggttgatgtttgaaaaccaagtaaccaacactcaaagctaaacaaaacctttggcctgtgggcacaaagctaaaattttattattttctcggcactactacgcaaataggctaactaaggcccattaaataatatgaggcccaacttgaaaaagactcgtttcttgttactaataacctttccgatgaaatcaactccaaaaccgaagagccaccaccatggtttcgccgtcagagatgacggagacggcaccggcaattatgacaacggaaagcgaaaggatagagagttcgagggaactcgtggataatgaagaggaggagaaaatacgccgtcagaagaagctcgaagaagctctcgaagccaaatctcttcgccgcattatcagtgcttacctcaagtatctcacttttctcagtccttttaaacactcatccttctctggattttacatcatttcataggcactgtgttttctgattctaaagataattctactgattgggaatttcaaatcacaattctagtttctagattttactttttatctttttctttagcattttggtattggttctgcatcgttgacctttggaaatgtttacagttacccagaggcttcggaagaggatttgaaaagatgggaaagatcatatcggaagctgtctcctgcacacaaggttattttttgcctcatttctagcattgagaatagtagtagcatgttctgtaacagttaagagattaccaaacgatttcaagtcaagttgattttttgtcgaatcttctttgtttgcttatataatagaactaatggtttcagtgatgaatttttgtcctttgtgtaggcattggtaccccattaccctatgaagtttcagagattaagaaggtgaaatctttagtcagttaaatatttcacttatcatcttgtagtcttattaaatgtcgcgattcacttggatgatattcagaattttttatttccatcatagttgcttcgaggtttgcatttgattgcctaaattttgtgttcgggtgtcatttttatgatatccatgcttcttataattcttctttctcatgcttgcatactaaactcgatagtatgcaagattgaacttgactcatttctatcctgtctgtacttgtcccagacaccctgcacatagtgtttgttgaagtgttagtaagttgttggattttgtttgttgcaggtgtatatcggcgaattcatatttcatatttaatatgcttcaggtcagttgcagacatttctttttctaattcccttggtgtttcatttgcttcaacttatttgattatgtgattcgtaacttgacttgaaatgctagaaaatctacagttcatgtcaattgtcatgtaaaaatgtaattcataattacttggcaggcttttgagcctcctatagacttgagtcaggaacttgatggttgtgaagactcaaatcttgactgcgctccacatgagagatacactctagatgaaaggcacgactcttcttgtcagccggccttgaccaatagttgtacatataaggaagaaagcaaacacattcgtgacccaataacaggagtgtctatcgaggtcagatcaagacattggaactttatccttgtcatttaaaatctttaatttatttgtataaatacaggagcttcagaggaaagaagctcatgatcattctcccaaggatgactctgcagacacaagaatcaacgataagacatgtgattgtcatgaaggccagttaaatcatgaccatggcagtgtaatgccaactcatatactcttatacctcagttccgcccagaaaacgtttttgactatgttagctttgcgcagattctttagttattgtatcagttaagatctttggtgggatcatatgagtatttcctggcattctagatcaaatgaattttaactgttagtctatattaagaaagcattcaactgtcaagcataggcttgttgtatatatttttgcattatacttcatttatgactataaaattgtcataattcatgtgatttttctaattctaatgttcctcttttctttcttaggtatcattttcatcccatgattggttggattcatcgttacagacacatgttcctctggttgatgtagataaggtatggtttttcaaatttactatggctggtgatattcattttcctcagtcctagcctcctaggtaatcataattgtataagagctcttgtagcgtgagacaaagatcattatgtgtcatgttagaacttattctcaatctctattagttccattaggcagtttggtaagttatgagggttggtttgctcatgtagctttgcatggggaggtaaatcctgttgagcttaagtgcaccttcttacacgtatgcatatgcacatgatagaggtgacacacacaccagtacaattgcatatatttgttgcg

SEQ ID NO: 13085 - DNA, 3000 bp, Unknown; identical to SEQ ID NO: 13064
  misc_feature (1)..( 3000): cDNA_ID_2713048_gDNA_ID_2214595_Annot_ID_135487 3000 nt of promoter + ATG

SEQ ID NO: 13086 - DNA, 3000 bp, Unknown
  misc_feature (1)..( 3000): cDNA_ID_2710429_gDNA_ID_2214596_Annot_ID_135492 3000 nt of promoter + ATG
acctaaatgatctcataattagtcagtacccactccacttaacatttttctcacgagaaagtaaaatagatggaatgattagtaaaatagtccaagaaaaaaagtttggtcgactcgacaaagttatttgatctcgtgactaatatacattttctgaaaacttttaataattaacttagcaaatacaatgttgtttttcgagtttatttgccatgacaatttctcaccgccttaacaaattcatttttaaaaagttctagaatcattttggctattggttatttatatatcaaacaaaatataaaggacagaaatccttagaagatgtataaaacgacggcaaggagaaataaactatcaaagaaggtacaggcgataacttagccaggatttagctcctgtgccaaatgggaaagtgacccatttgatctatataacattcaaagtcctgattttgactgttgaatattatcataaaaactcattataaaaaaaccaaagtaataaaagttgccacaacaatatcagtacgcatccaatcttctcgggaagagaaacaaaatcaaattaagaaaggttttcaaagaaggaagagagtcaaaggaacataatatccaaattttcaacttcataaactttttctaaatttattcaacatgaaaaaggagggaaacattgaatggtatcaatcagtatcaggtttctaaaaagggaatgttcatacttacaacaaagaaaatttaaacaacaatcaaaattagaaagacagcaagaaaagtagaaaactttggcattttgatttacatttatgaatttccacatttatcatgaggtcggtggaagcggcggagcaacagttattttaaccgccgcaacaagtcttcaattctccttcctctccgccgccaatctgccgacaagtttcttttcgtcttaagaaaatatattgggtctcgtttcgtacaacaaagtgtagtgtttgggctttactcagaagcccataagtattttattattatttttagacagtaaggcccaatagtattttattgttactgtctgcgctgaaacaatttatgtttttcagcaaagtaatatcttactaatcagtaattacatacaccgtaacaccatcacgaattttcagtacacgacagagtataggtatgattgactgacaacaatataaaaaggctaaattagttagactgtcttattaattaaaaagtaatattgtactattactatactacttcacttaaatatttattcgacacacaaaaataaaccattcgtgtgaatgtttcccaaacacatttggggccgaagcattcgagcgggcgtaccactccaattacctggtacacataattgaagactatagtatgaaaattaatgttttatgtttttgtcacctaaatttttaataaaatgcagttgcagtttggttgtcattgttctgttgatccgttcattccgcgtcctgtatttggctatcacaatttcaatctatgaaaatttgaaatccgtatggtcaaaattatattttaaaaccacattgctagagaataattaaaaaaataataatcttcatgtggaatttatagaaattaatgatatacatttcaggaaaacttagcatgaagtatattattttaatgtgatgattttagaaatacaaaccgagacgcggtatgggatatggtccattacaagtaggcacaatggtccactaataattgttattacgacaacagaattaattgcctatttaaaacgaaatgaatcatcgaagaacatactagatctttttccaatttacaaccaaaaaaaacattattaggtgagtagtaaaaagattaaggttatcagaaactaactgtagtagtatgttgtgtgaaattcttttgtatttcttattaagccaagggtgccctttcaatgcaacgtgataaacgccaaaaacgatgatatgaacaattataaactcgttgagagcattgaactcggataataaatcatcttttatatacatcgtagataacaaacaaacacgtaattaaatttgacgtatagcaaaagacttgaagaataaaacgtcaagttaaagataattttggtatatatgagaaaggtatcgacaaaaaccataacgctatagatgattgtgatttgacaaaaacaccctcaaatcattgttttcagagtttttttagataaggtacagataagaaaccacctctaaaaatcaagcaatagatctcatcgcttaaaagaagagagagatcttcacttgtatgtgtcccactgattccaacacaatgtcccagaacttgccacgtgtcgttcatttcaaaagattgcagtactgttgtccctagagaatcattatctccctcgctgtaatatctttatgctcctgtcactttctgtctgtacccaaaagaagtaatgaacctctctcatcttcttcttctctgtttctttcatgttttgtgagttgtttctcaacaattttctggtctcttagagtgagaggagagagatagagagttgtgttgggcgtggaacttggactagttccacatatcaggttatatagatcttctctttcaacttctgattcgtccagaagctttcctaatctggtcagtagtactctttttatacgggtttttggttttataagatgtggctatatttggaaataactattttgcaagctttcctagattgccagaatataaaaaaagatgtttaacaagagaacggactcatggacttgctttaaattttaattattttaaaatcattctataatgattagagtaaataaactattaggactctgaattataaaattcgattttatatatgctcctccttgtatctcttaatcataagttatcattagctctgttcactagtgctataaaatatattctgaggttaataaaacttttttttctttttattttgaaatgtctccagagatctgac

SEQ ID NO: 13087 - DNA, 3000 bp, Unknown
  misc_feature (1)..( 3000): cDNA_ID_2713083_gDNA_ID_2214596_Annot_ID_135493 3000 nt of promoter + ATG
cgttattttctgtatatgtgagtttatgtatgtcaaaatgacatgatgagattttttgtaaacaacatcttaaaaacaggacatgtgatttttgtaatcgtaaaaactttgggatgcagtttattttctaatcaaaacaaggatatatctaagtaatcgaaatttttttcgaaaatagaactagatgacacttatagattatagatcacacctaattttgaagatgtatctaaaagtccattcaatttttctctgttcccctaataagaaatcatatgttcatattcaaaaaataagaaacacaaaaaaaaactttaagaaaaacacagatgatcaaccgtctggctagagtttggtaaaatattaatatcttatgatttcatattgttccataaataaataaaaaatcataacataagcttttcttgctgattgtctaaaattatgtatagatggaaaaagccaaatcacatgtgatggagccagatttgagtgagagtcatgtgtcaattgtcaaaaacatcgacattataagtctttaagccatgtgcatactggtcagaatctatttagcaataattgagttaaatatcttagatatttttgcatactgttttcatatataaatttattccaaagtttgaaatagtcgatcgaaaacacttaacaatagtaaaagttgaaccgatcaaaggttggatacatacattcagacagagacacccatatcatcaatcatgtttcaatcttcgtggaacatccacataacattattttagtggcaaaataaaaaatgtgttaaatatcactagaaatacaaaaaaataaaaataatatataatatatgcttcatcaataggtgtctggtcttcaaatcatgtaaatcatatactattaaattaaaatgctaagatgagtttcttccatttcattcaagatttggtttggagcaggagtagttcacggatatgattttagtggattgtttataatcgtgacttttgttttgtgtttgatcgacttgatcgacccggccaacttatgatcttccgtaaactaaagtcaaaagcaataatatttctttctttttttgtatgaaaaaagcaatgatatttcactgatctctacggagtaaaatctctttcttggacttcatttggcatagattcttttagttcgtttcacattctctttcagtaccagagatttcttctgtatgttttaaatcttggtcataccgtctttacagcactagcctctagtatcacaatagataatgattttctaataccaaaaccatatagtcactcatctggactagatagattttgaagtcctctagtttctatgtagtgagatcctccattcatttctcttgactttcgtgaggtttgagaatccagtcatgtaacccatagcaaatgattcgacaactgtattacccaatgtcaccatctcaaataaagaagagaaataggattataggaatactgatcttccatgtgatctaattttgtatatatcgcacacttatcaaaatccattgtaaattgtagttttttgcttgaaaagaaacgcaaatagtatcagcagaaaaaagctacacaaatagtaccaccacttttttgtttatctttagaaaaacatttttattactatccacacaaaaaactactaagaaagttataacatcatgtcaataattcaaaatcattatcaatgtcaaaaaaatattagctttaacaataactaaactcagccatcaagcccagataattgtatttaagtatttgagtttttaaattgcatttgagtaatttactcgtaaatcatagctcatggaattaaactaaaaatttcttaaaaaaaggataaaaatccagtaaacgttggaattttatggtaaaagttcgtcttcaattcttacgaaactcatcatagctatcaatatcatacctattaaaatcattagaatcgtctagaaaccttttttaaaagaatttacatcgtcaggtcttaagaaacaaaatatttattatttaccagatacagacataaaagctgacgtgttgacattttaatttgatggaaaacgtataaatgcacgacacgtgctcctactggaccacttgataagttacgtaacttatcaagcttaccgaaacgaacacgtgataacagagaactaaattcacaatttttgttattgataaaagaaaatatttaaattttgaaaaagtaatattaacatatactagaagctatataattagcaaataatatagaaatgaactacttatctaattttagttctaaattatttaccaataatttgttcatatcttgaaattgttaattgtatatcttaaatctttgactgaatttaactcttttaatattaaaataattaaataattaatcttaaggtatttaataaataaaaattactaaaaaaactacaataaaagatctatatccaataagaaaattaataattatattgataattagggagcatatgcgttattataaattacaacctaacctactttaccgacccaaagcctaaaaaatccgacctttttttgttttctctctctagaagtctctctgttttcatctttctctctctctctctagctcttcttcctcgtttctggcttttctgggaattttgatcctttggcccccattgctcgcttgaattacgaatcagatatcgccgatcgtcgtagatctgcgttgatactgtccggctgagtaaacagggtgaacaaaaaccaaaaacagagagggggtttaaaaatcctgaagaaaatcgcatgaatttgtttggaagcctgattttttcatcttcgatttcgagccacttcacgacttgtcttctcatctttattcttcatttctctccccagcttaatagtaataataataataataatagtaatcgtaattccaataatctcgagagtaatcgtttgatcaattgaaaaaaaaatc

SEQ ID NO: 13088 - DNA, 3000 bp, Unknown
  misc_feature (1)..( 3000): cDNA_ID_3028027_gDNA_ID_2214596_Annot_ID_186925 3000 nt of promoter + ATG
ctttaaaatggaaaaaaaaactcacaacgcaatgatacttttatacttaaaatgcgacttatatacttaaaatgtatcgaggtgaacaagctagcaaaatgtatcgaggagacaaacaaaatgtatgtaaatgcgacttatctacttaaaatgtatcgaggatcggagaacaagttagcaaaaaacaaaagatgaatggcaacaaaagaaaataaccaaaacttttttttacaaaatatgtacctgcttaatttaacgttacattatttcttggaaaatatgtttcatcgttaattattatggaaaattaattataaaaaaagttgcgtgattttgatttgtgcatggataatgataccgccaaacttaaaacggacaaacaaaatgggatccatcttgtttgtttgtagtttgtactgctcaaagaaaattcaacgacgcgacgtcactactcctcacccacttggcagcctcggggtcaaagaaaaacatttgtgtattctgttcctttaaaagttaaaacactgttattgctagaatctccaaattaatacttatgctgttatgcagtatgagtcgagtgtctgacttgtatgagttagggcctagtatgaataaataaacattattaatattaagatagttgttttcgataattgtttgataaggatgccactaaactcatacctcttagcttatacgaattgacttaattagacattaatacattatatctatatattatctagatttataattgctaagccaataggtcaaggtcttgtctaataaatgcatgcacaactaattcagtcaataatgtacctgtataatactacaaataattcaagctaattgatctatattgaagaacaaataagtaatctatttcggatttagtcttatcatgtgtctaaataaacacataactcttaagtcttaatgatttatttttgatagatatcaattataattatacaattacaaatgatttgatgattgactatacgtaagaactaactttgataattttgaattgggacaaatcattgaaggccttacgtttaagctttagatgtttcccaacgccaaaggagaatgaaaaggacagaccatcagtgatttgagtactcaatcaacatatttattatgtactttgagttaattaattttctattaataacaaaaatcaagcttgcacatttcaatgtgataagtatatgaataataatccaagctaatttttaagaaaagaggaatattgaaagcttgcaaattattcgaatgctagaggtccttaccttgcatgcaccttttgtaacaattacctatgggtgtggggaaatctagctagctacatattttcaattatttttccctattaaattgagattattgttataaaagaaaatgcccaaacttaattttcggggtttaaaattttgtttaaaaataaataaaatataagaaaagaaagaaaagtataatttgggttaaggggtttgaatatgattgatttgaatcgtcgtcgaaatgtatacgtcacctaacgcttttgttgctatactagtatcattaagtggaaattttaaagtcattaaaactcttctcatttttgtatttctaaaagagtcttaaggggtttgaatatgatttaaattatcttacaagtgtaaatgccatctaacgcttttgttgttatactagtattatttagtaataagatgctaaagtcactcaaactccagaatcaataatactccaagctatacatattagaattttaaaatagtatgaacactttcgataataaaaataccaaacttatttgggacactaaataagtttgggccgaaaatatttaaaagcccaatttaaactaaaattcatttaggctcttctcttctactaccttcttctatcgagccacaccgaatgaaattagtgaaactgctattggcttgtgaattgtgtgtgatggcgttaaagcctcttttagttcgtaaccgatgaaatgacagtaatagccttgagaaacactgaaaattacagaaagagagtttgaactttgaagacaaaacaggtgtttctatttctctccccgttcacgttctgcaacatcggaagcacgtacggctcctaagactccgttttgcttctttttttttaaaacacattcttattataaatataaaaaaaacaaagagagatcaaaaacaaaaagtttcctctctttttctaattttttaaagtttctttcatcttcttcagatccgaattgtcgccgcgaaattcgtcagtgcagcttcttcttcttcgcgtactttattcgatcggctgtctgaagaacatgaagccgatgatcgtaggtacgttagattcatttttccgaaattggctttttgatttttctgatcgaaacgatgcgaggttcaatttcatcattgttttgaaatctatgacttacaaaagtaatggcgttgacagatttgttcttaataaggacccacatttttgctgaattttggaacaaacattgttcttctttgatttcaaaacaagaattagaaaattcatttatcatgtaatctatttagctgatgtgacgatgaacagatcaaaggaatgtagtctcgaattgtttaaggttataatgattcctctaagtgaaaaaaaaaaaaaaagcagaaaaaaaagttagaaagatgacaaagttgaagatttctttttgtctttgaagcttctatttttttggtgggtcctttttaagacaatgatttcaattcttggattttgtctgaagaaaaatgttgctgttcttctctttacaatgtttttgattgtgagcttgcgttgacttaaatcatgtcatatattttggtttctcacggttttatttattgtgccaagtgatgcagttgctgctagttacggtggattgatgtttggatggacgcagaaattttgatgtgggtttagtctaaaaggtgaagaacaatg

SEQ ID NO: 13089 - DNA, 3000 bp, Unknown
  misc_feature (1)..( 3000): cDNA_ID_2710422_gDNA_ID_2214596_Annot_ID_186926 3000 nt of promoter + ATG
ttcatcggttacgaactaaaagaggctttaacgccatcacacacaattcacaagccaatagcagtttcactaatttcattcggtgtggctcgatagaagaaggtagtagaagagaagagcctaaatgaattttagtttaaattgggcttttaaatattttcggcccaaacttatttagtgtcccaaataagtttggtatttttattatcgaaagtgttcatactattttaaaattctaatatgtatagcttggagtattattgattctggagtttgagtgactttagcatcttattactaaataatactagtataacaacaaaagcgttagatggcatttacacttgtaagataatttaaatcatattcaaaccccttaagactcttttagaaatacaaaaatgagaagagttttaatgactttaaaatttccacttaatgatactagtatagcaacaaaagcgttaggtgacgtatacatttcgacgacgattcaaatcaatcatattcaaaccccttaacccaaattatacttttctttcttttcttatattttatttatttttaaacaaaattttaaaccccgaaaattaagtttgggcattttcttttataacaataatctcaatttaatagggaaaaataattgaaaatatgtagctagctagatttccccacacccataggtaattgttacaaaaggtgcatgcaaggtaaggacctctagcattcgaataatttgcaagctttcaatattcctcttttcttaaaaattagcttggattattattcatatacttatcacattgaaatgtgcaagcttgatttttgttattaatagaaaattaattaactcaaagtacataataaatatgttgattgagtactcaaatcactgatggtctgtccttttcattctcctttggcgttgggaaacatctaaagcttaaacgtaaggccttcaatgatttgtcccaattcaaaattatcaaagttagttcttacgtatagtcaatcatcaaatcatttgtaattgtataattataattgatatctatcaaaaataaatcattaagacttaagagttatgtgtttatttagacacatgataagactaaatccgaaatagattacttatttgttcttcaatatagatcaattagcttgaattatttgtagtattatacaggtacattattgactgaattagttgtgcatgcatttattagacaagaccttgacctattggcttagcaattataaatctagataatatatagatataatgtattaatgtctaattaagtcaattcgtataagctaagaggtatgagtttagtggcatccttatcaaacaattatcgaaaacaactatcttaatattaataatgtttatttattcatactaggccctaactcatacaagtcagacactcgactcatactgcataacagcataagtattaatttggagattctagcaataacagtgttttaacttttaaaggaacagaatacacaaatgtttttctttgaccccgaggctgccaagtgggtgaggagtagtgacgtcgcgtcgttgaattttctttgagcagtacaaactacaaacaaacaagatggatcccattttgtttgtccgttttaagtttggcggtatcattatccatgcacaaatcaaaatcacgcaactttttttataattaattttccataataattaacgatgaaacatattttccaagaaataatgtaacgttaaattaagcaggtacatattttgtaaaaaaaagttttggttattttcttttgttgccattcatcttttgttttttgctaacttgttctccgatcctcgatacattttaagtagataagtcgcatttacatacattttgtttgtctcctcgatacattttgctagcttgttcacctcgatacattttaagtatataagtcgcattttaagtataaaagtatcattgcgttgtgagtttttttttccattttaaaggctgggagctggagacgtacgtgtgattttatttttatggtaaataaatttaatacgaaaacaaatttactagtacttattaaattgttaatacgtaacttcgtactttatactatggttaaattgtttgggaaaagttttttttgtttgttaagttccaagaatttgtttagaaaaagttatgaacttatacgcggtttgctttaaaatgtttcactttttgttggtcaataaataaatgaacttcactttgcatgaatacagattgactatatcatacatacattaaatatactaatatacgtatattcgcaaaaataaagtacatacaatatatatacgtagctctatgattaaaaagcagcaaatgattgtaaatgttacgcacagtctggcaatttaaagccttctttgcattgcttcacccttaaggtttacgtttagtgaactaacttacatacattgtgtggaacatgtaatccatataaattgaccacaaaatagagttgtgaaatgtttagtttcattgcatcaaagagaatatattttttcaaataaaagatagtacttgtcacttcctatatctcttacctgttaactagaaataaataaacaaatccaaaaaaaatgtgtcctacttacttactaatgcttcaagcttggtaacacatcaaattaatattctgatatatcatatatcacctatcttacaaagtcattaattttcaggatggaagagattagattaggcactgcttattatacgataaagattgatatggatgcatcatatttccgaaataaagtacaagtatttacggtatgtgattttgctcgaaacttaagagtcgtttcttagtaagaaattaattaacatcgacacaaatcaaaaatagtaacgaacataaaaatgtaactatatatacatgtatccttaagctgctgctactacaacaactcgctaatcattaagtttcataactata

SEQ ID NO: 13090 - DNA, 3000 bp, Unknown; identical to SEQ ID NO: 13087
  misc_feature (1)..( 3000): cDNA_ID_2713083_gDNA_ID_2214596_Annot_ID_186923 3000 nt of promoter + ATG

SEQ ID NO: 13091 - DNA, 3000 bp, Unknown; identical to SEQ ID NO: 13088
  misc_feature (1)..( 3000): cDNA_ID_2710433_gDNA_ID_2214596_Annot_ID_135495 3000 nt of promoter + ATG

SEQ ID NO: 13092 - DNA, 3000 bp, Unknown; identical to SEQ ID NO: 13089
  misc_feature (1)..( 3000): cDNA_ID_2710422_gDNA_ID_2214596_Annot_ID_135496 3000 nt of promoter + ATG

SEQ ID NO: 13093 - DNA, 3000 bp, Unknown
  misc_feature (1)..( 3000): cDNA_ID_2710440_gDNA_ID_2214597_Annot_ID_135498 3000 nt of promoter + ATG
gtcaaaagtatttatgggtccggcgcataggcagacacaaagaagattaaaggaggtcagctggtctttttagaattctacatttgcattgtaaccctttaaaattcatgatattatttatatatatttttttatttttactcttttaaaattacaaattcatatgtaaaccttctaagttttattgtatttttcttctactttgtggtttgacactatttctaacatgttttttactttttttgtttgattcacccataaacattgaaccatattttatctattttttaaatgaagttttttgagttttaaattttttggttacttattatttcgaagttatattttgatactttataaattatttatgggtccgccgcataggcagacccaaaaaagattaaagcaggtcaactggtctctctagaattttatattcgcattgtaacccattaaaatttatgatattatttatatttctattgtttttacctttaaaatcactaattcttatgtaaacatttaaagatttatcgtgtttttcttctactttgtgttttgatactatttctttgttttcaacttttttgtttgattcacccataaatattgaaccaaattttggtgtttttaaaagaaatgaagatttttttagttttttaattacttattattcaagttataatttgatcctataaaaagtattttggatccttgacttgaaatgtaaaattaacgggtacaatgtgatagttaatatcctaaacattatatgacacatgcctttgatacgggtaaatagatataaatataggtgttgttatatccatataatatatattttttaatttcgtaaatgtctctaacttatcactctaaattatgattgattcaagaagatactcattttaaatttttttggtcgaatttcaaaaattttggtatgcttgatctttaaaatttaaatttaattttaaaaaaacaaattttggtcgcgcaaggcgcgggtggctcacttagtctcatattattccttcacgaatctggacttattacattttcgtttataaaaggaacgttaatacccggttcattccagtttacagactcaatcatagttattctaaaccatactctaataaaaaccaaattagtcaaactgacccaaatcagaaacaaaacgaaccataaataaatcgaaatgcacatcactagcaacttttctataaaagtgaaagtgggtggacagacacttgggtagaaaacccaagagatgagtggcttccacgtcatcctttacagtgatcctcgcacgcatgtataacacttatatcagtcaaagtcattattttaatcaatggaccatttccaacttaactttaactttaatgatgccagctttgtgtcacaccacttactaataaacgtagaaatatatccaaaaatgaactaaaacactactctggaaatattaaatatagaaaaccaaagaattggaacagttcatcgggaagggttttgggaccctagagaatccatggctatcactctcactaatttcactgtaagtacactatttctttactttctctatggtttgttgatgatgaaaaatttatcaatctttgtctcagtttctctatatggatgcaaacctgaaacgtttaggcgacatatatccttccttgaacttcatgggtttataggagtttgcgtatgtatatagatacatgaatgctcaattttggattgttgttccttaagaatgattacagttttagggtttggagcaaatgtagttactcttcttctgattctgattctcaccataacgagaagaaatggtagatgtaacagaagggtaagagtaagcctaattttctactttggttttggtaaaaaaaaagaactgattcgtcctcatttgattttctttattagaaaagctacattgagaagtgtttgttgtatgtaacacctgcacttggagcttgtttgtcatgtgtggacttggtgttacttgtgagaacaaaccgtaggagagaagtcattctctgttttgtccccttgtctggtttcgtaatgtgggtaagcttcttgttaccaaacacgaacagaactctgtctttgtctttctcttttgtttctgctttgaaggttttttttaccttgtagattgccgtcatcctctcattgaagtttgcttgttgtgcgtgccacgttttcactagccagattctatgtttctggtggatctttagattcctaacagatgcccttcatcttaacatgattttcacattacaggtaattaagttgtctttatgaatctgtcacattctccatataagtagagttggttaaccgaatttggagcgtgtacaggagatttgcctcatcatgttggacattgcttttggtatctctattaatgtcctcaggataaagcaggcacatcccaaaatcatgtatatgctttaatatggttctcttatttaatatttttttccttttcatttcttgtttaattccttattctccttgtagtcctttggaagatccacttattgaagacgacgatgatcaaaagcgcattgtacgacgtctcttccttgtaactaactagtttaaagagtagttaaagaccaatagatttgttcattctttgaaggagaaaaatggaagctggtgggacttattcacttttgggtacattggttcaataatgaaacatggctcggtgaagcagctagaattggaaaatctacttacactaccacctgaaatggatccttttacatgttgtgagaatttattgagatgttggcaacttcaagagtgtaataattactcaactccatcactaatttggtcaatatatggtgtatatggatggccatattttcgtcttggactgttaaaggtacgttgcttatttgactttcttatataatctttgttaatattgctactacaaaacatgaattttgcaggtgttca

SEQ ID NO: 13094 - DNA, 3000 bp, Unknown
  misc_feature (1)..( 3000): cDNA_ID_3028047_gDNA_ID_2214597_Annot_ID_186941 3000 nt of promoter + ATG
cgtcctggaaaagcgcccttcatatctttgcgaggacagaactcaaaatgaaatcgaaaagctaggaccaaactcttgattagggatcatcatccgcttttaagctcgacaacggcagaatacgtattggaaacctttcccatagaaaggcttgaagacctccaaactcaagtattcccaaggtgcacactcaatgcaaggtttccagcagacaaatgataggaagcactttcactcgattgcattggtctaaaatgctagcttgaaaaggaagtcccttacacgagtccaattcttttttggttattagcaagctttgaagaacattttctcgatcttcacttcaactggccggatgtggatggaacgtatgctacgagtgctttagttgcgacgtgggtaccggttgtattctaagttgattcaacaacagcctaagtttccttatttcatcaaatttcctgttagcaggatcgggtaggatagtgagtgtcaggagaaagaaaagaattagaagcgtctctcataggttcaccaatttattgactcttgccaggtagcccgatgtctcatcgtaagatgttggtgagtcttagaccaattggggccaaggagggtttggttaataaataagtattaaaggcacgacgagcgcaggcatgtgattgtaagggatttccagtccctggctagcgatgatagcgatgtaagcccggcaagcaaggaaggttgtaaggggtttcaagcccctggctagcggtcaagtaagtaaagagatgtcggttgcttgaggtaggatttggaagtcctaccgagaccggttccctgtcctataaatgtaataagtaagtcggctctgttgtgtgaaaatggtaccggtggttgcttcgaaagcgtagatcaatagggcggtgtagcggaatacatggctaaaacctattattatttggttgtgtatgtcggttgaatgtcccaccaaggccaagtccccacgtgatgtgggctttctagatgtctttgttcctgctttgagccgagtttgggtggttctgccggtattggtttatacggctactctcgaatttcggggtgaaaaaggaccggactgttttccttccctggaacctatgccatcgagaaataaggaaatcatggttttgataatatcggggttattaaataaaggaccaatgtttattctccttaaagatgatctctgtcatcgagaaatgtataaataatggtttcgagactcatatataggggttctaaagtctccctcgaaccccgggattgatgaatccccgtccctgggtcgccaaagagatatgtctatagttgaattcgcgcgtaaatccttttgaagtggaatccggacctttgtctatagttgaattcgcgcgtaaatccttttgaagtggaatccggacctttatgccgatgcgattgagatcatctctgtactgtgggcgaaacccgttgttggtgatatgatataaaagtccgctgatcgtctagttcaataaaataaatagtaggtatccggttcaagtgcaggcgatggactttgaaagggaggtcttctctcagtgctggcttctccgtcgcgctaagataggagcagaggagaagtccagttttattaataggagagaaagaaagatagaacgaattttgttgctttagatagaccgatgtgttttctttcttcatgaataaaagggcaacgattcgagaatattgttctaatagagggagttgctcttttcctctttgccctacttctgtttcccgtaaatagtatgcgagctgatggtatccttagctgtattcctatgaaatggaagggatgcaaataaagtcctattttcaattccgagatactcagatcttaaagggtttctcaaacgggaaatcttaacagaagaatgtcaatataaacaggatagtactgttccgaatcctcgatctagtaggtattcctactgtaacactatacagtaaagctcctttttaagatcacaacccagcacagaggagtttgttgcgtgggattaaacgcataattcgtgcatccgagaatgggatgtcaaaccctactttcctcaaatacgaggaatggataagccaggctagtatgttctgctaactacggaaggaataagaaggtaaggactcaaccttagctgtgatcttttatagcacacccctgatacacgctggtgtgcttgtgctgcagtttagaatgctgattcctgggtgggtagttcctactcttgcttcccttggttttagcaggtatttgtttctagcttcggtagttaaccaactattcccttttcagcacactctttggcgtgcgataatagtacacttttaggaatcccacaccaagtgaacagagttatcggctgatactttccttgttcctagggttgagcagaagttggttgactagctactacttgaagtcagcacactcctctgcttttccgatgctttgaccagctacttgttttcctaacccgagctaatcctctgtgctgtaatggaggagtgtgctgaataggacaggtaatctacaatcctacaccggacgagttccttgtgatagcacacccgaggattagaccgaagtttccttatttagcacactcttacacgtgagcacgcatgcaataatagtagtagctctcttctgtgctgccgaggtttgctttcttttgactgtagatgaaacttttcaaaaaaagattgctctttcccttagaaatggggttgctaacttttacagctatatgaaatgaaagttggcgattccttctgccatagtagagctaaagccgccgtagcagttcagtgtatcataaggtaggaaaggtcgtcccctcttgctctagcagtcaacgacagaaaaaagcagggacgtgttatggttaccagaaagggaataaggaaaggaatctacatattaaatcctctatcggcacaaagaaaatg

SEQ ID NO: 13095 - DNA, 3000 bp, Unknown
  misc_feature (1)..( 3000): cDNA_ID_3028040_gDNA_ID_2214597_Annot_ID_186944 3000 nt of promoter + ATG
cttaaccttcaattattccagaaaaagtagtcaaagaaacataggtcgaataattaaatgaaaagatattttgaaaattcttataacaaatataatgctggaaacaaagttgatagagttatttaaggataagttttaagggctgcaagctcttcatccatatttttctggttattatcgatgagttaaatttttatttgtgggagtattgaaaacgtatattcgaagggaaaaaatgattttgtgagctaaatttgttgccgtctacagcatcccagcgtactgtgtgagccgacatgtagaatttacaatttaaaactgttattttaataagtagttctcttacgttcaatatatttttaaatataaaaataaaataaatcatctaagagccaatttcacgaaagaaaaacaacaaaaagtttatcttaaaagagaattaatttcattctctattttagatgagtgttagagtatatatgtatatagcgtcatacatctagactaagttaaatattggtgttatttggtagggcttaagatatagtgtttaacatttagatgaagttaattatataggtttgggtttataaagtaggaactagggtttagtgttataaattcagatgaatttgaataactaatttgggtttataaggtagggttagggtttaaggaataactgatggaagcacatacaataatgtaaacttatatctttagttcatatctaactaaaaatatttgaacaatttgaaacctcattcgattatatttaaaattatttatgacttaaagttcattgtaattgtgtttatttggtatagtgtttaacatttagataaagttaaatataggttcggatttataaggtattaggtaggatttagtattattcatgtagacgaattgaaataactaatctgggtttataaggtacaggttagggtttaaggtttagaagtctcatgaatattaaaaaggggtgctaagtaatttgcaaggattaggcacttatggggcttggagttattcctcttctcctccgttgggaataagtttttttagtgaaagttgtccagaaaacgagagggaagaactcaactatttctcaatttgaagaagcttccggtggatcctttttttgttcttgagacctttgaagttaatcagtaggggtcctaggcgctagaatgtctagattgaaaaagtagcatatataagcttttttatttcaagagagtaaagtttaccctgttttagtgtaccaaaagataagagactgtgtttttgtgtgtaagaaatctcaagagacaagctaaagtagtcgaaactttgtgtaaaaccaattaagagagttacaagttctttataagattttttgatgaatttataagctcattgttgctgaattttttaaatttttttagttacttattattttgaagttagattttgatattgtcaaaagtatttatgggtccggcgcataggcagacacaaagaagattaaaggaggtcagctggtctttttagaattctacatttgcattgtaaccctttaaaattcatgatattatttatatatatttttttatttttactcttttaaaattacaaattcatatgtaaaccttctaagttttattgtatttttcttctactttgtggtttgacactatttctaacatgttttttactttttttgtttgattcacccataaacattgaaccatattttatctattttttaaatgaagttttttgagttttaaattttttggttacttattatttcgaagttatattttgatactttataaattatttatgggtccgccgcataggcagacccaaaaaagattaaagcaggtcaactggtctctctagaattttatattcgcattgtaacccattaaaatttatgatattatttatatttctattgtttttacctttaaaatcactaattcttatgtaaacatttaaagatttatcgtgtttttcttctactttgtgttttgatactatttctttgttttcaacttttttgtttgattcacccataaatattgaaccaaattttggtgtttttaaaagaaatgaagatttttttagttttttaattacttattattcaagttataatttgatcctataaaaagtattttggatccttgacttgaaatgtaaaattaacgggtacaatgtgatagttaatatcctaaacattatatgacacatgcctttgatacgggtaaatagatataaatataggtgttgttatatccatataatatatattttttaatttcgtaaatgtctctaacttatcactctaaattatgattgattcaagaagatactcattttaaatttttttggtcgaatttcaaaaattttggtatgcttgatctttaaaatttaaatttaattttaaaaaaacaaattttggtcgcgcaaggcgcgggtggctcacttagtctcatattattccttcacgaatctggacttattacattttcgtttataaaaggaacgttaatacccggttcattccagtttacagactcaatcatagttattctaaaccatactctaataaaaaccaaattagtcaaactgacccaaatcagaaacaaaacgaaccataaataaatcgaaatgcacatcactagcaacttttctataaaagtgaaagtgggtggacagacacttgggtagaaaacccaagagatgagtggcttccacgtcatcctttacagtgatcctcgcacgcatgtataacacttatatcagtcaaagtcattattttaatcaatggaccatttccaacttaactttaactttaatgatgccagctttgtgtcacaccacttactaataaacgtagaaatatatccaaaaatgaactaaaacactactctggaaatattaaatatagaaaaccaaagaattggaacagttcatcgggaagggttttgggaccctagagaatcc

SEQ ID NO: 13096 - DNA, 3000 bp, Unknown
  misc_feature (1)..( 3000): cDNA_ID_3028063_gDNA_ID_2214597_Annot_ID_186933 3000 nt of promoter + ATG
tctggaagtaaccttacctagtggatcaagggtttctacagctcagatcctccccagcacactccaatggtttgtgttgccgatcgcagcttcgttgtctcagattcaccagataatgtttctagcccttattatcttcggtgatcatccgggtctggctcaactcttaatggatctaactatgctggactttgtatatgttgactgaagcgctcttttattgatggtagtctgcctcgtcctagcctagatgatcttattataagttataagatctgggtaaggtgtaagagtatggcgaaatcctggattatgaatactagagatatctcgatcttatatatgcaagatacggcaacggaagaaattaaggaaaaaaggttatagctctcaagttccagtctgagctactgaatgatccaaaatgaaaagaaatatttttagctttaaccaaagaatagacgaaaaaagaggtccgaaggtgctttagcaacgagactgatacctccgtcaaacctacgtcggggaggaagcagcaaatcacttgagggagatccttcttcagccactaggtcaggtgcagaagtctaagtggagtaccggcaattcgttttcaaacgtaggaaaggtgctgtccagcacactgcttttctttttacctttattcctaagagcaaaagaaggtaaacgagaaatcacactcctatgctttgcttgcattaattcttggaattgctggggtggcatgaccagagtaatctatgccctcgctctactgcttatgttcagattcctaagctggcagaattctatcctgaaaattgcttcaccaggaagtaaagttctttccgttcctgctttttcttcgagttgaagaagcctttggtttcaccgttttacgctttgaacctggacctgctttctttcttcagcataagcgcacactcccagcgaagtagcccccgcagcctcccgcagccccgtagcctcccgcagcctcccgcagccccgtagcctcccgcagcctcctttgacggaggtttgacggaggtggcgaagcaacctactttgacgtaggtctttgacgaggggctttgacgcgggtttgacggaggtgacgaagtaaccccttgagggtgtgggcttgagtaaagcagcaaatttgtttcactagcaaagcaattgtccgaatgaagcgtctcatctttatcacaaatgctacgaatccagagacttcctctgcatcatcatcctcgtctgtttcgctctcgctccaagcaaaccaataagggagtattcacacattcagcttttgtgtgcccctagcgaagcaacctttgcattaaaaacatttgaagtctcttctctaaaaaaaggcagtgctcagctttgccatatccctacactgttgttctcccttctttgacacacgatcacgatttgttgttgtgttctgtgtaaaagggtttttcctactttgtccattcttctttactactttgccaaagtttctagcaagcagtgtgctgccgattgaatcttcaatatctctcttgttgtcttagtgtgtgctgcagcaatgctttttctcggacttctcagtctccatttcatacgcttgtaggtgacctacaacaacatcaaacgcaagggtatctatgtcattcatggcttgcgaagggctgcttcgccgggagtgtgctacagaacagaagctttttgacttttgtctttgtctttcattttgagcagcattggcaaagcacagatgaattgttcaatggtctctctttcctccgtgaagccagcagcatatcaatacgagatctctttacacttgtcaacccttctgtaggatatcccaagcatctttggatgattcacccttgaatgtgtcacttgcgattgctgacagtgctttgctgttatactttcgacttcttcttctcagcgtctgtccatttatcactatccttttcttgccctgccgcttctactcctttcacccctttctccacagcataccatgcgtcttcataaatgcctcggtgcatcttcaccttcttttatagttccctttctgagattggtcgatgcacagcaatcaattccttagattcccgcagtgtgctgatcctcaccacctgttgtaagtagtcttggtatttggtcggtaagtaaaggtacggaaagagcggacaactaattaaaatctctgaacgtgatacgtaaatgggagaaaaatatggatgaaaccccttatctatctttccttcggcaaaaaaagtttatgaagccatcctcgcctcggggataagagatctttcgattctggagagtaagcttcaagctcaagatctcatttgtgatcttcttcttcgcgaacctaatctcaagtgaacatttattattgaattctcaattttcgtataaaaatacctgcctttcattttattgaagagaaaacctccccccatttgaacgaagtctctggccttccccgttatgactttagagtatctctcacgtcttataagtcacttaaaaatgaatgggcggataggaccactcctgcttgctcttggccttggctgcttagagacatccctttagttcgtcttagaggtctcgattggtattgcgcggtcggtaacgttggtgaattaggtaaaggtacggaaagagagggattcgaaccctcggtaaacaaaagcctacatagcagttccaatgctacgccttaaaccactcggccatctctcctacattatgacccagaaacctcgagtgaatagcgagtcatttatattcttgcagtaaaggtacaaccacaaacaatctattaaaaatggaaacctttttagtcaaagaaagatcttccttcgaagaaaaaaaaacaataagaattgttaccattaaaaaaaaagcactctttctattcatctttgtcaagacgacgatctcgttatattattatatttataccggattttgccaatg

SEQ ID NO: 13097 - DNA, 3000 bp, Unknown
  misc_feature (1)..( 3000): cDNA_ID_3074477_gDNA_ID_2214597_Annot_ID_186936 3000 nt of promoter + ATG
cgattaccagctcggaatcaacccgctaacggaatcctctggctgggttacctaacctccacttactcctaccctaagacaccaaaagattcaccagggtttatttcaactagggctctttacacgtcagtttggtttgagcctacagctgtctcaacttaatgaactcgaccttatctatacgcaattcatgccctatcatgatgagtcaacaatcccaatcccaagccaagctttctcaccctatttagatttaagtgcaccgcctgctttctttcatgttggaatttctcctgctgtaatatatagagtagttccccttattctagttgtcttctttctattccttccggagaagaagggtaaaagctagaaaggtaagcattgtcgtgtcgacgcacgcgaaaaaggtacaagtccacttcgatagccaagcaatgagggagtctgaagagacttccagttcgctggacttagttttagatactccaagccttgttatcttaattctcttctgtaacagtaacggatttcgatattgaatgtactggtcggttgggaccctataagaagacaagccaagcgcttagcttagttcgcggccctttacaagagtgaataccgaaacagacaattccagatgccactaaacaagtaaaggacaacagacagtattcgtggatcgggaagacctactctcattcaaggaagcggaccggttgacgactgcaggctagggtcccgttgaatttgacctggtaaatcccgccacagaggtcgttttctaccgggaaggcatagagtcgcattttagtctgagtctgagcaaacaaacactcacttaatcgaaagctaaataattaactttggaatggtaacgaagatcgaagatcgaaatccttccttccatcgtctgatctcctcctgagacttctgagcctcctaggatacttcgtaagccgcagccacaggattaatatgtggaaatggcaagtacacactgtgcaccacgatctttacgttgcggatgacgtccgacaccttaatcctcacatagttaatcctcatcggcgccgaggtcaaacctccaccggcaccagaggttgtgataagcagcggttggcctcgttccaatgtcggcggagcagtccccaccgaatgatcatttatttgactttgactcttcaaatcccattttttattttttctattgtttgtttgttctttatgcggggacaggattcgaacctgtaatcttcaggtcatgagcctgatgagttgaccaattcctctaccccgcttcttctcttctacaagtaggcttctttcttctagagacaaacgaccgattgaactacaatcacaggagacaaattattcttcttgtcaaccttcttctcttacgatatttcaaaagaaagaagaagagtcgttggaccaacaaccgccaggataaaagtcttctttagtcatcaggaagctgatttgaatgaaaagtaaacatagaattaggtctcacctgcgctagggactttcattgaatcaatctcggtatgtcaatcggaagctcaagaagagatagtatcttcctttcagtagcctctggtcttgcagttgggtttccccgcccaaagccttctaatgattccgttaaggcaaatatcccataataagatatacgaataagacggatcagaccgaactgtcaatgcattcattccatctccaccggaatcacccctatgcatagctccttccctcttctatgaagttgaagtgaagcaagcgagcctctcgattgagggagaccgatctgagtcagtttatccagtattttaggaaatgttcgggatagattcacgttttcccggtcttttttatataaattagcgcttttgtggtacgggtggagggctatgagctcgttcactcaatcccgtggaaacaactcccttagccttagttggaagctaaaccaaagtgaagcttgtaggctcgtagagaaagctattttgcaggtatacccatagatccatgttcctgaacagtctcggagaaggccaccagcacccgacttaccagaatgtcccgttgcagcaccatgcaagaaaaggttcctcttggaagcaccatccgtattgaattttaaccagccaatggaaggaaattcccaaaactcaagaacctgagcttataagaccaaaacaacttggacctgccgaatagactagaagacgatatcatagttctgaatggcgcgcactacctgatgatagggagtgctctgtcgcgttccattcgtttcgatttcatttcaatatagggcaagtcctttttccgacagaaggagtggtcgttttgggtgacagaataagattccccggatctccctcaatctcaaatcgacgacgagagattctaccacgctcacttttacgtagcttcacttcttcttgatcctgctccattggagttggttcattcagtgtgtcgctcccacttgccccaggaggctgagtaccttcgttcctcttcctcaactggttgattaggtgctccaagatctggatcttctatttcataaaactggaagtcttgactcgcccttctcggtggtcgttagcagctgctatttgaaatccattcccgctgctgtcgtcaacggtagaactcttcgggcatccgtccgttcttgcttctggagttcaggagtggattcgattcgatccgatgagagagatcagtaggggtcatccccgagtggacgagcataaagagatcccccggatgacaggcctggggcgaaaactcttcaaaagttctggcgctttcaaccctcgaacgaaaatttgattgatgaaatagtggatttcgcctttttttgggggctatttcgtgcctctcaattctgaaacaacaaagcaggggaagtgtggaaacaaagttaaagaagagacttttaggaacaacagcaccaaagataccttcggggtagacatg

SEQ ID NO: 13098 - DNA, 3000 bp, Unknown
  misc_feature (1)..( 3000): cDNA_ID_2710454_gDNA_ID_2214598_Annot_ID_135501 3000 nt of promoter + ATG
gatacacatatgaacaattctaacttaattattatacctataggtttataaggtgataatgttgcctttatgtaacactcaatattgaccaaatttaaatcagtgagggaaagaagggcacgtgagggaaacgtcaagggtacttcataaaggcaaattagatgctacggcaggatccactattttagttataattatttatcgcattagtttcaaaatcaaacactcttaaaaagagaaaaacaaaatgaatatcggttgacgaaaagaaattgaagagtatggtgaatgaagaaaattaggcatatcatcacctttagtcaaaagaatgaaaatcggtaaaaaatcactctagtggataattttgtcaacagatgacttatgatcttatgttatatattcaaaaattccaatatatgttttgcaactatatttcacactaatttaaatattctaaagtcaaagataaatgaaacaaaaagacagatgatatatctattatacacctaagttgtaagttgtaaacactatttttgaacatcttggaaaattcgaatgtagccaaagacataaatccaatatatttttttggtataaccgtaaatccaataagatcaatcacctttggataaagctaaaaatgcaagttgatttaaaaatcaatctaatctaaatgattgtaaagcaagagacaagactgtaatttgacaattaccatacacaccaagaacaaaaccaaagactaaacaagaacatataacaaatatttaacattttcttcattgttttctcgtaaattagacaaaaaataataataaatacacatgcatcgatatttatgaattttgatttatcagtgaaataatttgataaaattactaaaatttataattgaaaaattaaaagaacttacgtgtaggttccatgagaaagctgaataagagcattgacggcagctttctgatggccggaaacatcggaagcgaccatagaaacaagaatttgaataacacctagctcagccatgagcttccgagtcttcttatcttctcgggcaagtttctcgatctctatggcagctttctccttctcttcccagcttccgaagtggatcttctttacagttttttgtaacacaacctcctcattctcatcttctggtggctttgatacaatttcttccggaagcgccgccaccttctcgaaatcttgataggttcttgatttctctggtaacgcttgaagattacttttgcggaaggatgctttggatttcaaaaggcatcgaatctttgtgaagaagttgagcttcatgtattgaagttgccaaactgaagaagaagaggattgtgttcgagaggaagacataatggatagatgatttgatgttctgtttcttttagtggacttcgctcgtcatatatatatcgacctattgatatttgtccaactttaggtatttatggggccaataaggtataggcctaatgccggtaagatttttagaaaaatataattttaaagtaaacaaatgatgtacgttttgtatcgcataactaataatcttttactatatacttcatgtgtcctaaaactcaggcaaggcctaagcttctttatcttttcattttttcaatcaccaccataaaaagcatttggttatatagatccactacttaataaaaatggtgtttcgacgaaaaaaaaaaatgtagatccaatccgtcgataattcaatttataaccattttaccaacatcctaaatttcgttggtatactatattatccatcgtagataatttcaaaactatttaccaatgtcactttgccggtaatagatgttggtaatacgtcaaaatatgtttggatgtactattgctaacatttaaatgtaacgtcaatagtcgttgcatgccacatatttgctaatcctagttccatcggtaactcgttactaaatatcagttgtatactgtctagaattggatatcagtacaatccaacagattagcgacgaatattttttctatcaatatgatgtcgagaaattaccaacggatgatcttttcaggaaatatgtcggtaatttccctatttacatatatatagtgaatgtatgatgtagcattctattgaatgattctaagtccgcctaacatccacaaagcatagtatatgatatgactcaagaaaatgctgaaatggtttgcatatttttatgtgaattgtttttttccctatttactaaatctctttttgtttatgtatttcatgtagtataaatataattatgtatattatttgattatggaaaatttattgacagtcgattatgtgtcgactatacatgttatagatgcacgacgtttgatcatcgtctgactaacacatctatatcactttaaaatgttgtaaagaattttagttttcaacaaaagattccaataaaatgaataaaaataaacacctttcatcggccctcgtggtcatttgaaaagaaactacaagagtttagatccagctatatatataatgggtttaaacaatgaattctgatcttaaaatagttatcgatttaattaggattaagttaagtaaagaaggaataatatggaggagaagaaggggacaagcgaggaggcaagctaatgcacatgcaagagaacagttttgtctcttctaaatctcaccataaggttacagcagagagatcattgaaacactaaaactaatactctcttttaaattctcttgtttcattaattaacacgttcgtgtgtgtcagttccaacttaacctcggtacgaccaaagatggccacatttcttgtttagaaaaccacatcaattaaaagtgtttaggaaattggcaaagatgaccattgaaatgatttttgccacgattaatttccattttttagttgcaatttggtttatgaaattatattgttaattttttatttttttgatcaaactgtaaacttcattgctagaaattaa

SEQ ID NO: 13099 - DNA, 3000 bp, Unknown
  misc_feature (1)..( 3000): cDNA_ID_2710454_gDNA_ID_2214598_Annot_ID_186950 3000 nt of promoter + ATG
cgaagtggatcttctttacagttttttgtaacacaacctcctcattctcatcttctggtggctttgatacaatttcttccggaagcgccgccaccttctcgaaatcttgataggttcttgatttctctggtaacgcttgaagattacttttgcggaaggatgctttggatttcaaaaggcatcgaatctttgtgaagaagttgagcttcatgtattgaagttgccaaactgaagaagaagaggattgtgttcgagaggaagacataatggatagatgatttgatgttctgtttcttttagtggacttcgctcgtcatatatatatcgacctattgatatttgtccaactttaggtatttatggggccaataaggtataggcctaatgccggtaagatttttagaaaaatataattttaaagtaaacaaatgatgtacgttttgtatcgcataactaataatcttttactatatacttcatgtgtcctaaaactcaggcaaggcctaagcttctttatcttttcattttttcaatcaccaccataaaaagcatttggttatatagatccactacttaataaaaatggtgtttcgacgaaaaaaaaaaatgtagatccaatccgtcgataattcaatttataaccattttaccaacatcctaaatttcgttggtatactatattatccatcgtagataatttcaaaactatttaccaatgtcactttgccggtaatagatgttggtaatacgtcaaaatatgtttggatgtactattgctaacatttaaatgtaacgtcaatagtcgttgcatgccacatatttgctaatcctagttccatcggtaactcgttactaaatatcagttgtatactgtctagaattggatatcagtacaatccaacagattagcgacgaatattttttctatcaatatgatgtcgagaaattaccaacggatgatcttttcaggaaatatgtcggtaatttccctatttacatatatatagtgaatgtatgatgtagcattctattgaatgattctaagtccgcctaacatccacaaagcatagtatatgatatgactcaagaaaatgctgaaatggtttgcatatttttatgtgaattgtttttttccctatttactaaatctctttttgtttatgtatttcatgtagtataaatataattatgtatattatttgattatggaaaatttattgacagtcgattatgtgtcgactatacatgttatagatgcacgacgtttgatcatcgtctgactaacacatctatatcactttaaaatgttgtaaagaattttagttttcaacaaaagattccaataaaatgaataaaaataaacacctttcatcggccctcgtggtcatttgaaaagaaactacaagagtttagatccagctatatatataatgggtttaaacaatgaattctgatcttaaaatagttatcgatttaattaggattaagttaagtaaagaaggaataatatggaggagaagaaggggacaagcgaggaggcaagctaatgcacatgcaagagaacagttttgtctcttctaaatctcaccataaggttacagcagagagatcattgaaacactaaaactaatactctcttttaaattctcttgtttcattaattaacacgttcgtgtgtgtcagttccaacttaacctcggtacgaccaaagatggccacatttcttgtttagaaaaccacatcaattaaaagtgtttaggaaattggcaaagatgaccattgaaatgatttttgccacgattaatttccattttttagttgcaatttggtttatgaaattatattgttaattttttatttttttgatcaaactgtaaacttcattgctagaaattaaatggtttttacatcagagaagtccaaagaaaacagagcctctttggctaaagcatccgctgagagatttggtaaacgaaaaatacaacagaatttgaaagatagaagtgaacgacacaaacaggtgatgtcatgaagacatctaacagaatttctttatataggccaatttaaaagtgtttggcaatttctttattgcgtataaaggcaactaggtacgttactcgtatttcggaggtgcttaaagtaaactagggtcaagtcagtgaccttgatacttcgtttttatgagaaatgttgatgtccaacattgtaatgatataaagtcctacaatcttcagcataaagatctatgtaaggctcgtgttctatagtatgaacacctagacagtttgtttcgaagaaaattggatcatgatcaaagaattgcaaatgaatgagtagactatataaactagtcatagggtacccgaggattcgaattctatatcaacaagctcatcactcacgaggagcggacttaacttgtttggactcaacagcgttgtgattctttaaatatcctaatatcatgtgattttttaaaatgtcttccaaattgtttagaagcaaactatgtacttgtgtaaattaaacgcgttagaaacatatgttatcgatatcaatttctagttcaagataaataaattgtagaaccgtggttggaatcgtatcatcagaaggaaaaagaaacatagatacattaataagtctttcaagtagtgattcccacgtcctacattactctttaaccatttttcttcaccgccacacaatttctccacaacatcttgtgaacgtgtaaacccgtttcgtcgctggcaatgaaaatcacattcccatcccttgcttattacgcattgacattgccgagtaaataccccaatcagaagagaagaaggaagaagaagaagaaagtgtgtttagaattttgggtgacgtggctgtgaaggagagatagcgcgagtgagaagacgcggaaagcccgaactctcgcggttcggcagctccgcgtcagttggtcgaatcgtcttcgagctatctcgttgcttttcgagagatata

SEQ ID NO: 13100 - DNA, 3000 bp, Unknown
  misc_feature (1)..( 3000): cDNA_ID_3028093_gDNA_ID_2214598_Annot_ID_186948 3000 nt of promoter + ATG
caatgtcataataatcttaaacttcaaatgcaaacacaaacccaaaaataatcatggcaaaggtttcaacccaattcacggtttacattagaaagaagaagaagctgaaccttgcactagggggcttcttgggtacgtcaggctcgaattcagaaggaagaccaagaaaaccatcgaagcgatcgtatgttacatgagccacatgagagatattggttgggcgactaatgtccatggcatgccgttcgttttcctccgccattatatctctcgaaaagcaacgagatagctcgaagacgattcgaccaactgacgcggagctgccgaaccgcgagagttcgggctttccgcgtcttctcactcgcgctatctctccttcacagccacgtcacccaaaattctaaacacactttcttcttcttcttccttcttctcttctgattggggtatttactcggcaatgtcaatgcgtaataagcaagggatgggaatgtgattttcattgccagcgacgaaacgggtttacacgttcacaagatgttgtggagaaattgtgtggcggtgaagaaaaatggttaaagagtaatgtaggacgtgggaatcactacttgaaagacttattaatgtatctatgtttctttttccttctgatgatacgattccaaccacggttctacaatttatttatcttgaactagaaattgatatcgataacatatgtttctaacgcgtttaatttacacaagtacatagtttgcttctaaacaatttggaagacattttaaaaaatcacatgatattaggatatttaaagaatcacaacgctgttgagtccaaacaagttaagtccgctcctcgtgagtgatgagcttgttgatatagaattcgaatcctcgggtaccctatgactagtttatatagtctactcattcatttgcaattctttgatcatgatccaattttcttcgaaacaaactgtctaggtgttcatactatagaacacgagccttacatagatctttatgctgaagattgtaggactttatatcattacaatgttggacatcaacatttctcataaaaacgaagtatcaaggtcactgacttgaccctagtttactttaagcacctccgaaatacgagtaacgtacctagttgcctttatacgcaataaagaaattgccaaacacttttaaattggcctatataaagaaattctgttagatgtcttcatgacatcacctgtttgtgtcgttcacttctatctttcaaattctgttgtatttttcgtttaccaaatctctcagcggatgctttagccaaagaggctctgttttctttggacttctctgatgtaaaaaccatttaatttctagcaatgaagtttacagtttgatcaaaaaaataaaaaattaacaatataatttcataaaccaaattgcaactaaaaaatggaaattaatcgtggcaaaaatcatttcaatggtcatctttgccaatttcctaaacacttttaattgatgtggttttctaaacaagaaatgtggccatctttggtcgtaccgaggttaagttggaactgacacacacgaacgtgttaattaatgaaacaagagaatttaaaagagagtattagttttagtgtttcaatgatctctctgctgtaaccttatggtgagatttagaagagacaaaactgttctcttgcatgtgcattagcttgcctcctcgcttgtccccttcttctcctccatattattccttctttacttaacttaatcctaattaaatcgataactattttaagatcagaattcattgtttaaacccattatatatatagctggatctaaactcttgtagtttcttttcaaatgaccacgagggccgatgaaaggtgtttatttttattcattttattggaatcttttgttgaaaactaaaattctttacaacattttaaagtgatatagatgtgttagtcagacgatgatcaaacgtcgtgcatctataacatgtatagtcgacacataatcgactgtcaataaattttccataatcaaataatatacataattatatttatactacatgaaatacataaacaaaaagagatttagtaaatagggaaaaaaacaattcacataaaaatatgcaaaccatttcagcattttcttgagtcatatcatatactatgctttgtggatgttaggcggacttagaatcattcaatagaatgctacatcatacattcactatatatatgtaaatagggaaattaccgacatatttcctgaaaagatcatccgttggtaatttctcgacatcatattgatagaaaaaatattcgtcgctaatctgttggattgtactgatatccaattctagacagtatacaactgatatttagtaacgagttaccgatggaactaggattagcaaatatgtggcatgcaacgactattgacgttacatttaaatgttagcaatagtacatccaaacatattttgacgtattaccaacatctattaccggcaaagtgacattggtaaatagttttgaaattatctacgatggataatatagtataccaacgaaatttaggatgttggtaaaatggttataaattgaattatcgacggattggatctacatttttttttttcgtcgaaacaccatttttattaagtagtggatctatataaccaaatgctttttatggtggtgattgaaaaaatgaaaagataaagaagcttaggccttgcctgagttttaggacacatgaagtatatagtaaaagattattagttatgcgatacaaaacgtacatcatttgtttactttaaaattatatttttctaaaaatcttaccggcattaggcctataccttattggccccataaatacctaaagttggacaaatatcaataggtcgatatatatatgacgagcgaagtccactaaaagaaacagaacatcaaatcatctatccattatg

SEQ ID NO: 13101 - DNA, 3000 bp, Unknown
  misc_feature (1)..( 3000): cDNA_ID_1025971_gDNA_ID_2214598_Annot_ID_135502 3000 nt of promoter + ATG
ttgcaagtttctacctgcaggaagtacagaaagagaacttagtctgtcaacaggtattccaagccatgtgatccgacaatcaatttgaatgaccaaggaagtaggaaacaggaaacaagatgttaaaaaatgaccataccggagccaaaaattgtaacaagggcatgacatcctcaagttctagcgataagctgctctccccatcagggggaatgaatacattctttacaactggtataggtccttgaacatcatacagtcctattttgtgactgaacgtaacaagaccaaaaagagcccctggacttagagctgcatatacgaaaaaacgagagaattgttttcctcaggacacagtcacacagaagaaaaagtaaatccttgctttaaatttggtatgaaacgaccttccagagcggctagcaatgcactttttgtaagctccaaaaattcctcagaagctgcagataacaaaaataatcatgagcaaaaagtgcaacatttgaacaaaattcgaaacaaatttactgctaccacaccctatctccaaagtcatgacaaaatcacaacataagcaagccaaaaatcgataagaacaacaaaaaagcatacaaacccaagctagaatcataatccatagcaaaatgacacacacattgctttcaaaattcacaatccaaagttcactaacacacaattcaagtacaatctacactgatcacaatgagcttcgaacacaatatagaagaaataagccttacaagagatatcaatcgccgcaacatacacaggtcgtgcttgcgtcatctcttcctccgatccatccactagaaaaacaaacaattaatcagaaattagaaccaattccaacaaaaaaaacaaaagaatcagtatagagatgacgtaagacatacgaggcatctcaagatcaatgaaggaggaagtcatttcaggtatagagtgaggattagagtaacgagcaatagcatcagaaggaagtccattgagagttccacaaagcgagcaattccaagcccattgatcaagctcacaataggtattgaagtaagcgtagcagttttcgcaacgaggaagaagatgaccgttagatccgcacgctggtccgattccgttctcgtctttggccgcgaatggtgttactgtcagtccccaaggaagtcctgacgcctcttgagcgtctgaatcgatcggaaaacgcgacaccgttgctctcactgccattgtttcagatcagatccttccaaatgtgaaaattttgattctggttttaaggttttcggagatttggtgaaattggatgagcacggtggaaattaggcgcacgttagcttttccagtaaaattcgtctccagcgcacgttagcttttgtgaacgtcttttttttttggaagtttttttttccaacatcaaagaggccaatgatttaaaggtggaagtagtgatggtactacatatgtataaacatggagtgatgcaacaactcaagtataagaccatcatcgcgaagattaaagacctgaggaaattcactatattttgttcttctagagagctcgaacttaaaagatatattatactctatgtttactcgggggataacgtcaatatggtgtcaatgtagacatcaaagagtttgaagatcaagtacaagactcctcaattaagtatcttgttggatcactgaatattgttataccttctagttttctaggtaagagattgtttagtcgaatacagattttattgatgaagaaaagaaagtgattatgtattgtgggagatgcgaggatttcacggagaacatgatgtacattattggaaggcatggttgcagaaaattcgattattgtacaaaccaattgaaatattgtccctggtttctcttcagttattatgtctctggtttctcttcagttattatgttctaagtgattatgttccaagtttagttattttaaatccaccaatgtaacttttacccaccaacacttattttgtatcaacttgtttatgtcttgtgcatatagtagataagtgtagaagaatctaaaataagaccatacaaggattaggatccctcattcataaaacatctaaaatgttccaactcaatttggggttttacgtctgcgtttgcgtttgcgtttgcgtttgtgaacgcctttattcgattttggaaaagaaaaaatgttctgttctattttgttctctctgctagtcacagtcaaatgagtcagctaccttatattcgattttgagcgtccttaaattccttcactgtgagaaaaaacacagagaaagagagagaaacaatggaaacggaaggaagaagacgagaagtggttgtttcatctctccaattcgcttgctccgacgatatctccaccaatgtcgccgccgctgagcggttcgtctctctctcttcctccctccctctctctaattatcaatctctcccatcttcctcctccttcaaatttccatatgcgtataagcttctcgagcaatttattgtgatcacggacctttggaatcgaactattcaatttcaagctctgatatagattcccccgttcgaatccgatttcagtatctgagaatggaattgtttacattttacgcagattagtcagagaagctcacgctaaaggagctaatatcattcttattcaggtcattgttgctcttcgaaattgtttctcagatttataagtgtttttgattgatctagtatccaatcgtcttagctagtcttatgtagtttagtttctgtataacaggaactttttgaaggatattacttctgtcaagcacaaagagaagacttctttaagcgagccaagccttacaagaaccatcctaccattgcaaggtgtgacattgcttatccgatttctaacgcagtaaagtggaatctcgatgtatctatgtactatctagtgttttaatggttggatggtttaatttaacacaggatg

SEQ ID NO: 13102 - DNA, 3000 bp, Unknown
  misc_feature (1)..( 3000): cDNA_ID_2710444_gDNA_ID_2214598_Annot_ID_135505 3000 nt of promoter + ATG
aacagcacaatacaacgatgcctttaaccttgtccaatacaaaaacggaaataagtcaatgagttctcagattgatatcacgttttcacaatgtcctcaacttgagcctttgcctcgtttagtctttgccttactccgtaatccccttctccggtttcatgaagaaggtgttcatcctgattacagaatctacttgcaatgccttttcaggtaaccatcccaatgaactactaataaccaacctagagtcagcgtgaacaatattgtatatttagtgtattttttcgatcgtggatttatttggaaaaaataccttggtatctcatgtaaacagaccacaagcaaggctttagtctctaaatttcgtgtttgtgttcttctgttttgttttccttaaaactgcagtgtgttggacccgagctctcttcattgcggcatttacccagcactaatgtcatattcaacaccggatacactggcatatccgcgtcattcgttgagccgtgcagcattgataacaagtggtagtccgatatttttcctagatgcatataccactttgatagtcttctactcatcaacagcagacccgtcaatacctttccctccacctcaagactgtaagttttctcaccaaatgaaatccagttcaaccacctttagatctttgagactatgttgattcgaaaacttatatcttacaggtttattgaggcagaccataaataaagtgaagcaagaaaggagcatcacaccaaaactagtgtttatccgaggaggacgagacgatgctactgtctttgagaactatcttatagaagaacaagatgtggacggtaatggttttgctagcgccatgggtttcgtgtctttcctcgatgatatttcgcagcgtgtcactgaatacatgaagtgaaagccaaatgaccctctagtttattatacatccaaactcaaaattttcaactgtgtcagagttttactcttcttgttgtaacatttgctttagactagcatcccaacttttttgctctcttaatcaaaatgaataattaagctaaaattttgttgcaaaacttcattttctaaactttgacttacatatttggtaacactagagccaaagagcaaaaagatatgttagtctattacatgctcatggccacaaccactgcttcaagcttacaagctaatctccaacataaacctgaaaacatgttcttagcaaaaatataaccttgagttcattcatcttcttcatcactctctacctcttcaccacttccacttacgctcccgtcctcgttctcattatcttcaccaaccccgctcccattttcttccatgctatggtcctcattcccgctctcttcgctctcattcccattctcttccatgctgttttcctcatcctccttctcgttctcctcatcattcccattctcttccgtattttcatcgtcgttctcctcatcattcccattctcttctgtattttcatcgtcattctcatcttcctcatcgtttccattctcatcctcctcatcgtttccattctcttcttccgtgttgtcattctcagtctcctcgtcattcctcttagtttcctcatctattttgcttttccttgcacccttttgcgtagatggttcttcctgtttcctcttcttcgtctctttgggcttcgaagcagttccacttgaagatttcaaagcagctccaccagcaggatacgaagcagctgcagcacccgcctttttccccgcattcttcttcttaaaatctgaaaaccagtcatgtggattacactaggattgacatcataagctcaaagtgcacacacctaggccagtgtccataacaagacaaatcacaacctaagccatttctactaacactccatgaaagtaacaacagatagtgacaataggatcttcatccgaacaaaacacttaccttcaagagaagatttaagcggctccaaaaattctgaaaaatccatttcttctaatgccttaaacacatcatcagccttcatagtttgtcttcttgcatctttacaaaaatcatttgccctatatcattcacccccaaattaaactaaatccatcaattcgatcgatcacaattcacaaacactaacattcatcaattgaatcacattaacataaacccaaacttggaacattccaaatcattcactatcatagtgcagaaattcgaaaaaaagttagggtttgtgaagtgtacatacgtggcggagaggtagtggatgaagatcctcgcactctctgagaatgcgagcaaagcttccttgtgaatactgacgtcataatccggcgaacactccgacagcttcttcttcaccacccggcgcacaatagctagcggcagctcgtccaccaccactttctccgactccattcttctctcctctctctcagtcgccgtctttcccgcctttatgttaataatacaacaaaacacatcggcccagtaagctgatcagcctattaaaatatttaaaagcccatattcaagtttataagcactaaagagttatgaccacgccgctcaatattacccgttggattgattgacaaaatcctagccgtcaaatcgtactagcaaatcggcccattattcaaattgataagcactaaagagttatgagcacgttgtcaatctcaccgttggataacctttattaaatcttcaccgtccaatcgtaatactaataaattcgatcaaaacacgaataagaatcggagtcgtcttcaacctctggaatttgagacatcttcgaataaccagattctccgaattcgagccatttctaagaatttcatactctgattaatgtcttactcaaacgcctacgcaccgtcggcaccggagctaccagaatcgttcgttcagcagcagcacgatggtgaaagtagatacacttacgcgtatccatcatatcaaccaactcagcaattcagctcttactccggg

SEQ ID NO: 13103 - DNA, 3000 bp, Unknown
  misc_feature (1)..( 3000): cDNA_ID_2710462_gDNA_ID_2214598_Annot_ID_135507 3000 nt of promoter + ATG
cattagccagagaaattcccatctcttcgacaaaacgctcgtcttaacggaatcgcctgtcggaagtttaaggtatgagagtatccgagctaccatgaatgcatcagaatctaatcaaaattcatcactcttgattctccacctttgacataagcatcctgttctttgagtgctctccaagtaatttcctgacttcgattaggtcagatccttcgcgaacaagtcaataaagcatgtcttatatgcaatcaatgaaaaatacaactcacatttaagactatattagattagcatataaaagttacaaaatggagcacaagctttaatatatatagaaggcattagcgatttttttttgcaacaaaattgtaaattattttaagcaattttagtggagctcatatagattattttcagtggaacgcgtggtcatgactagatgattccctcttgcccataatagttcaccacatatctcatcatgtccatcaaaatcatactaattttagattttatatgtatttttaaatattagttcgtatgaaactatctgttaaattctttacattgagtgaaattataaacacatctttactacacacaaaaaaaaatcaattgaaacacatgaatatattcgattatttgagatagaaatttaaaaagcacgtgagtggatcaggcgttgaaggcggcgaggttaggaagggcaggtgacagtaacagagaaaggcggtgatcgagacatggccggtctctgtggttcacgcttccttaacgaatcacgacgctacatgttaaattcctcatattttagttaactttctgatttttttattatgaataatttctaacccaaaaaaactgtttactagattttttaataattaaatgtgataaaaaatgttggtgaaagatataagtgggcagtaccgaatattggacaaataatatcagagtgctaaaggacaaccacatttttttttttttttttttttttttgatttagagctggtacgtcgacatagaaatatatgattttgaaaagtaactttttaaaattatgtttttaccaaataaagatagtttcatagttaattttgaaactggaaaaagtaatctgataaccctaataaagatattaaatgttacaagtcactataacactatcgtttaattagttcattttctttccaatcacctcaaaactctaaaaaatgtattttgaactaaactttagaaagttaaaagacagtatactgatgttttttttttttctcttttggtgagaagtatatactgatgttttaagtaacctcgattgtgttttctttggtagatgtttatttactcctcgcaactgatcttcaaggatgtatataaataagaaaaagcaaaaacagagaattatggatgcttaaaattttttgacgaagaacaaagtagagttaaataaagaattaaaaaaaaaaaaagagaattataatccttgattagagaaaagattgatccaacatgcaaaacaccatacacgtaaaaatctggtggagagggtccacacgtttgacaactcaagttctaaagagacgtacgtgtgctatttcattacttgtaaactttagaaacattgacgatcaaagtaaagaatcctaacaatcatacatactacatgatacaagaaaacaaatattgcataacttgtctctttctgtcttcgatctaatatgcaaattgcaacttgataaacttataaaactagaatatgatttgtgcgtgtgaatcgtgaaatttgcttttgtttgaagccgccagtggtcatggagtgtttgaattgaagaccagttggggaagagtttaaaagttgaccattctcactcccaatatttaaccatcgttgttcatattttaataatgtttcgtcacacgtccacatgtgaaccaaaagggaacgttactttccatgtcggtaaatctcctgatattttttagaaaataaaatatctaaatgtcacgtaggaattgaaatcatattatataacccacttgtatattaatgactgcaataactgaaatgacgaaaaatcaacttcccgtatcagttttttatttctccaaaagagaggtcaaaaattgtaacgtaaattgacgtaaggaaaacaatcattacaagtgacgtttcgttgtaggtgaaatttaatagtatataaactatttgacattagaatattcaaggtatggaaggtagagaagtagaacagcttggatttacattatttgtatccataaatctaactaaacctactacttattcctcctctttgattaacatacatgtaatttaaagaaaccagccaaattcgttatatatagttgagctgtaaagggcataaagtaaaatcaaaatcatacatatttaactacacttttaggcaattgataaagcacattattttatatctataataagtttataaccaaaaataatagtaaaactcgatgtcgatagtttaacgacttacgggtgtactaagtaaacatccaaaaaaaaaaaaagtttttatttcattaaatgatcgattgaaaaaaaaaaaataaatagattctagattaaaaacttttttgttagaaaaaaaattcctaatgaattaccaattactattgggttatcttcttattggattctctttatttatttttcttgtaccaaaaaagaaatatgtcaaacttgataccaaaaaaggaagaaaaaaacaaataaaatatgtaatgtatgtaatataggaatataagtttaggcataggtatatgcattaatgagagacacctggttagagctatttgacgaacgcggaaagcaagaaacgaagaaagaacagttgaaactttccaaattccaccgtctcttatatattcttaataccaaaaactaaaactcaaaaggaaaaaagaaaaagaagaagaggagctaaaaaaacgacgtcgtagaaggagattcttgccatg

SEQ ID NO: 13104 - DNA, 3000 bp, Unknown
  misc_feature (1)..( 3000): cDNA_ID_2710515_gDNA_ID_2214599_Annot_ID_135513 3000 nt of promoter + ATG
ttcagctttactttaaagataagcctacatgaaccctagatttttcctttgcattaacatgaaccccatattttttaaatttgaacaaaagggaaaaacaaaaagaggaaaaagaataatgaaaagcttatggttatttattttaaatggctgttttatcaaaaagttgagctttaatgggccggtatgggcctttttcccaattagaaattcggtcgagctttgatgggccgatatatgggccctttcccaacgcttaacgccacagttgcaatatataatgtttgctagggtttcaaaggaagaagaagatataaacaaactcttggtggcggtgagaaaaaaccatcagggctcatgatcgatattctctgaactagagaagccagtgagcgattcagtttccattattactatcaaagcttcgtactttttgttttcgtcgcatgatgtcttgtagttttcttgttaattgatagaattctattcattgaattaagtaaagttgtgcttttttagctttttctctttgtgctttgcaaagtcttaacctttcttatgttttgttagtatttgtgaacttgggtttagataaagagccagtgatgattgaaaaagattgtctacattgtttgatgtaccactgaaatgaattctttaattagtctgaggctcattgctccttcaattttcctgtctgagatttgtatctctctttgccattgttgcagctttaaggcctatgatgattcaaattttgcctacattgtttgataaaccaatgatataacttgtacaaaatgttttctgaggcctttagtgttgtttacttagagaatttgattatgatttttgacggtgtgaggctggtgatgatgtttcatatctttgcctacattgcctgatcaaagctatttttggctttgaacaagtgagtgaatgataaacttctgaagcctcatgagtttactattgttaattttgcctaggaggagtgctagttttgttgtagtgtagagattttatatgctctatgttgttgtctccaacgaaatccgtgaacttgtttaaatcttaccatcttagttatttcgtagtcgtttggttgtcatacctgaaatctgtagcaatatctataataaacgaactcgtatgtcaaatcatggaaaatggtttagaatgaatcttttgcttgtggaaatactggatttggtttcgaccacacaaagaaactctaattccttgttcatgatttggtaatacttccatctctttgtcttaacaatatgtagaggaagaaggatcacaactgagaattcaagccttggcctctcctctcctactggaattttatttggatgtgtcatgtttccatttaacttgtattgtatgttgggtaaatttcttgtatttagaagagccacaagaaaatttggttctgactaatgattgtatgctattttgaacttgttccaaccacattgtaatttggggctcagttccatgatttccctatcattttacttggaacattatctgcttttcccactatttaacaaatgtcttgagtgttgttgaccatacgccatttctcacatccaaaacacaatgacataaacatgacagacggggctctagcagtgaatcaatctataagattagctcacgttctctaagcccaataacatacaaatcaaggcccaatctaataagtgtaatccaacgtgactcagaagtcagaacatccttgctagttactatagttgctacttgctgcgtgtccatttgtcatttgtaaaattgtccttgtacgccaagctaacctttatttgcttaacaagtaggaagatagattttagcttgacctccaaggcagttctacaaatgacaaatggaaaggaagagtcaaacttggtggtttatgatcaactttgttatctttcgtttactttgaatacatgcaacataatccataaaatcgataaaattttcatggtaatatactaatattggaagttagagtttactgatgtataaacaaagagtgtttaatatgtgtgtttagaaattttatttatgcatgatagccataacaatataatttatacaagatactagacgtaagagaattactaatttactaagttgaagatttgatagtaaaaactgagccgccatcatcatccccttgtcgtttgaagtctcttgcccataaacgacaaagactttttgttactcctcgtgtgattttatctttaaaacattggaaaaaaatgctgaattgtgaaatcgaatcaccggtttaagcactcattaaagacattaaaccaaggaactaattgtaccggagtcggttaaacagtttcaagtgtttgttataaaaagccgtgttcggtgattctgtattcatgagattataaacatggcgttttacctctcttcttagtcctctatctttctctgcttcttgttgcattcttgttcttgcgtagtaacacgatcattcatatattcatattcatctacgaagtttttcgattgtgtcagttgtgtgttttgttgattattgtgtgtagttttttcattttgatcttgctgcataaagaaagggcctatgatggattcaaattagctgacatcgtttgagaaacccaatgatgacgaacttcttacaataatatattctgaggcctatagttttttttgtttttccttataaaatcatattcgtatttgagaaggctttgtgttcataatcttttttgcttacaatatttccattgtacatgtttaattgcatttacttatatgaattatggattaatcaaagactggtaagtacgtttaatttttttttgtagtgggagactcaaaccggatttctctaattcgaatccggttaagtgtcgtcgtatagtggacttggacagagacagagaagacctagggtttgttttgtcgtgtgtctgggaattgtggtctctctttggcttgagcatg

SEQ ID NO: 13105 - DNA, 3000 bp, Unknown
  misc_feature (1)..( 3000): cDNA_ID_2710527_gDNA_ID_2214599_Annot_ID_135519 3000 nt of promoter + ATG
taaccgaagaagatgatgatgatgatgatgaaaggaacattctctggcctattgctctgcataccaaagcgctttactctatcctcgtcttgcctttggttgagccaaaggagatgaaggattacgtcaagctttgtaggagatctgattgtggaccagctgttggtgaagatttgagtttatcatctctcttgcttaacatttcatccattacagggtacttatagctccttaagggcaatgcttttgatttaagagtgatgttcaactccttgatggatgcacttgtcttgtcactcatgttgtagggcttttatggtggctcatgcatttggtgacatcatttctggtgatacagtggaacctgaggttgttgtaagtgtgtcaccatcagttggggggttgtttgattcactaactggaagcattggtatctcatcgagggctaaacctgtagctgcacctgttgcatcatctaacccgtctggagctgcaataactggagctacagcatcggatgctcccaaagcagggtcaagattactggatagagatttacttagaaactttattgctactgctatgccgtttggttagtattttccctctttcatatatggtatattctgttacctggtagactttgtttcctgattgatgtgctatcaaaccctgaaatcttttgatcacttctgcaggtaccccattagacctcagcttgtctaatatatctgctatgaaagcgaatggtttttcctctgctgatcctcctccccaagaacttaagcaaccagcatggaagccatacctgtacaaaggaaagcaaaggctattgttcacaattcatgagaccgttagcgctgcaatgtacgaccgcgatgagattcctgataatgtatctgttgcgggacagataaactgtcgggcagaactagaagggctgcctgatgtgtcgtttcctctagcagggctgagtacagcccatatcgaagctatatctttccatccatgtgcccaagttccagcacatgggattgacaagcagaacattgttttccagcctcccttgggtaactttgttctcatgcgataccaggcaggttgtggactcggaccaccagtgaaagggttctatcagctatcaatggtttcagaagacgagggtgcattcctcttcaaggtgcacctcatggaaggttacaaggctcctctgtcaatggaattttgcactattactatgccctttccacggagacggatagtggcatttgatgggactccgtcagctgggactgttttaaccacagaacactctgttgagtggaggattctgggcagcggacgtagtctttctgggaaaagccttgaggcaactttccctgggacaatcaagtttagtccattgcagagcagaagaaaaggggatggggatgatgaagagagtgaggatgagagcgctgagaatgtggtgaacgtggaggacttcttggtgcagaaaatgaacaaggatctcccagcagctgagttggaggaaccgttctgctggcaagcctatgactatgccaaggtatgtatgtctttggcttccttttgaaatcttttggacttggttgttgttcaaatctatcttctggtttacaggtctcgttcaagattgtcggggcatctgtatctcgaatgtcaatcgacacaaaatcagtaagctttcgcaacttgcaatgattagttaacagtgttagcccatattatcgacttattatggcctccttttgttttactaggtcaatatctacccaaccacaaagtcaccggttgagttttctgctcaggtaagacactgccaacaatatatagtgtataaatattgaagtgcacaggaaacgtttgaaccggattggataaaactctaaaggcgctctacatgatatgtgcgtaaacaggtgacttcaggggattatatattgtggaacacattggggaaagctccatcagcagccgtcgtgtgatttccccaagtcgcagcctcactggtattgtattttcccatcccaaggaagtgatttatttgtttgagtttgaaagcattaaacgtatgaatgagcagtttgatttttacagcggaagtgtatctgtacattattgttgtttcttgagagataaagaaagatgaatgttgttttagttgcaaatctgtctggaatggaacatgtgataataaaactcgtaaggtggttgtgttcatgaagttgccactgtttcataattagtctacaagcctaagaaagaaattgctctatatagagaatgctatctagatatagtatatatccagctcataaaggagattataatccaaggtttgcagcaatatgaggtctgtattttatgaaattacaaaattagaagaaaaatatcaatcaatttaaagattgttgttgccacgtcaatgacactgtctctgtagttccaatgagcttggaataaccaccgacagatctcattcatagggagcaagctgccattggaggttaattccatttttttcataataaaggttaactgtccaaactcgaaaccctgatttatttagttttcaataaatgttttcatgccttttaagagtgtgtgctaagctaacagatgagctgttattaccttgaaaactctaatctatcttaatttaataagttcttaaatatctttccaactttttttacgctttaagaaaagaaaaaaaatcctatttcttgaaacgtaatgttaatggaaggagtcaagttgtcttttgaaaattggattacctcattagaaaattccaccaatttggtcaaatagagacgatgagatttctaagaagtctctccggttcagatctggtcatctaaagcccttcttccgagatctacgactttcttcctcaagtcgttgtctgaattctctttttttccgaaaacagacaccacctgagtctgctgtctgaagcctcggcggagggagatg

SEQ ID NO: 13106 - DNA, 3000 bp, Unknown
  misc_feature (1)..( 3000): cDNA_ID_3028184_gDNA_ID_2214599_Annot_ID_135520 3000 nt of promoter + ATG
actttttcctcttcactcctctcttgccaagtgtcaccaatggtactgtcgaagcccgtagcattgttgaacccattcgtggtcttatgcgcaagaaaggatttgagtacaaagaagcagagtgtgtcaagattgatgcatcgaacaagaaaatccactgccggtccaaggaagggtcaagtcttaagggcacaacagagtttgacatggattatgacattctcatcttagctgttggtgctaagcctaacacattcaacacccctggagttgaggaacatgcctatttcctcaaagaagcagaggatgctctaaacattcgtcattcagtcatcgactgtttcgagagagcctctcttccgaatctaactgaagaagagaggaaaaagattctgcatttcgttgtggttggtggaggaccaactggagtcgagttctctgcagagcttcatgatttcctagtccaggatgtggctaagatttacccaaaggtccaagagttcacaaaaatcactcttcttgaagcaggcgaccacattctcaacatgtaagttccacccatcaagcttcattaactttggctaaatctactgcttttccaatgttggttcaattctacttcaggtttgacaagagaatcactgcttttgctgaggaaaagttccagcgagatggtattgatctgaagacaggttcaatggttgtgggagtgactgctgatgagatatccacaaaggaaagagaaactggcaagattgtctccgaaccttatggtatggttgtgtggtcaacaggaattggttcacgtcctgtcatcaaagactttatgcagcagattggtcaggttagattacacttgatcacatgaagaaatcatttgactaaccaaatcatttgctagtgtcccacctaactagattgagtatggttacagggacagagacgtgtcttggctaccgacgaatggcttagagtagagggatgtgacggtgtctatgctttaggtgacactgcaacgatcaaccaacgcagagtcatggtatcatctctcttgacattgttcctttgtgtcacatctcagttgatgaatgaatctttaaccttctgttttgtcttgatgttgttgaacaaacaggaagatatagctgcgattttcaacaaagcagacaagggaaacacaggaactttgaagaagaaagatttcaatagtgtggttaaagacatttgccagaggtaccctcaggtggagctctacttgaagaagaataagctgaagaacattgcaaacttgctcaagagtgcaaatggtgaggacacacaagtgaatatcgaaaagtttaagcaagctctctctgaggttgattcacagatgaagaaccttccagcaactgcacaggtaagcttgttatagatcaaaacaagatgaaatcaatccaccacacagattttgatgttttgattcttatacaggttgcatcacaacaagggaagtaccttgcaaagtgcttcaacaaaatggagaaatgtgagaagaagccagagggaccattgaggttcagaggagagggtcgacatcggttccagccattcaggtacagacattttggatcgtttgctccactgggaggggaacagacagcagctgaactgccaggagattgggtctccattggacacagcagccagtggctttggtactctgtctacgccagcaaactggtgagctggcgcacaaggatgctcgtcatctctgattggactcgacgctttgtctttggccgtgactctagcagcatctaagccattcttctccatcatttttttgttctccttttttctacggtttcctttaaatcttcccgctagtttgttgtcttttaaaatcagatgatgatgactatacatgtcattcctatattttctcaatcacatgaacttttgattcttgaacaaggacaagcatatttctaatttaattcataacaaagagttcccttctcatacatgactcttcctctcccctcgatcgctacatcttcgatctcaacttcttcgatcgataagccttaaaaggatttctatggtaaatttaagctcaagtcagagcgattcaccaaaacccctagaagaagcaatttgaaaagtagggttgaaggatttgaccgttggtggaatccaggccattagatttggggactcttggaccttttctcagtcgtaaaacatatggcccattaaacttttaagaagacccaaacattcggcccatcatcgtttagatactccgtcggagtcttcttcttcgtcatcgtcccaaaaccaaccagaacggctctgtgatcggaaccgccgtatacatcaattcaactacgtatgtgccttcgtcccttagcttagccagattcatcactggggatttcatcagcagccgtacaattatgccctctggttgcagtatcagagctctctggatcatcaacaatcaagacactgttgttttctccaggtttcaaatttcttctataaacccaaatctcactcattccaatttctactcttaatttgtatgcaaaatcaggaggtttccggtcgtcgagaagcaatggtgctccgcttacaagacggagaacgaaaacactggattagatcttcctagacttcccactgatcaacaaatctccgattcttttactcgaagaaagagacggtacaacactttctcttgtttagcttaattagattttctggaaatgtaaaattgaatttcgaatccgaattagggaaggctctactcgtggatatggtatacgtgttgctcaatccaccaaaggatcggattcttgggttgatgatcccatcactcgtcatattatcagcctttgcttaaccgaagaagatgatgatgatgatgatgaaaggaacattctctggcctattgctctgcataccaaagcgctttactctatcctcgtcttgcctttggttgagccaaaggagatg

SEQ ID NO: 13107 - DNA, 3000 bp, Unknown
  misc_feature (1)..( 3000): cDNA_ID_2710531_gDNA_ID_2214599_Annot_ID_135521 3000 nt of promoter + ATG
cacagaaatggtagagactgttatccgtgagtttcgaatcaacacgactcctttccttaagagttctctgtaagtctaaattctgaaaccattcggtagtgagacgaacaccaagacagtaaagactcttaggcacttcctcagcagcaatctgtccatacttggaactcttctcgctaacggaactcatttgttcttcaagagcctgaatcgaggccttaagcctcataatcatagtagcactatcatagtgaagctgctgagcttgatataacaaaacagccatgtcacgaatagtagactcagattccaagacagtcaagggacttctcctagtagcagcactcgataaaagcaactgagagttacggatctgagcacttaagtcccaagcaaactgaagattcttactttctttagcaatgacaacaaaagctttagcaagagcaatctgatcattaacttgacgagcaacggaagtaggactcaacatttcctcagtcatattcataccctctacaaatttgtcattacggtaacgtcgctgcacaaaagaaagggttcgaatttagcaattgaaatcgaacaaaagaagagatctttgagattgaatataccttaggaatagagggtctaggttcaatatgaccagctttggagagaatgagaaagaagagcaggagggcaataccagagagaacccaccataccacattcgagatcttcctccgtccagctctccggaaactatcccctcctctccttctcatagttactgtactcgcagagctgtgtaaaacccagatcttataaatgaatgatgatggtggaagtattcggatctgagaattttgtcgggagaagcaaaaatagctcaaccgaccatcttctttctcttcgctgcaaaaaacctcgaattcacccttctttgagaatcaagtaactatttttttttgtaagagagtgttaaaagacatatctaccctcttttggctttcaatttctctaagctagtttggactttggaactatataaattttggtcttcaagccaaaaaactacataacaaagccaaaaacttcatccacactaatccgagccaattttccccactttggagtagctctgggcatgtcggtattcaggtcaggttcggatcaaatttttcggattggagtttttcgggtttagaaattttggattttttttctttccatatttagaaattttggatatgttgggttatacgtacaattttgaattgggttcggtttgggttcacttctaatacaagtaattcgggtattggttaaaaacccatacataaccaaaattattttgggtttgagtattacttacccaaacattgtccaattatacccaaacatatattaaaatatccataaaaccccaaagatctaaaattataacaaatttttccttaagaaaataatataaaacaagaagtaaaccttgttttgagctcgttccataactcaaatcattaaacaagtcacaaattcaagttattagtgcatatatgtcctcatatgtatatatatgttcaaataataaaaagtactcacatgtatcgggttcggttcggataatacccgatacccacatttatttgaaaacagaatatgatcgggtaattagccgaaaccgaagtataacaagtttggatatttcaggtcgggttcagttcggttctacggattcggatattacgcccagacctaccctggaacatattaaatgtaatattttttccttttttagtgtttaacataatagctcttttattcatgcttaatcttggagctattttgtactatttttgacatttgcttcgtaatcacaatcatcaaattttattttcataagtaagaagctttttcgagacttaaaactcttaagtttttgatcgaagtgcttcaatcatctttgctaacacttcatgaagaaaaccactttttcgcgaatagaactcgaattctataacctgcaaagctttccaactgctcctcgaatatcttcttatcctctaagtcaaggctactcaatccttgttgaggagtaagttcatcaacaccaaaacgctctagtgatctaacaagagaagaattgggaaaagtatctttgtttttaccaagctcaaggttcatagacataactttcttcgatttcacaggtgattcttcaatatctccccaaacaaacttagacaattgaaaagccctgagatcatgaagtctgatatgttcatcaccattcttggctttcacaagattgttctcatactttctctttaaactcgcaagcattttcataaattgaaccttaattaaagacatcaaactaatagttttcttgttaaaaactattaatatcttcaaaagcacttacctcaatatcgtttttgtaatcgataagagtttgtaaaggcacaatctcatagtcttcatgcatatataacataaaaagtttagttatgaattttatgaattgtaacatgcatgtatagaagtgaatgaggtatttattccattcttcttattagctttatcatatacagtattccaaataaaatcagaaatgaaaatcaaaatcgaatccaacagttgttcgaattccaaatatatataataataaaaaatctccagggaacgcggaacataatgtcgcttaaagtctcgagttttgagagaaagtcaaaccctaaacaaatctgctgtttatttactttaaaaaaaaaaaaaaaagaatatacctaaatttacttgggcgttactccaatttcctaaatacctcactgtcttttctttttttcttttttctttaaattttgttttgtgtgtcgccgacctctctctcacgtaccctaaagtagctttgatagtttccatattgcatattctttcacattcgcagcctctcttccaaagctctcagctttgttttcttttggatctgaggtttgagaaatcatcaacatg

SEQ ID NO: 13108 - DNA, 3000 bp, Unknown
  misc_feature (1)..( 3000): cDNA_ID_3028162_gDNA_ID_2214599_Annot_ID_186985 3000 nt of promoter + ATG
tctgatttctcacattcctgttgtaacgtgtacgtagtgttactcgcaattcttgggaatgacttttcggtttcaatgcacaaggaagaaacgtagttgatcgattgattgatttacgcatacttttacgctttcttgtgttcgtatgattgttgggctttgtgaagtgagtgtctctgggaagggtgataacaagtttcagtatgtaattgctttatgttttcgctcattctatgtaatgctttccaattacccagggatctataccctaatttcaattggtcatagcctcaattgtttattaatctcacttacatctttttccatttccagtttagtgcttacatgtggccattgatactttttactgatcttggatatggtgtaatggtttacttacttgtgtttgaaccttcagaatcctacaagtgtcccagctgcaacgtcaaagctttctcctcttccccctgagccgtacgaccgtggtgccacaatggatattcctcttgactctggaaaggtactttccacatccacagaagcctacgtaccaagtatcttctcagaataatccctgagacaactttatgattgccaacttctaggatctgaaagctaaggagaaggaactccgggaaaaggaggctgaattgaagaggcgggagcaggtaagctgtgattggatttgaaaccaactaatgtcacataccctgatgtcatttctcaaatggttagcagtaggtttttcattttatccgaaccaacaatagttaattttcatctgattgcatatcatttgtaagtattatatgggtatttagtctgtcgcctcactctcttattatctattctggaaagtttagccacagtggtttgtagctacagcctttcaaacatatgtctttcggttttctgaaatctgttgtgttattttccaggaaatcaagcggaaagaagatgctatagcacagggtatctttgtcaatattatcttttgtagaaacctgacatttcgttccatgtgaaatgctcatgctgtcatctttattttggtagccggaattgtgatagaagagaaaaactggccaccgttttttcctctcatccatcatgacatttcaaatgagatacccatccatctgcagagaatccaatatgttgctttcacatcaatgctgggtatgtgttttctctttcaaatgatcaacgcatctgcagttgcaacagaggtggatttcttgatatattagtaaacaatcttaatctctgtttggtaggtcttgtggtgtgcctgttatggaacattgtcgcagttactactgcgtggattaagggagaaggtaagtcttggaacagttaaaatttaccaagtagactgaacctgtatgatgctaatctgctgacttatgtattttggctgtaggtccaacaatatggtttctagctattatctatttcatatcaggggttcctggagcgtatgttatgtggtatcgccctctttatcgtgccatgaggtattcatgccacttaagatttttcctttaaaatatcttatctgctactgcgtcgtgtgttcctttatttagagggaaaacaaaaagagtattccagatagcatcgtagttaagagtcaaaactttcattgagatgtgtgttgatttggttgtgtgcaggactgatagtgctctgaagtttgggtggtttttcttcacgtatctggtgagttttccatttggtttcagtgaactttttttaatggctttgacacatcaaaaggtggaagtgagtaaaagcttaaaatatgattgcagtttcacatagcgttttgtgtgtttgcggcggtggctcctccaattatcttcaagggaaaatcgctgacgtaagtaacaaattagtttctaaatcacacaaaaggaaagaggtggaatcatcatatgttgttgtgttatgcagaggaatattgccggcgatcgacgtattgagtgggaatatcttggtcggggtaagttgaaagcttaggtagcgaataacttaaacagttgtggactttgagtaaggctaacttttggtgaggtggtggcagatattttacttcattgggtttgggttcttctgtctggagtcactcgtcagcatctgggttattcaggttccctcctttgctgaatcatttattcatgtagataagttaaaaaggaagaagtggttaacaagttgttgttgttgttgtgtgtgtgtgtgggaacagcaagtgtacatgtacttcagggggagcgggaaagcagcagagatgaagcaggaggccacaagacgagcaatgatggcagctctctgaccaatgaccacatacacacaccttttaacccatctccaattttttcccatttaacatacaaacaaacagtgaacgttagatcctcttgaaggggattgattatactccgctactcacttcatttttgttttcctcccgatttcatttaactaagattccagtgaactcaacttcttacttttttttggtaaaaggtgaagtcaacttcttacttactttttcttattaatcatctttcaaagaagctccaaattgtgaaatcctaaatatgcaagtaaacagtccactcagagacgccgcttccaacgcatacgtgacaactaacgtatgggtgaccttaacaataggcatcatttcgttgttaaaataatggctacgaacgagaaagtcaatgggtgtagttaatgaagaaatgggcttctgtagcaataaatagtcaaacagttgagagtgataagaagatgttgcacaagtggtgattataattcaatgtcgaatttgaatactcaaaagtcaatgcaagtcagctgtatctgtgtgtgacacgcggccccgatccgaacggttagataacgcccaaactgctatttaagacacaccactaggcctctttgttccaacaagacctcaaataaaaacacaacaacaacattcaagaaatg

SEQ ID NO: 13109 - DNA, 3000 bp, Unknown
  misc_feature (1)..( 3000): cDNA_ID_1008109_gDNA_ID_2214599_Annot_ID_186983 3000 nt of promoter + ATG
caacaactcctaaggttttttcaggtgaacttggaatcagctgtcagtataattaagaatgcagaagcagtcactgatgctatcatttcaactgtggatgattatgctcccacggtaggtttttctggctctgcgacaaatgtgacatgatagtcgtgtatctaagcggtgtaataacctataatgttccagtagcagatggagggtattgttccacttgcttcccaactagcggaagtggttgtacaagagaagttgatgctcgagaaatgccatgaccttttgagaatgatttccgagttagaggtataaagattgtgtgtgtattaacatttaaagacctgatctgatatgtttctgttctctgatcatattttgggatgtacacagatgcaggagaggagcttgaaatgctgcttcctgattcaacacaaacagactttcgatacaaatcttcttaaacactaggactgtgtcttcccctgtcaaagctttgcgactcagttttttaaaagcaaaaattacagtattttgaggcttaataaatgttgcgactctcgtaagagtcttaggttctctgtatcagatggaacaagatggtaataaccagtacacataagcacttttgatggtaatttccacttgtttctttcttggatattgggtttagttatctctttttcaatatgctttgattgcaagaaacagagtcaagaagtgtgtagtgtcctcctctcccgagtggatttgaccatatcttctatatgaccgaaaccacacttccttgcagctctcatggacttgttaaaactcaatcatgtcacattgcaagataagtactcttcgtccgctctagaaacatttattgatgacatggactaggaatacaagaaaagagagtaatgcacaagttcaaaacagcgagagactacatgaacattaaagacatgaaacagtaatttcaaacctgatattattactcagccaaagcgtggcccagttatttgaacgactttggaaacagtaatatcatttatatactactattaagatttaagaataagcgtttaccaagaaagagaatattcagtcctctcaaatgggaaatcgaaacgtcatgaaaaaaagaggaaaataaatgaaaagagagagacgctttgttctatatataaaggaaccctaaacaagtggtaaagagcaaagcaaaaccttttagtttcaatgtctaaattctattcataaaccctaaatcgatccatgtcttagaaacgatagaaattccgctgaagatatcttcaagcgacgaagatgaaatggagactccaattagagaagaaggtgaagaagactcttcgtcggaagaagaagatgatgatatgtcttctaataacccatcagctgcaacagagaagcaaaagagagtttattgagtaaaaacgaaatttataggagataatttttccttcgtcatttcaaccataaagccaaaccacaaaaaaaaatctcttcatctccctcaaaacttgaaatatggtgaaaacaactactcaaggtacatcacgtaagatattgacaattttttatttttatcattgcatgaaaattcgttttgtcataatcttaatctctatttgatctatgtgtgtagcgaaaaccaatgacaacgttaattgactcatacactgcacaatgttgaaagtgtttcaaagtgagatatagagagtcacaagaagagtacgaaaagaatcaaagtaaaactccgaaaaaagtcttttgaatgcaagagatgtgaaaaatctagagatgtggttgtgaactttgattcccctattgtgcgttggtttcaggatggacatggtatacccaacacccctcaaggtttgaagagggttttgatcgtcagaacaagctgcgagaaagccgatgtttaatatgaaacattagctcctaaacgaaagagactaaatactgtgaagaaagtcactaagtttattgaagacaatgaacaattcaaagacatgaagattgaagaggtttcttttaccgcacccaaacagctgaaaaggaaaaagttctaaataatgatgttatagttgttgatattaaaacttgaaaaatcaacaagttaaggaaactaaagagacagaataaaccttaacttgttgatcttttcaagttttgttatcggtaactacaacatccttacttatatttttttcttttcagccgtttgggtgcgacaaaagaaacctcttcaatcttcatgtctttaaattgtttattgtcttcaataaacttagcaacttccttcacagtctttagtctctttcgtttaggagatactgtttcataataaacatcggctttctcgtagcttgttctgacgattaaaaccttttataaactttgaagggttttgggtattaccatgcccatcccgaaaccaacgcacagtatggaatcaaagttcaaacacatctccaggttcttcacatctcttgcattcaaaagactttttcggtgttttacttcgaatctctttgcattggatcttaataatgtttgagccgaccatgttctacatatgatgaacaaaactcaagcactagcgattattaaggcttttttttttatttctatcgatctttttttttttacctattgataatgttgatgttgaaatactcaaacatggaagtggaattcaaaaatacaactaaagatctgttttcttagtacatacagaattgagaaacagagagatgaaaaatgccaagagtgtgaacaaaagtccacaaaacaaaagcctctgacggagaaggaggcttttaggtgttacccaaacaaaacgcacacaatacggcgtcgtttagaatcagaaaagacatttctttatggtcacttgattctctcttccttcatcaatcaatctcgtctcctggaaaacattagggagcctctcagatcctcaagaaaaccctaaatcaaaagtcgagatcg

SEQ ID NO: 13110 - DNA, 3000 bp, Unknown
  misc_feature (1)..( 3000): cDNA_ID_3028180_gDNA_ID_2214599_Annot_ID_186979 3000 nt of promoter + ATG
gctgctgtgtccaatggagacccaatctcctggcagttcagctgctgtctgttcccctcccagtggagcaaacgatccaaaatgtctgtacctgaatggctggaaccgatgtcgaccctctcctctgaacctcaatggtccctctggcttcttctcacatttctccattttgttgaagcactttgcaaggtacttcccttgttgtgatgcaacctgtataagaatcaaaacatcaaaatctgtgtggtggattgatttcatcttgttttgatctataacaagcttacctgtgcagttgctggaaggttcttcatctgtgaatcaacctcagagagagcttgcttaaacttttcgatattcacttgtgtgtcctcaccatttgcactcttgagcaagtttgcaatgttcttcagcttattcttcttcaagtagagctccacctgagggtacctctggcaaatgtctttaaccacactattgaaatctttcttcttcaaagttcctgtgtttcccttgtctgctttgttgaaaatcgcagctatatcttcctgtttgttcaacaacatcaagacaaaacagaaggttaaagattcattcatcaactgagatgtgacacaaaggaacaatgtcaagagagatgataccatgactctgcgttggttgatcgttgcagtgtcacctaaagcatagacaccgtcacatccctctactctaagccattcgtcggtagccaagacacgtctctgtccctgtaaccatactcaatctagttaggtgggacactagcaaatgatttggttagtcaaatgatttcttcatgtgatcaagtgtaatctaacctgaccaatctgctgcataaagtctttgatgacaggacgtgaaccaattcctgttgaccacacaaccataccataaggttcggagacaatcttgccagtttctctttcctttgtggatatctcatcagcagtcactcccacaaccattgaacctgtcttcagatcaataccatctcgctggaacttttcctcagcaaaagcagtgattctcttgtcaaacctgaagtagaattgaaccaacattggaaaagcagtagatttagccaaagttaatgaagcttgatgggtggaacttacatgttgagaatgtggtcgcctgcttcaagaagagtgatttttgtgaactcttggacctttgggtaaatcttagccacatcctggactaggaaatcatgaagctctgcagagaactcgactccagttggtcctccaccaaccacaacgaaatgcagaatctttttcctctcttcttcagttagattcggaagagaggctctctcgaaacagtcgatgactgaatgacgaatgtttagagcatcctctgcttctttgaggaaataggcatgttcctcaactccaggggtgttgaatgtgttaggcttagcaccaacagctaagatgagaatgtcataatccatgtcaaactctgttgtgcccttaagacttgacccttccttggaccggcagtggattttcttgttcgatgcatcaatcttgacacactctgcttctttgtactcaaatcctttcttgcgcataagaccacgaatgggttcaacaatgctacgggcttcgacagtaccattggtgacacttggcaagagaggagtgaagaggaaaaagttacgaggagagacaacttgaacatcatagttagggttgttcaagtaactcaagaagctgtagccgctccatccactgccaagaacgaccaccttcttcttccttattgggttgccatctgagtcaagagtagcgtctgcgtgtaatatacgtttcaatggattcgagtctgaatacaccagtacaccaccaccaccactggacaacaatacataaaaagacacaaaccaaaataattgttagacccacgttacttaaaaaaaacatagatctgagtcgaaaaaggtatgaagcttatagagatggtatgcattatatcatgcatcacagctagggaagaggccaaaagaggacaagcgaaaaattcggacacgtgcataggagtggtcaaaaacatcacaagactaaaaatactaagaaaacagtcaaagcatctataaagagaattggaaacaaaagagttatatagattctacagctaaaagaagaataagaagaagaagaagaagaagaagaagtgtagaatggtgaaggagatctaaaggagaataaggagagacctgaaagtgctgagaagaagaatcttggaagtagaagggtaagccttgaataagctagaagctctctggtaaaagctatggaaactcatgttgatgatttctcaaacctcagatccaaaagaaaacaaagctgagagctttggaagagaggctgcgaatgtgaaagaatatgcaatatggaaactatcaaagctactttagggtacgtgagagagaggtcggcgacacacaaaacaaaatttaaagaaaaaagaaaaaaagaaaagacagtgaggtatttaggaaattggagtaacgcccaagtaaatttaggtatattcttttttttttttttttaaagtaaataaacagcagatttgtttagggtttgactttctctcaaaactcgagactttaagcgacattatgttccgcgttccctggagattttttattattatatatatttggaattcgaacaactgttggattcgattttgattttcatttctgattttatttggaatactgtatatgataaagctaataagaagaatggaataaatacctcattcacttctatacatgcatgttacaattcataaaattcataactaaactttttatgttatatatgcatgaagactatgagattgtgcctttacaaactcttatcgattacaaaaacgatattgaggtaagtgcttttgaagatattaatagtttttaacaagaaaactattagtttgatgtctttaattaaggttcaatttatgaaa

SEQ ID NO: 13111 - DNA, 3000 bp, Unknown; identical to SEQ ID NO: 13107
  misc_feature (1)..( 3000): cDNA_ID_2710531_gDNA_ID_2214599_Annot_ID_186978 3000 nt of promoter + ATG

SEQ ID NO: 13112 - DNA, 3000 bp, Unknown
  misc_feature (1)..( 3000): cDNA_ID_3028184_gDNA_ID_2214599_Annot_ID_186977 3000 nt of promoter + ATG
gtctctccttattctcctttagatctccttcaccattctacacttcttcttcttcttcttcttcttcttattcttcttttagctgtagaatctatataactcttttgtttccaattctctttatagatgctttgactgttttcttagtatttttagtcttgtgatgtttttgaccactcctatgcacgtgtccgaatttttcgcttgtcctcttttggcctcttccctagctgtgatgcatgatataatgcataccatctctataagcttcatacctttttcgactcagatctatgttttttttaagtaacgtgggtctaacaattattttggtttgtgtctttttatgtattgttgtccagtggtggtggtggtgtactggtgtattcagactcgaatccattgaaacgtatattacacgcagacgctactcttgactcagatggcaacccaataaggaagaagaaggtggtcgttcttggcagtggatggagcggctacagcttcttgagttacttgaacaaccctaactatgatgttcaagttgtctctcctcgtaactttttcctcttcactcctctcttgccaagtgtcaccaatggtactgtcgaagcccgtagcattgttgaacccattcgtggtcttatgcgcaagaaaggatttgagtacaaagaagcagagtgtgtcaagattgatgcatcgaacaagaaaatccactgccggtccaaggaagggtcaagtcttaagggcacaacagagtttgacatggattatgacattctcatcttagctgttggtgctaagcctaacacattcaacacccctggagttgaggaacatgcctatttcctcaaagaagcagaggatgctctaaacattcgtcattcagtcatcgactgtttcgagagagcctctcttccgaatctaactgaagaagagaggaaaaagattctgcatttcgttgtggttggtggaggaccaactggagtcgagttctctgcagagcttcatgatttcctagtccaggatgtggctaagatttacccaaaggtccaagagttcacaaaaatcactcttcttgaagcaggcgaccacattctcaacatgtaagttccacccatcaagcttcattaactttggctaaatctactgcttttccaatgttggttcaattctacttcaggtttgacaagagaatcactgcttttgctgaggaaaagttccagcgagatggtattgatctgaagacaggttcaatggttgtgggagtgactgctgatgagatatccacaaaggaaagagaaactggcaagattgtctccgaaccttatggtatggttgtgtggtcaacaggaattggttcacgtcctgtcatcaaagactttatgcagcagattggtcaggttagattacacttgatcacatgaagaaatcatttgactaaccaaatcatttgctagtgtcccacctaactagattgagtatggttacagggacagagacgtgtcttggctaccgacgaatggcttagagtagagggatgtgacggtgtctatgctttaggtgacactgcaacgatcaaccaacgcagagtcatggtatcatctctcttgacattgttcctttgtgtcacatctcagttgatgaatgaatctttaaccttctgttttgtcttgatgttgttgaacaaacaggaagatatagctgcgattttcaacaaagcagacaagggaaacacaggaactttgaagaagaaagatttcaatagtgtggttaaagacatttgccagaggtaccctcaggtggagctctacttgaagaagaataagctgaagaacattgcaaacttgctcaagagtgcaaatggtgaggacacacaagtgaatatcgaaaagtttaagcaagctctctctgaggttgattcacagatgaagaaccttccagcaactgcacaggtaagcttgttatagatcaaaacaagatgaaatcaatccaccacacagattttgatgttttgattcttatacaggttgcatcacaacaagggaagtaccttgcaaagtgcttcaacaaaatggagaaatgtgagaagaagccagagggaccattgaggttcagaggagagggtcgacatcggttccagccattcaggtacagacattttggatcgtttgctccactgggaggggaacagacagcagctgaactgccaggagattgggtctccattggacacagcagccagtggctttggtactctgtctacgccagcaaactggtgagctggcgcacaaggatgctcgtcatctctgattggactcgacgctttgtctttggccgtgactctagcagcatctaagccattcttctccatcatttttttgttctccttttttctacggtttcctttaaatcttcccgctagtttgttgtcttttaaaatcagatgatgatgactatacatgtcattcctatattttctcaatcacatgaacttttgattcttgaacaaggacaagcatatttctaatttaattcataacaaagagttcccttctcatacatgactcttcctctcccctcgatcgctacatcttcgatctcaacttcttcgatcgataagccttaaaaggatttctatggtaaatttaagctcaagtcagagcgattcaccaaaacccctagaagaagcaatttgaaaagtagggttgaaggatttgaccgttggtggaatccaggccattagatttggggactcttggaccttttctcagtcgtaaaacatatggcccattaaacttttaagaagacccaaacattcggcccatcatcgtttagatactccgtcggagtcttcttcttcgtcatcgtcccaaaaccaaccagaacggctctgtgatcggaaccgccgtatacatcaattcaactacgtatgtgccttcgtcccttagcttagccagattcatcactggggatttcatcagcagccgtacaattatg

SEQ ID NO: 13113 - DNA, 3000 bp, Unknown
  misc_feature (1)..( 3000): cDNA_ID_2710527_gDNA_ID_2214599_Annot_ID_186976 3000 nt of promoter + ATG
ccgaagaagatgatgatgatgatgatgaaaggaacattctctggcctattgctctgcataccaaagcgctttactctatcctcgtcttgcctttggttgagccaaaggagatgaaggattacgtcaagctttgtaggagatctgattgtggaccagctgttggtgaagatttgagtttatcatctctcttgcttaacatttcatccattacagggtacttatagctccttaagggcaatgcttttgatttaagagtgatgttcaactccttgatggatgcacttgtcttgtcactcatgttgtagggcttttatggtggctcatgcatttggtgacatcatttctggtgatacagtggaacctgaggttgttgtaagtgtgtcaccatcagttggggggttgtttgattcactaactggaagcattggtatctcatcgagggctaaacctgtagctgcacctgttgcatcatctaacccgtctggagctgcaataactggagctacagcatcggatgctcccaaagcagggtcaagattactggatagagatttacttagaaactttattgctactgctatgccgtttggttagtattttccctctttcatatatggtatattctgttacctggtagactttgtttcctgattgatgtgctatcaaaccctgaaatcttttgatcacttctgcaggtaccccattagacctcagcttgtctaatatatctgctatgaaagcgaatggtttttcctctgctgatcctcctccccaagaacttaagcaaccagcatggaagccatacctgtacaaaggaaagcaaaggctattgttcacaattcatgagaccgttagcgctgcaatgtacgaccgcgatgagattcctgataatgtatctgttgcgggacagataaactgtcgggcagaactagaagggctgcctgatgtgtcgtttcctctagcagggctgagtacagcccatatcgaagctatatctttccatccatgtgcccaagttccagcacatgggattgacaagcagaacattgttttccagcctcccttgggtaactttgttctcatgcgataccaggcaggttgtggactcggaccaccagtgaaagggttctatcagctatcaatggtttcagaagacgagggtgcattcctcttcaaggtgcacctcatggaaggttacaaggctcctctgtcaatggaattttgcactattactatgccctttccacggagacggatagtggcatttgatgggactccgtcagctgggactgttttaaccacagaacactctgttgagtggaggattctgggcagcggacgtagtctttctgggaaaagccttgaggcaactttccctgggacaatcaagtttagtccattgcagagcagaagaaaaggggatggggatgatgaagagagtgaggatgagagcgctgagaatgtggtgaacgtggaggacttcttggtgcagaaaatgaacaaggatctcccagcagctgagttggaggaaccgttctgctggcaagcctatgactatgccaaggtatgtatgtctttggcttccttttgaaatcttttggacttggttgttgttcaaatctatcttctggtttacaggtctcgttcaagattgtcggggcatctgtatctcgaatgtcaatcgacacaaaatcagtaagctttcgcaacttgcaatgattagttaacagtgttagcccatattatcgacttattatggcctccttttgttttactaggtcaatatctacccaaccacaaagtcaccggttgagttttctgctcaggtaagacactgccaacaatatatagtgtataaatattgaagtgcacaggaaacgtttgaaccggattggataaaactctaaaggcgctctacatgatatgtgcgtaaacaggtgacttcaggggattatatattgtggaacacattggggaaagctccatcagcagccgtcgtgtgatttccccaagtcgcagcctcactggtattgtattttcccatcccaaggaagtgatttatttgtttgagtttgaaagcattaaacgtatgaatgagcagtttgatttttacagcggaagtgtatctgtacattattgttgtttcttgagagataaagaaagatgaatgttgttttagttgcaaatctgtctggaatggaacatgtgataataaaactcgtaaggtggttgtgttcatgaagttgccactgtttcataattagtctacaagcctaagaaagaaattgctctatatagagaatgctatctagatatagtatatatccagctcataaaggagattataatccaaggtttgcagcaatatgaggtctgtattttatgaaattacaaaattagaagaaaaatatcaatcaatttaaagattgttgttgccacgtcaatgacactgtctctgtagttccaatgagcttggaataaccaccgacagatctcattcatagggagcaagctgccattggaggttaattccatttttttcataataaaggttaactgtccaaactcgaaaccctgatttatttagttttcaataaatgttttcatgccttttaagagtgtgtgctaagctaacagatgagctgttattaccttgaaaactctaatctatcttaatttaataagttcttaaatatctttccaactttttttacgctttaagaaaagaaaaaaaatcctatttcttgaaacgtaatgttaatggaaggagtcaagttgtcttttgaaaattggattacctcattagaaaattccaccaatttggtcaaatagagacgatgagatttctaagaagtctctccggttcagatctggtcatctaaagcccttcttccgagatctacgactttcttcctcaagtcgttgtctgaattctctttttttccgaaaacagacaccacctgagtctgctgtctgaagcctcggcggagggagatgatg

SEQ ID NO: 13114 - DNA, 3000 bp, Unknown
  misc_feature (1)..( 3000): cDNA_ID_3028196_gDNA_ID_2214599_Annot_ID_186971 3000 nt of promoter + ATG
agagagtttggtctaaatggggacatattcatttcaagttcatgaagctcttggtcaaaacctagccaatcatttggtttcaagatcatgttcacaaaaatccatggaatcagtgatataatgagagcaatatcgatcgtgttttcccaccattggatgatcaaaccttgcagttcaagggtcaagaaccgataaaccacattttatttcctataaacctaacaaattcataggaccctcatggagctgtagaatctaactaattttaataaggtaaaaatctatagataagcatcggagatgaatgtagatataatgtgaggcctgaattacacaaaatcaagtgaaatgtatttagttaactacttaataatcatcatgaatactggatacatgtgtgcattattaaagactagagaaatatattattgacaacttcaattaaaaaacagagaatagttattcaaatgagaatgctttagctaaaagtgtgaaagtcaaattgtattattgagaatgacaacaagcacaagatgttacgtaattcatgaaattacaaaatcacatgagagtatcaataaaaacagttcatatacgaatcttacagttcacaaatctcattacattctcaattaattccttccttcgtatatttacacaataagactttatccaatcttttcccatgtgccccgtaaagccaatacgattactcatcgaataccattggtgttccattattttatttgcttataacgaatttgtgatgatgagcagtgatgctatggttggttaacaattaaatagtagacgagttttgagattttttatatgtaattaaaggcaattccgaccaagatatgactaaccctgtcctgacagaactagaaccatttcataccaactagcctgcagaatataaatcttgataattttggtcaacaatagagtggagagagatttacatacatcacatagtctttaatatgtaagaacatcccaaatatatgtattcaacatttacaagagataaatagtgaaagaaagagatgcaataagaagccaaagtaaatgcacacatggaaagagcagactctgctttgccattttcttctacgagtttctttgttttcacctctcaccggtttgccctttcattaatctaactgtccaagctcccggtttggctccatacatgggttctccaacaacgtatggaggcggctgacgagcatcctgcaggagtgcaactgtgcttacattgtattcatcgtcactatcataatgtcggtgagggtgaggtccaagagctttgagcaacatggctattaaaactgatagaccctgccaataaacaaaggaacaatgtgaagcgttgaaaccaaacaatttagaagcaccgtaaagtagaatctttttgctattagttaagatacctggacacagacaatagagagacctatccacttgcaaatcttgaagtttgactcgatgaacttagagaactggtggaaagcaccacttggatcctctggaaagtcctgatgaaagcttctaaaagattagaatcttgggcgtgacaatagagagccactcaagatttttcaaaagaaaagagatagagaaactatacctttttccagtcacggtttagaaagatatcggcaactacaccgccttcaaccatagttagcaagactatgaatcccatatactgaacccagtcgatgagccaataaacagatgcattatacacataaaaaaagaaacacaagaaagaattcaggaaggaatgatgaaactaccaaagaaaaacaggctaacgtagtgatgctacaattcatcaatagagttgcaggaacaacttataaaaaaaacagaagtttaccaagtaaaggcaacatccattcacggtttcagcagctatgtgcccggcacaagtgacaacacagagaatggccccgagaccaagaaatgaataaatgaacctgaagctcataagaagattggttcagaaattttcatcagcaatggcatacttcatatttcataacaatgataacttccccctcacacaaaaacaagatatgccactttccagtgccatcttacaagaatcctgaagctatctcttccatagcctaactacttctagacacctcaagcttacagaatttatgatctttccacgggaaaaacatagtttcaccccaacaagatgtgtcactcatttccagtgccatcaaatttgaaagacaaatcttacaagaatcttaaaactgtctcttccaaagcctaacaacagcttctagcttccacacacctcaaatcttacagaaatctatgatcttgtctctgcctaaattgctcagtaccgttctccaaccactcggaatttaaacaaagatacaaacgcccaaaaagccagaaagtgatcaaacacacaaaaagatgaaactttcaacataccacggaacagggtgatcagaatcagcaaaaggaagatttcccatttgttcttgccattgcctaatcagccaaacagcgtagagaatcatagcaatcccaaccatcccaattagagaattcacgagctttaacatggactgtaaacaacttctcacgatcctcaccatctttaataacccaaaaaaaacctagacgaagagaccagagacaaccaacaacaaattctcttcgtctgttgggtctaggaagaagagaaatcgataaagataataacttttgtaaatcctgttgctccagatgtcttctcctttctaagcaaatcgtaaagttgtaatttttttgatacttgttttccttttttgagctaagaagatatctattgacaaaaaaaaaatcacacttgatgccaaaaaaagaaaaacaattattttggattaccacataattgaattggtccatggtagtaacttgaaaggtcaagtggcttggctatatgaagaagaggagactctctggtcagagacggcgatg

SEQ ID NO: 13115 - DNA, 3000 bp, Unknown; identical to SEQ ID NO: 13104
  misc_feature (1)..( 3000): cDNA_ID_2710515_gDNA_ID_2214599_Annot_ID_186968 3000 nt of promoter + ATG

SEQ ID NO: 13116 - DNA, 380 bp, Unknown
  misc_feature (1)..( 380): cDNA_ID_3028109_gDNA_ID_2214599_Annot_ID_186997 3000 nt of promoter + ATG
cattctccatgatttcttcacaagatgtctctgtatttggggatttgcagacaaaaaaacattttgcaggtcggttaagtgaaaaaatgaaagtagcttgagatgaatttttgacatgataccaagtacttgtctatgttggggacatctgataaattaggaaattagtgtatgtccttataaagaaataaggaattcgggatcagtttgaaacatattaaagttaggattacatgtgactaaaaagccaatagttattgataataaagcccagcccataaaacgacgactcttgagtctagacggtttttggaatctgaagtgaatcgtcggaaaaatttatcagtttcgagattcggagatctgcaagggagaagatg

SEQ ID NO: 13117 - DNA, 3000 bp, Unknown
  misc_feature (1)..( 3000): cDNA_ID_1985373_gDNA_ID_2214599_Annot_ID_186996 3000 nt of promoter + ATG
tctaaacgcttaaccaaaccagcctggcgatagatctgagcagcgatttcattgtgaaggagaccggcggcagaaaagaggggaattttctgtcctctagcaatggagttcatgacatcaatggttgaaatgccagtctgaatcatctcttcaggataggttctctcactaggattgatggaacttcctggagagaccaaagatcagaagcctctttagtgagagggaaaagaatgcgtcaagaggaggctaaagtgagtgctcaccagaaatatccaagtaagcctctggcaatataggtggaccattgtcaataggcttccctgaaccattaaagatacggccaagcatatccaatgagacaagggtttttaaaacctatattggcaaaagtgagtgagtaaaccaaatatatcacgcaacaagagaagagagtagtaacatacctcccctgtaaattgaacggtggtgtacttgttgtcaattccagatgttccctcaaagacctagacaagcaccacagtactataaagaaaaggccgtgttgcattattttgaatgaggaaaataatagttggaaacctgaacaacagccttctcgccatcaacttcaagaacttgaccacgtcgagtagttccatccccaagatgtatgttgactatttcttggtatttaggtccctgggaatcccaataaatcaataataatgcatcaagaaaacaagacatagaacaatttcttggtaaatataccttaactttctcaaggataacaagaggtccagcaacaccagagactgttctatactctgcagatgaaatatatatcaaaaagaagaggaagaagatttagcatcctcctacattgcaatgaatgaatgtattcaacaaccaaatagttgtttacccattccgatctccagggcaccttcctccatttcgacattgtttttagcagcacccatttgaagatcggagagactatctcttcttcttttttcttgagagccggctgagatctatcgtcgactatcacttctctgattcaattttattttgttttgtataaaatggacaacaatcagacttgttatgtatataataaaaacacccaaaatttgttgttagtctcttcctctttcaatttacttgtccaaaattgaaataaatattatccgacaatccatatttataaatagtgttgatcctagtatttggttctttgctagtctttgtctctggaagtttgttacttgtcgggttatgtctcccttcccttgtttgggctttagcctatgttgatatactcctatgtatgaagactcatgacattggttagctaggcagtaagatgaaggaaaatttagtcctattacaacttgcctgcagccattagaggaagaaaagatatcttgtctgctaaagagagccgagaaaactgcagaaataacaatggtaagaaatgggatcatgaagaatatttgagaaacaggggaaatatttgacttacttgagaatactactgtatagaagaagctcttgaaatacaggaaacttaaccttaaaacacataaacattttcatccttataggtttcttgcttcataagaaacagagaaaaaatatatgagtacctgtaaatcttcccaggttgtgaagggtttgagtccaagttgatcaaccaaggaaaatatgtttccattcggataccaaaacccttgttgcacagatcacatgtattagttgggtaacgtaaaactaaaaggtaattaaatgggttaccttggaacccaacatcaacaggaccatgaccatcgtcaagaactgtgacatcaaatggagttggagatgagaatatcaaagtgaaagtaaccttggttacaaagatgatgagcggcaccaaaagcagcccagctagaacccacgacaaccaccttcttcttcattttttttttggtttaaaacaaccttcttcttcttatctgaggtggctcctccatcgccttgggctatgatacatagtcttctccggcgcacgggaccttgtactattatcagattcaggctcccacaccacaacatctttactgcctcacaatctttcttcttttgtttccttgtgtttaacttgtgagtaagtgatgtgtgggtgccatggccacaaagacatcataaaccaaattttgtctgtatttttttggttacaaagatgatgagccgcaccaagagcagcccagctagaacccacgacaacaaccttcttcttcttatttgaggtggctcctccatcctccatccccttgggacctagtactattatcggattcaggctcccacaccacaacatctttactaccttacaatctttcttcttctgttttgtttccttgtgtttaacttgtgagtaagtgatgtgtgggtaatgccatagccacaaagacatcataaaccaaattttgtctgtatttttttttacctaaaatatattagcattcattctacaattatgcagttgtttctaatacagtatgcttatttttcagtattactcatagattaaaattaacatttacctcacaaacaattatagaaatagaaagacatggaaaaaaaaaaatagaaagacatggaccacaaaataaataatatgtcgaaaacaaaatatccatttgacatacttatcaaatatcaatttattatcaaagattcaaaagtaattgatgtaagtacaaaaaaattgccgaattcttttgcttccacgcttcgaattgtgtattggacccaaatttatgtgtgtgacacaagataatcgttagtataggtctatctaccgtccgccgtttcaatctgacggctatcgtacaagccgtacaatatagactcaatctaacggtggaaatagaaagatcataaatccctcaaatctcacagttacctcaagtttttttttttttttttgttggtggagacgaacaacaacaacaccaacagaagacagaa

SEQ ID NO: 13118 - DNA, 3000 bp, Unknown
  misc_feature (1)..( 3000): cDNA_ID_2713087_gDNA_ID_2214599_Annot_ID_186993 3000 nt of promoter + ATG
actttttcttctaacacgaaccttttcccttgtctttgttttctttttgttttgttttgttttggagtttgtttatctttatctgccgaaagtttaagacttcagcctcccaccttggcacctccttgcgtccacgtcatcttaatatgtaccaaggtttctaagttcttcatgtcaatagacattataacatatttggaatccatattatgcaaggagacatcggttttactaatgcgaattgaggggcttgtataaaatcggtctgcttcagaaaacattccatttttcaacccttgaaagtccattcagtttaccatccaagagtttttccttgttgtgaatgataagaaaatccataacatttatctaattttatcgtattggaaaaataatttaatatttctgaatacatttattaaaaatatagttaaaaacgatgtatttttagcgttttataattatttagcattatttagatgttttcgttattttgttattacatcattttaattattattcatgtgacttgaaattaattactttttaaggtcgaatctttttttacgcctgcctttacacttcttattagaaggttatgtatcgaaacagccatccaaaatttaaataaattctaaaagaagttatatatattatgaatgtatggtgatactgacatgggtagggtacattctttttctattgagttagttgatacgttaagttggatgagatataacttatactatcatataagctttttttaatttgtgtgtttcaagtttggtcggttttgtttatgtcttttgtaggtggggtatacagaaaaataagagaaaaaaaaacaaagtcaaagctgactttgacgacaaatcgctaaccttcgagagatgatgataacaagcctaattaaaatacacgttacgtcgcaatcaattgcttcaatctcattctcattgcatgtcatccttagccgcggttagccgaccatactatcaacgatgtgcatactatcaacaatgtatttgtaataattaagtagaaaaataaagaatgttccaccgtccaaaagaaacacaagtacggtcctgagagggcttgagatattttgcttagtgatatatgtcaacatcttagttaagccccaccggttctgatataaaagtggggaaaatatttcataaccacacaacaaatctctctgtttctcccgctcttgctctgttttctcaaagacaaaagaggacatcgtcgttgactcctcttctctatggctactgctaagaacaagggaaaatcaatcagggtccttggtaccagtgaagcagagaaaaaggatgagatggagttggaggaggagttccagtttagtagcggcaagtataaagattcgggtcctggctcggacatgtggttaggagatgcttcctctacgtctccaagaagtcttaggaagactagaacctttgaccgacataatccctatctcgtatcttcttatgctactcctcagccgccaacaacaactacatgctctgtctcttttcccttttacctccctccagcgattcaaaatcaacaacgatttttacacccgaatgacccttcaggacaaagacagcaacaaatgatctcgtttgatcctcaacaacaggtgcaaccatatgttgcacaacagcagcaacaacaacaacatctattgcagtactggagagacattctgaagctgagtccgagcggaagaatgatgatgatgaacatgttaagacaagaaagcgatctgccactgacgaggccaccggttcaacccttcagcgccaccaagctatatagaggtgtcaggcaacgccactggggaaaatgggttgccgagatccgtaagccacgaaacaggacacgtctctggctagggacattcgatacagcagaagaagccgccatggcctacgaccgcgaggccttcaagttgaggggagagaccgctaggctcaatttccctgaactttttctcaataaacaagagccaactcccgtgcatcagaaacaatgtgagacggggactactagtgaagactcaagcagaagaggagaggatgattcgagcacggcattggcagtaggaggggtgagtgaggagacgggttgggctgaggcatggttcaatgcaattccagaggaatggggacctggaagccctctatgggatgattaccactttcccatttctaaccataaggacgatcttgacgccacacaaaactcttcttctgatacaatttaggacctttgttagaatatagatatgcttagttgtatgactgatctagcttgtgttttttttttgggtggagacagtttttgtcatcttccacattttagattctattttcgaccatcatttttttcttgatcggtgactatgaatctaatggggtcaatcattttcacatataaaacttaagtatttggtgtttgtacttcatcagttcatcttattccatagaaagagagtgagaagtgatcaataacccttttaactgaaaaaaagaagaagatcaaaacctaaataagatttaagtacatatgtctaattcgacgtaagacatttttggaaacgatcaatgtactaacgagttgaattctgatgaatcttgagcatgaataaacggactttgtagtttgtacaattgataatgaaacagagagcaacattatgtacatgtgatatatgctgcatttatttatgggcttttattagatggaccgagctctagcaaaatccaaagtaaatgggcctaatcctaacgtggacagacaagggacacgtgtcacactaccgacatctcgtggagttggataagccactcgaaagtcgaaactcagaagatccaaccagagccatcatcatccttccaatggctattacttgagaactcttctgattaaacatagcaacaacaacaactcttcttctcctctctttctcacttcaatttagcg

SEQ ID NO: 13119 - DNA, 3000 bp, Unknown
  misc_feature (1)..( 3000): cDNA_ID_2710492_gDNA_ID_2214599_Annot_ID_186988 3000 nt of promoter + ATG
acaatattggcatgccgtattctatctatattattcactagctccaaaaatttgccttcttcttcatgattgggagacttcttatccaacttcctcacagcgaagagctatccaagaaagtaaactaacttatcagttgcggaaattgaatacacataaagaaagaatgaatgtaatgcatatatacctttccacctggaagctctgccctgtagacactcccaagcatgcctgttccaataaggttttcgtgggaaaagctatttgtgtgttgttgtagagatgcgaccgtgaaatgcttcacagctgtcaagggaccatgggatttactggttgtcctttttagagatgcttcagcaggttcagtcgcctttgcgatgacccttttgataggtggaattgatgagggatgcatcaaatccatagcattgccattcatgtctatctcatgactctcctgctttgattcacttcctacgcttctttctgccccaccatgcagcttcgaagcacctcctactctctcttttggtctagcctccttgtcttttgtttgaatttcattgaagaagagaaaacaaacatgtgactttcttgaaatctaaaagtgaagaaatcaagatatgagatttcacctttattgaatgtattggatggaggaagcatagaagcatttgagcgagaaccctcccttgccctcccgtattcactagttaggtgcggtttggatagttgttcactgtcttctctttttctgagacattttctcccacaaagtagacataccaaggccaaaaccacaaatgaaaaagccccaagaatggatatccaaataattcttttactggtaaatgagtcttctttcccttgaggagttggtcgggatgggtgatgatcagaagggggtgatctcacgtgtgcctgaccatgaccagctgatgcattgggagatggtggtccaaaaaatggccgcttaggtgatgttggacttggaggtgtttcaggtgaaggcgatggagcaatagtgacgttaaacagattaccgccttttctgcatcatagtttgtcacatcagcggactgatactttgacaagaaaaagtagcagaatttgtagatgtaaagttggaacgagcaatgaaaactgttgcagcttacatgaaatttggtatactcaacaacttttctggtataggtccattgaagaggttgttctcaacgttcctgtagagttaataagaatgagagtaagcaagtggcaagatatataacagttgacaggaaaagaagatgggatggcaaagaatttgtacaagtccttgaggggaagatcttgaagaacatcaagctctcctgaaagatgattgttctgcaaaagcctgaaaggatgagaaatcagaacaacgaactgaatgagacctactcaacacagactgatatgtatatggaatgcaaaggagaaactcacaaggatgtaagagtcgaaagattctgcatggaaggaggtaatggtccactcagattgttgctagacaaatctctacgcatatgtcgaatgttcggttacacatatatacagaaaacaatcttaacacagctgatttagaaagcagacctacatattgatcataaggccaaggtcttgaaagacatcgggtatcttgccagacaaaaggttattgttcaaggacctgtaagaccaaagaagtcttaaacgcttatcaccggtagagaatgaatgtgatgacagagagagcagagacttacatgacagacaaagattttaaggaggaaagagattctgggatggttcctgtaaagttgttacctgaaagaaacctgtgaaaatgtaaagattgtaatacaagatgttgaataagaaaaaagaggggatttgcgagttggaaaatgggaaacatacaagttctgcaatgaaacaggcaacgtggatgggatacttcctccaatgtgattgttgctaaaatccctgagacaaaacatcaaaaggtaaaaataaggagagaagcagattaaagaagcaaaagtcataaacgcaagagaggataaagtacattgctttaagagaggtaaacatgtttaagccaacaccaagctctcctccaagattggcactgatgagaattctgaaaaagggtgagagtgttgttagaagaatgataaagaaaagtaagaagaagaagatgggaggtgtcgttttttacattgtttctacttgggaagcattacatagaacaccttgccagctctcaccacatgggtcacctccagatgcaacccaaccggggagaagaggagactccagtgcaaggaagagactgttaatagccgcaactaaagcaaacaatcagggtacgattagctatactaacattaccattacacaaaagggaaaaacagagagaattaggggcttaccatcgtcaggattggtaagagcaagtgacaaggagggaagggagataagggcaaaggagagaaaacccaggaagcagatgttgttgtctctcccagatctcatcgatctcattccgaatccagtagacactaagagagatatgtgagtgaacagagtcgttgaaaattcaaaagcaaaacttagcagccaagaatatgattcgacagacgaaggaaaaaggtgagtaagagaactttatgttatcttaagagaaaagggaatgtttttttgcaagtgagtgagagagagcgtcactgtgtgaatgcgattcttcttagttcttacaagcaaatctaaacttgtgttttcaaaatttgacgggcagacgaaacagagaagacgacaaagaagcttttaatgggcctacatttatttatgataaggaatataatgggctttagtttataaacaataggcccaaatgagaccttcttgtagaagaagagggttcatcgtcaccttaaactcattaccgtcaccggtgagattcctccaaaatcgggactttttctcaggacgtttgag

SEQ ID NO: 13120 - DNA, 3000 bp, Unknown
  misc_feature (1)..( 3000): cDNA_ID_3028155_gDNA_ID_2214599_Annot_ID_186987 3000 nt of promoter + ATG
tcttgagtcttggttagataagtaacccgctactttactagccgtttcgtttgccatctctttttctctctgtgtctctctctatttgctacaaaaagagagaatcttgtttcatgtttttcagtttgtctttagatgaattcattttcacataccattatattaaaataaaggaaatgttccgcagtaacatgtaaagactcctccaattagcagtagatactagatactatactagtaatgacaattaaataaatgcagaaaaaaaagaagtaaaacactatcaaaagttgaagttttgatgaatataccaaatcagattgaatgtaaccaaatcgctcatgttcctcagacaaaactgtgtaccaatcatgaccatatcccacgctaaccaatttcttataagtcatcttagtagtagcagtaaaaatatagccatggaaaggtatcactgatgatgcaaggagacattgaaagaacaaaatataccgcctggtttagcattgcgtagcccactgatacgaatggtgcaaaagtttcacaccgacgatggatcagtagaccaaatcaacgcactcaatatcttgaggataatgaaaccacataaaggaaacgaaaagaaaagaaaatcaacaaaaccgaaaagccatggttctgggtcttcataaagtctgtgatgtctttgagttgttttgttaatggacaaagaggcaatggaggttgatagtgtcagtgttgatgccccggagggaatgtcccaacgttaactgtggattgataatcccagagtttaagagcagcaatttttagaaattaaaggcacaagaatagctcaatattaaaagatatgcaaaaacaattctaccgctattcattctacaatctactattaacacaagggttcatgagttggtgattagtcctcaccactactgtttcaagttcaacagtgtagccagacaaaaatcgacaatgctcctaaaagaacagagtgactggtatatatcagagaaagatgaaacattccacaagtacaatgatagtatgagaaagagagagagactagacacacatggaagattggacaataatagtattacattattcagaatgtggcggataagtgttgtgaatggcttacccgcagaagaaacaaagcaataaagtgaaagaattcacatattatagtgtgtaatctacggggatgtagaaggagaagccactcgatcggcttctatcatcgactttatgtagtactctcccgctttgtacgacgacctcaccattggtcctgatgctacgtatctgaatccctgtttacaagattccatattagcctactttcccattgcaattctcagctaataaaacttgaaaacaaggaagagaccattaccatttccatgccaagaaggcgatacctctcgaaggcatctggtgtcacgtactcagctactggcatgtggcgtttagatggtcgcatatattggccaaatgtcataacgtcaacccctgctgctctcaccttctccattgtcttaaccacttgatcaggggtctctccacatcccagcattacagaagtctttgttaaggtgcctgcaggtgcatactccttagccatcctaagcacatccaatgactgcttaaagttagcacgatggtcccgcacaaaactctgaagctcttcaactgtctcaatgttgtgagctaagacatcaagccctgacttggaaaccttctcaacacatccaccatctccgcggaaatcaggaactacatcatcaaacaacaaaacaaattaaaaaccaaaactcatgatgatcaatcccaccagatcattatattacctagtgcttcaatcaacatctccggcttcaagaatttcaatctctgaacagtttcagcaaaatgaccactcccttgatcaggtaaatcatctcgatctacactggtgatcacaacataatcaaccccccaggaagcaattgcttcagccacattgttaggttcatttggatcaggcggtggaggtgtacgcgatgtcttcacattacaaaacctaaaatagaagccctttcagagaaaagagagaatcaagctgggcaaattcggtagatgatgatacctgcagccgcgtgtacatgtatccccaaggatcataatcgtagcggtggcggttccagtttcaccaccagaccagcactcaccgagattgggacatttcgcttcctcgcagacggtgtgaagcttaaggtctctcaatttcttcttgatctggacatatctctcgccgccgggaattgattccttcatccatttaggtttcgggagaggtttctttttggttccaacttccaccgaataggtatcgccgtggatgaaatcggttagggaaggcgactcattcgccagccgagctcgaagagcctcgagactcttgggagattgcgttacggtgaccggagttacagccgaggaagaggagaagcatctcgacgccggacggaggaatctatagagcaaggcggagcgcgaatgcatctcaaacgtcctgagaaaaagtcccgattttggaggaatctcaccggtgacggtaatgagtttaaggtgacgatgaaccctcttcttctacaagaaggtctcatttgggcctattgtttataaactaaagcccattatattccttatcataaataaatgtaggcccattaaaagcttctttgtcgtcttctctgtttcgtctgcccgtcaaattttgaaaacacaagtttagatttgcttgtaagaactaagaagaatcgcattcacacagtgacgctctctctcactcacttgcaaaaaaacattcccttttctcttaagataacataaagttctcttactcacctttttccttcgtctgtcgaatcatattcttggctgctaagttttgcttttgaattttcaacgactctgttcactcacatatctctcttagtgtctactggattcggaatg

SEQ ID NO: 13121 - DNA, 3000 bp, Unknown
  misc_feature (1)..( 3000): cDNA_ID_2710535_gDNA_ID_2214599_Annot_ID_135522 3000 nt of promoter + ATG
tctgcgtgtaatatacgtttcaatggattcgagtctgaatacaccagtacaccaccaccaccactggacaacaatacataaaaagacacaaaccaaaataattgttagacccacgttacttaaaaaaaacatagatctgagtcgaaaaaggtatgaagcttatagagatggtatgcattatatcatgcatcacagctagggaagaggccaaaagaggacaagcgaaaaattcggacacgtgcataggagtggtcaaaaacatcacaagactaaaaatactaagaaaacagtcaaagcatctataaagagaattggaaacaaaagagttatatagattctacagctaaaagaagaataagaagaagaagaagaagaagaagaagtgtagaatggtgaaggagatctaaaggagaataaggagagacctgaaagtgctgagaagaagaatcttggaagtagaagggtaagccttgaataagctagaagctctctggtaaaagctatggaaactcatgttgatgatttctcaaacctcagatccaaaagaaaacaaagctgagagctttggaagagaggctgcgaatgtgaaagaatatgcaatatggaaactatcaaagctactttagggtacgtgagagagaggtcggcgacacacaaaacaaaatttaaagaaaaaagaaaaaaagaaaagacagtgaggtatttaggaaattggagtaacgcccaagtaaatttaggtatattcttttttttttttttttaaagtaaataaacagcagatttgtttagggtttgactttctctcaaaactcgagactttaagcgacattatgttccgcgttccctggagattttttattattatatatatttggaattcgaacaactgttggattcgattttgattttcatttctgattttatttggaatactgtatatgataaagctaataagaagaatggaataaatacctcattcacttctatacatgcatgttacaattcataaaattcataactaaactttttatgttatatatgcatgaagactatgagattgtgcctttacaaactcttatcgattacaaaaacgatattgaggtaagtgcttttgaagatattaatagtttttaacaagaaaactattagtttgatgtctttaattaaggttcaatttatgaaaatgcttgcgagtttaaagagaaagtatgagaacaatcttgtgaaagccaagaatggtgatgaacatatcagacttcatgatctcagggcttttcaattgtctaagtttgtttggggagatattgaagaatcacctgtgaaatcgaagaaagttatgtctatgaaccttgagcttggtaaaaacaaagatacttttcccaattcttctcttgttagatcactagagcgttttggtgttgatgaacttactcctcaacaaggattgagtagccttgacttagaggataagaagatattcgaggagcagttggaaagctttgcaggttatagaattcgagttctattcgcgaaaaagtggttttcttcatgaagtgttagcaaagatgattgaagcacttcgatcaaaaacttaagagttttaagtctcgaaaaagcttcttacttatgaaaataaaatttgatgattgtgattacgaagcaaatgtcaaaaatagtacaaaatagctccaagattaagcatgaataaaagagctattatgttaaacactaaaaaaggaaaaaatattacatttaatatgttccagggtaggtctgggcgtaatatccgaatccgtagaaccgaactgaacccgacctgaaatatccaaacttgttatacttcggtttcggctaattacccgatcatattctgttttcaaataaatgtgggtatcgggtattatccgaaccgaacccgatacatgtgagtactttttattatttgaacatatatatacatatgaggacatatatgcactaataacttgaatttgtgacttgtttaatgatttgagttatggaacgagctcaaaacaaggtttacttcttgttttatattattttcttaaggaaaaatttgttataattttagatctttggggttttatggatattttaatatatgtttgggtataattggacaatgtttgggtaagtaatactcaaacccaaaataattttggttatgtatgggtttttaaccaatacccgaattacttgtattagaagtgaacccaaaccgaacccaattcaaaattgtacgtataacccaacatatccaaaatttctaaatatggaaagaaaaaaaatccaaaatttctaaacccgaaaaactccaatccgaaaaatttgatccgaacctgacctgaataccgacatgcccagagctactccaaagtggggaaaattggctcggattagtgtggatgaagtttttggctttgttatgtagttttttggcttgaagaccaaaatttatatagttccaaagtccaaactagcttagagaaattgaaagccaaaagagggtagatatgtcttttaacactctcttacaaaaaaaaatagttacttgattctcaaagaagggtgaattcgaggttttttgcagcgaagagaaagaagatggtcggttgagctatttttgcttctcccgacaaaattctcagatccgaatacttccaccatcatcattcatttataagatctgggttttacacagctctgcgagtacagtaactatgagaaggagaggaggggatagtttccggagagctggacggaggaagatctcgaatgtggtatggtgggttctctctggtattgccctcctgctcttctttctcattctctccaaagctggtcatattgaacctagaccctctattcctaaggtatattcaatctcaaagatctcttcttttgttcgatttcaattgctaaattcgaaccctttcttttgtgcagcgacgttaccgtaatgacaaatttgtagagggt

SEQ ID NO: 13122 - DNA, 3000 bp, Unknown; identical to SEQ ID NO: 13109
  misc_feature (1)..( 3000): cDNA_ID_2710489_gDNA_ID_2214599_Annot_ID_135523 3000 nt of promoter + ATG

SEQ ID NO: 13123 - DNA, 3000 bp, Unknown
  misc_feature (1)..( 3000): cDNA_ID_2992094_gDNA_ID_2214599_Annot_ID_135524 3000 nt of promoter + ATG
tgcatatcatttgtaagtattatatgggtatttagtctgtcgcctcactctcttattatctattctggaaagtttagccacagtggtttgtagctacagcctttcaaacatatgtctttcggttttctgaaatctgttgtgttattttccaggaaatcaagcggaaagaagatgctatagcacagggtatctttgtcaatattatcttttgtagaaacctgacatttcgttccatgtgaaatgctcatgctgtcatctttattttggtagccggaattgtgatagaagagaaaaactggccaccgttttttcctctcatccatcatgacatttcaaatgagatacccatccatctgcagagaatccaatatgttgctttcacatcaatgctgggtatgtgttttctctttcaaatgatcaacgcatctgcagttgcaacagaggtggatttcttgatatattagtaaacaatcttaatctctgtttggtaggtcttgtggtgtgcctgttatggaacattgtcgcagttactactgcgtggattaagggagaaggtaagtcttggaacagttaaaatttaccaagtagactgaacctgtatgatgctaatctgctgacttatgtattttggctgtaggtccaacaatatggtttctagctattatctatttcatatcaggggttcctggagcgtatgttatgtggtatcgccctctttatcgtgccatgaggtattcatgccacttaagatttttcctttaaaatatcttatctgctactgcgtcgtgtgttcctttatttagagggaaaacaaaaagagtattccagatagcatcgtagttaagagtcaaaactttcattgagatgtgtgttgatttggttgtgtgcaggactgatagtgctctgaagtttgggtggtttttcttcacgtatctggtgagttttccatttggtttcagtgaactttttttaatggctttgacacatcaaaaggtggaagtgagtaaaagcttaaaatatgattgcagtttcacatagcgttttgtgtgtttgcggcggtggctcctccaattatcttcaagggaaaatcgctgacgtaagtaacaaattagtttctaaatcacacaaaaggaaagaggtggaatcatcatatgttgttgtgttatgcagaggaatattgccggcgatcgacgtattgagtgggaatatcttggtcggggtaagttgaaagcttaggtagcgaataacttaaacagttgtggactttgagtaaggctaacttttggtgaggtggtggcagatattttacttcattgggtttgggttcttctgtctggagtcactcgtcagcatctgggttattcaggttccctcctttgctgaatcatttattcatgtagataagttaaaaaggaagaagtggttaacaagttgttgttgttgttgtgtgtgtgtgtgggaacagcaagtgtacatgtacttcagggggagcgggaaagcagcagagatgaagcaggaggccacaagacgagcaatgatggcagctctctgaccaatgaccacatacacacaccttttaacccatctccaattttttcccatttaacatacaaacaaacagtgaacgttagatcctcttgaaggggattgattatactccgctactcacttcatttttgttttcctcccgatttcatttaactaagattccagtgaactcaacttcttacttttttttggtaaaaggtgaagtcaacttcttacttactttttcttattaatcatctttcaaagaagctccaaattgtgaaatcctaaatatgcaagtaaacagtccactcagagacgccgcttccaacgcatacgtgacaactaacgtatgggtgaccttaacaataggcatcatttcgttgttaaaataatggctacgaacgagaaagtcaatgggtgtagttaatgaagaaatgggcttctgtagcaataaatagtcaaacagttgagagtgataagaagatgttgcacaagtggtgattataattcaatgtcgaatttgaatactcaaaagtcaatgcaagtcagctgtatctgtgtgtgacacgcggccccgatccgaacggttagataacgcccaaactgctatttaagacacaccactaggcctctttgttccaacaagacctcaaataaaaacacaacaacaacattcaagaaatggccatcttctgtttccttgtagaccagagaaagaaagtccgggggaggaagccagcggccgggttgtgctcaagatgcggaggaggagcagttgttgccgacatgagaacctccacaagattctgtggggtccctttttaccgcaaagcttggaaagctatcgtctgtcatatctgcggtgctgtcctcaaatcataccactgagtctgatgaaccaacaacgttttttgttttaattcattcgttttttttttccaacaagctacttgccattgtatgtcgcttgattgcctactttagactcttaagtcttagctaatgtttttgtttttcatttatctctctgtttctgactaatgcaagtgatccttttacttacaagtctcttcaaaacatgtttggtaagaacaccacttaataggaaaaagcagaaaggcacatgaacgtgatcccccaacttgctatacagctttcaccattcaatgctcttctctctctcccgttctttagatccctcaggacagttatattgggcccaagtttatgatccaagaaggcccaagttttgtattcattgtccattatcaaatagtataccctaaaattattttacaactttcatcacctccattaattctgctgctgcaaattctatcgaactggtgagttttgttaatctctttcctcgttcgtccttgtctgtatatcagatcgatctctattaccgttttagcttgttcttgatctttgtcaacataaaaacaatcaaacaaagtttcttctatg

SEQ ID NO: 13124 - DNA, 3000 bp, Unknown; identical to SEQ ID NO: 13120
  misc_feature (1)..( 3000): cDNA_ID_2710539_gDNA_ID_2214599_Annot_ID_135526 3000 nt of promoter + ATG

SEQ ID NO: 13125 - DNA, 3000 bp, Unknown; identical to SEQ ID NO: 13119
  misc_feature (1)..( 3000): cDNA_ID_2710492_gDNA_ID_2214599_Annot_ID_135527 3000 nt of promoter + ATG

SEQ ID NO: 13126 - DNA, 3000 bp, Unknown; identical to SEQ ID NO: 13118
  misc_feature (1)..( 3000): cDNA_ID_2713087_gDNA_ID_2214599_Annot_ID_135530 3000 nt of promoter + ATG

SEQ ID NO: 13127 - DNA, 3000 bp, Unknown; identical to SEQ ID NO: 13117
  misc_feature (1)..( 3000): cDNA_ID_1985373_gDNA_ID_2214599_Annot_ID_135532 3000 nt of promoter + ATG

SEQ ID NO: 13128 - DNA, 3000 bp, Unknown
  misc_feature (1)..( 3000): cDNA_ID_2710604_gDNA_ID_2214600_Annot_ID_135536 3000 nt of promoter + ATG
gggagagtctcacgttcaaatccaaaacctcaagttaaagaacatatatggaacatcgaagaacaaagtagcaatgaatctgcaatgtagcaaaatctttccatgcaaaaatgtggagctaattgacattaatataaaacagaatggagtcaaagatggttcttccacttcggtgtgcgagaatgttgatggttttgctcgcggtaaaatgtttcctcaacattgtctaaattaattcgacggtccatcaaaacaatgacgatattttgtatatgttatttttatttactaaataattgcttaagtgtatatatggcttatgttttttttttatagccaaaaattccaaaccatatcgtaaatatgtatatatatgctttttgataagtttacatcaatattctacaataaattgcattttctgaatttattagtgtataaacatggattaacaattggatataaagagctaagaaatccaatcccattggtgtacactccgctttgtgttgcattttttggaaaaccgttttttgtgaaaaaaaattatatttatacaaaaaagtagaaataagtataatgcattttttttctttttcttaaatagtctttgtttaaatataatttggcttcatctgttccatataacttgaaccgagttcttgaagtaaaagaactgatttgtgattcttctggtgatcagaacaacaactgaacaaactgtcttattgttttcaaagaaaaaaaatatactaaaaaaggcagtgagttcaatgtaatataatgtggtagcacacactaataaccagaaaaaagattcttgaatgtggtagtgatcgttcagagaagagagaaaagtatattagtttttttttacttgtcaccaattcacaatgattaaagctccagactaaccgattctgtgattttatcattcctttattcaatcatgacaatcattagatcattacacatcttatacactttcttatattcatcacattaaaacacctctactggattcaaaggtacttacatcttctttgtagattatggagagaaagacgattgtcctcgtcaatttctctgtatactgtagggataaacatgcaaacataaaaagtcatggctctaccaaaatcgtaagctttagcttattttctttcaaacataaacagttgctaaatcagctaaacttagatgtcacttgcacatgatgtcagtgaaaagatggaggtgaatccatgcatagatgcaccggcttcctctgatacaacgatagctttcaggaattgccatcacatcttcattcttttaatcaatgttctaacactctgctcgagtttctcggcaagccataataaaaatagctgcagtctcagacctctcatctagccatatatatatatatatatatataatttattaattataatactaatgagaccatatatatataaaaaattatgactttattattttgtcaatatttttttttaaaaatgttatagtgggtcgtcccaagtgggcttaagcctaattcatatacaaatccaccgttacaaaatagaacgaaattaggtcaaattttatgatgtactgattcattttttttttttggtcgtttataagtgttcatttttagttataggctccgattggtaaccacttttgaggtaaatgaatgagtaggaaagtcgtgttcctctttgttcttcagtttttttaccaattgcaaggtatttttgttccattttcagatatgtgggtcctacatttttcctcatcattcctaaaaaaaaaatgataaaacaaaattctttcaccccaaaattgtaaaagaaccaagaggaacaaaaaaataaaattcgtttttatttattaaataaatttaaaatagattttatgataatatttatatttctatatataatattttccatatctttagtatatattgatatataaatttttttttatcaagctttcaatttaatgaatgttataaatttattttaaattagtataaataaatgttttaaagtgaaacttattttaaatttgtaatataatttaattttttattataaaataaataaatgttttgaagagaaatttataatataatttattttaaatttatgcagaactttaattttaaatgaaattaataaacaaaattcaaataaatgattttttactaattattatgttaaatactattaattcacctttttgattactattacaataatcattttgttcaattcctatgttactcttggttcctacttattgttattttcctttttttcttattttcttttattctctttcattcatattcctattgttctttttgttatcaccaatcagagccagttcaaattaattttgtcaaaaccttagaattcacaaaaaaaaattaccaatcagagagaaccgttttgatactttgatttatcaaaatagtagtaagtgggattaattactctattttatttattgtagaaatgctaaagacatatctattaagaaagaaaaaaatcaaggcttagtcgtcatcactaaagtaagaagtcaaagtttggttctacgagacacatcacatatatattcgattcccaatttatagccaaccaaagaagactcggtcctaaacgaaccagaataaggcaacacaaaaagtactaaaacatgacgtgagcaaagacgttagattcgcctccattaattcatctgatcttcttccactgtcttcttcaacgtgcacacgtgtctgtgtatatatatcttgaatgtctgaatctggaagaacaattcaagaccgcgtacaaaactaaatccaatccagacaagaaaccgtcgttgttttgtctgatcacataacacatttcagtttatagatctgcagaatttgttttttgtatttttgttctgttttcttttgattttcttcttcatcctgtaaaacctagaattttgtttcttcaaccaaaa

SEQ ID NO: 13129 - DNA, 3000 bp, Unknown; identical to SEQ ID NO: 13128
  misc_feature (1)..( 3000): cDNA_ID_2710604_gDNA_ID_2214600_Annot_ID_187021 3000 nt of promoter + ATG

SEQ ID NO: 13130 - DNA, 3000 bp, Unknown
  misc_feature (1)..( 3000): cDNA_ID_2710600_gDNA_ID_2214600_Annot_ID_135537 3000 nt of promoter + ATG
cagagaagtctctgagagaattcatattttgttcttccccttcatggctcaaggccacatgattccaattttggacatggccaagcttttctcgaggagaggagccaagtcaacccttctcacaaccccaatcaacgctaagatcttcgagaaacctattgaagcattcaaaaatcaaaaccctgatctcgaaatcggaatcaagatcttcaatttcccttgtgtagagcttggattgcctgaaggatgcgagaacgctgactttatcaactcataccaaaaatctgactcaggtgacttgttcttgaagtttcttttctctaccaagtatatgaaacaacagttggagagtttcattgaaacaaccaaaccaagtgctcttgttgccgatatgttcttcccttgggcgacagaatctgctgagaagctcggtgtaccaagacttgtgttccacggtacatctttcttttctttgtgttgttcgtataacatgaggattcataagccacacaagaaagtcgctacgagttctactccttttgtaatccctggtctcccaggagacatagttattacagaagaccaagccaatgttgccaaagaagaaacgccaatgggaaagtttatgaaagaggttagggaatcagagaccaatagctttggtgtattggttaatagcttctacgagctggaatcagcttatgctgatttttatcgtagttttgtggcgaaaagagcttggcatatcggtccgctttcgctatctaacagagagttaggagagaaagccagaagagggaaaaaggctaacattgatgagcaagaatgcctaaaatggctggactctaagacacctggttcagtagtttacttgtcctttgggagcggaactaatttcaccaacgaccagctgttagagatcgcttttggtcttgaaggttctggacaaagtttcatctgggtggttaggaaaaatgaaaaccaaggtaaattgtttctccccagccattattaaccaacatagtaatgttaatatttgtgtatatattcgtattgccaaatatgctctgataccatggcaagtaatagattggctcatgtattttatttgtgatcatgtagaattttcttaacagttatgacttggtgttggtatggttgggacaggtgacaatgaagagtggttgcctgaagggtttaaagagaggacaacagggaaagggctaataatacctggatgggcgccgcaagtgctgatacttgaccataaagcaattggaggatttgtgactcattgcggatggaactcggctatagagggcattgccgcggggctgcctatggtaacatggccaatgggggcagaacagttctacaatgagaagctattgacaaaagtgttgagaataggagtgaacgttggagctaccgagttggtgaaaaaaggaaagttgattagtagagcacaagtggagaaggcagtaagggaagtgattggtggtgagaaggcagaggaaaggcggctatgggctaagaagctgggcgagatggctaaagccgctgtggaagaaggagggtcctcttataatgatgtgaacaagtttatggaagagctgaatggtagaaagtagaggaagagaatatgtttaatgttctgagatagattattgactttgtgttcctctttggagttgttctttatgtcatcttagcttttgctactgtttagtaagagaaagtccattgtgtgtttctatataataaagaatagacctgaagataggcattttcaagtttctgctttaagataccaaatcttcgttgtgcatactttttacttcttgtgatcttactatgtgatttatatggcatggattatataggtcggattttctttgaattttaagtatataaatttgaagtaacaaagtatgtgtagtaatgatgcgatgaaaaattggtaatgaatctagggcctaaactagtatagtttcaggtttattccaccaaactcttagcgtatgtcacttggatccaccaaacttgatccaagcgttttacaaaattgtataccgagctaaaaataaaacattctttgttgtttccacaaaccttattttctaacatagcctacatgtctttctccttaagcactcattcttttggcctctcgactctttgaaaatctctcacattaagacttaatgttacccaaacctaattaaactactcgagaaccccatgttcgtgtccatgagaattctcactcaagtcttccctttagccacttacaaaactacttgtagaactatggctatgaatgatgacataactcgcacccaaaaccgcatcgtaacagtgttgtaatagtatcaaaatctttacatatacatatatatctatgtatttttgttactatttaaaccgcaccgcacttctcccacaccacaaaacgcagtcactattcggacaatatgttttaaaaacgctattttgccattccccataggctcatggctttaaatgcaaagccttcgaaatttatggctcatagcttgcacaatactcatcgctaagtgagaagtcaaagtttgcttctacgagaaacagaacacatgtgctgactcgattcccggtttgtagccaaccaaagatgacgaaccagaatacggcaacacaaaagtaaaatatgacgtatgcaaacacgtaagtgatcttcgttaattaattttttatctgatcttcctccactgtcttcttttaagtgcacacgtgcgtgtatatatctcgatatggccgaaactggaagaaacaattcagacaaagtcccaagctaagaaaagagactctctttgttttgtctggcagaatattttccattcttgttctgttttcttttcatttttcttcttaatcctaaaaccaaacatgaacagagagcaaattcatattttgttcttccccttcatggctcatggccacatgattccactcttagac

SEQ ID NO: 13131 - DNA, 3000 bp, Unknown
  misc_feature (1)..( 3000): cDNA_ID_2710584_gDNA_ID_2214600_Annot_ID_135541 3000 nt of promoter + ATG
aggctgagagtcttctatcctctcaggagacgagttgaggttgattctgccactttgactcgaagaaccttcttgatcaaagctaaagaccacacctttttcctttgacagatcatggtgaacaattggaagagattccaatcgcagaactgttttttgagtaaaagggtccttttctgcttcactaactgattgaataactctatccactcttacagatcgttcttcagcatttgcgacccgaaggtattgacgcataccttctaacacttccggagcaattctcggccttcccgtgtttggatccactcccacctggctttctttcaacacaccaaataaagggtctgattccttcagaatcggaggagtagtagcttttggaatgataatgcctttccttctggctgtagctaggtcctgtctagcttttactaggatagggcaaacatctttttcgtgcgtaagccgttgacactcataacacctcttctgaatcctctcataatgaaagttaacagtcgctgaccctccatttctgaaattcacaacttttgatctccttaagggtcttgagacatcaaacagcaccttcactctaacgaactcccgaatttgtttcaattctgggttaaagacgacttctttaacttcaccaatgagatcacccagcttagtgatcgccttggccgtgttgtaattgactgggatattccaaatttgaacccacagtagcatgtaacgaagatagtcatccggaggattttcataccacctatctaccacgattgaccaatcattgaaggtatgaactcctttcgctagcacttcctctaaatcatgttcagagtcgaaaatgaactggaatctctcattattgagagctattcctttgacctttccttctttctgccacttccttggcatatttcttaagagattcttcatcggttgacaagccgggttcaggacccttccaatgagactgaatttgtttctctcactagacagatactcaggaagatctggcatttcaaacggttcttccttttcttccaacgacatctccatcaatgccctatccatggcggatgacatcttcaagctaagaggaaaacagacaccgtagaactaagactatcgagctgaactaactccaccaacttcttcagaaaaaacagagatatggaacccagatctgagaaaacgaaagcagtagagcatggctgagaggatatgataatgaacacgaagggttagaatagttaatttcggctgaaaagaaagatggtttccggtcaaaagctttattttaaacctagtgaaagacactaaaagagaaagagggttctaagcccaaaagatagatttctaaaaaataatcacttgttaggattggatacttcgacgtcaactgctaacgacatgatatacagttattgaaaattggtaattatgaagttaaagaagtctaaacatctcaattgaaaaatctcaaattattcttacggtgacagttgtctttagtatgaagttattaccatagctagagcctaaaggacagcaccaagaccaccactaagacaagtgacgtcctgcaaaatctaacacttaaataaaattgtcagagaagattatttagcaccaaacttttattctattaatttccaaaagaaaaaaaaaaagtcatatctttccaaattttcattacataactaacattttgtcacatgaaatctgtacgtctctgaatcttctcttcttctccctcatccattgcttatgtgcttcttcttctgattaccaaattttcattcctcttcttctttctgataaaaaagtttgcattttttttctttgttgtgataatcgaaaaagagactaaaacctaagaatcgtgcagaggagaggataccacaccacacccagaaattgaaactaccaaaaagtttatgaatttgatttcaatttcaactttttatgagacccatttgattctttagggattttgaaggtaccatttgtctcaatcttataaaaaatttcacctttttttttttttttttgttaccactatgtgtctttaatctgtgttcattgttcagatcgttgtgaaatttggttcgtgattcgttgcattgcaatagctagacggatcgggattgacccactttaggtttctcatctcaaagattgcgaaattttctaatttggcatcggattgtttggatttgattgcttatgtaagtaacttgatttggttggtaacttggtattgcaatcagaaaatgtgctattcagtgttcctttgtgattaggtaattaagtatattagaaccgcatggtctttgttctcaatgctagtttagttgttttggtttcatgaagtagaagaagttttgacaatatttactctctgttgtgttaaaaattagcatagctttatgtaacatgtaccttgttttctctgtactttcatcttttgaatggattctatgttaaagaatccattgatgaagtttacaagtggtagtttgttacttgcttatatgttagttattacactagtttgacaaggttttggtacttacttgctcaattgctacactcacactgtgaaattcatgatttatacttatttcagttatgcaagaaacttttgattacataggaatgatgtttttgatatatgatagataatttgacatttattagtgaaagtttctgatcttgcctttttgtggtatcaattggaaacataatgcagaagctatagttggagcatgagtgtagcctgaagctagattgctggctggtatgtggtgatcgtaatggtaaatagggtgcgcttatttcagttttttaattttccctcattcatggatttcttatgcatatttattttcttgtttgtttctgtttgtgtgactctaggtctcctcaaagttcttttaacttttgttctatttactggagagtccttgtgttctagtttaaggt

SEQ ID NO: 13132 - DNA, 3000 bp, Unknown
  misc_feature (1)..( 3000): cDNA_ID_2710580_gDNA_ID_2214600_Annot_ID_135542 3000 nt of promoter + ATG
gaaattgataaatccattacattgttgtaatgattttctgtagtttgattgctttcgtttcctctttgtaattgtgaacaagttgttgttaatatcatgaatcattcagacgaaaaaaaaaaaaaaaagagttagagaactacatctgtgttatctcgtttactccattttctcaatcacagccgacaaaatactttggtttagcttgattaaaattctctttgaactagcgttagttgttaagtttacgtgggaatgtgggcatagatacttttcagtactactactatactggacacttgcatctgttttgtgtcatttaaaacaaaaaccatgatttgctaactaaatatttgacaatatttgctaactaaataattacagtttcgccacatgacatattattgtgaaaaacgcaaaaatacaatatttgaatccacatagagagacggattatattataccaaaatgttatctttctttcttgactcttttctctttcaggcacagtctccgagataactgaaagaggcaaatgggttcaaaattagtagatctgaactaatttttttagctattttgggaaattttccctcttttcttgccggagtctcctttttctcttctcccctcatggttttcttctctgtttcttttagccacagactttgcttctcatctgctctctctcaagaattcttctgctgagcttttgtgaatgcaaagaaaggctctcatctcctctgaagtttctcctgcaatagcagagtttttgcttgtttctagcttttagctaagtctgtgtgtgttattacacatctctcctctgcttaccatgtcgaagagaattcgcccaagctggtacagagagtcccctccaaaacaacctccttttgcttttgaacctgaagaagaagatgatgttgtcattctccctcaagtggataattcagcgctccttgctcgtctccatctcagcctcgtggggagaatgttccaccaaggaggacgcagtactaaagcccttctctcttttctccctaaggaaaacatatgggatgtggagggtcgagtccgaggcgtttctctcggagatgctcgatttcaattcttttttgaatctgaagttgacctccaaaaagttctcaacaagagaccttgtcacttcaacaagtggtctttcgcattggagagatgggaaccccatgttggaacctccttcccaaacatcatgactttttgggttagaactgaaggcatccctgctgagttttgggatgaagaagtgttaagaaattttggtaactctcttggtttagttcggagagttgatccctctaaaggaagaattctaatctctgtgacagcagatgttcctctaagattcaacaagaatgcacaactcccctctggaacagttgtcaaagtgaaactttcttatgaaaagctctttcgctggtgctcgtattgtcgccgtatttgtcacgaactagagcagtgtcctttactcgatgcagaacaaaaagctgttctctcagctgaggaatctcaacgtaaccttcgactctctcttagagatggagatagttctcaagctcgacttcctctacaatcttttccagagtctaaccgttctagatctgagagaaatcacttacccttgctgaatggtcctccttcctcaagaccatatcactctcgtggagtcatcagaagggaagaaaacaacttagcttcaaggtctggtcgcaatcgatcccaccgacagccttaccctgcttccctcaatcagtaccctgctgagcatgcttccaagctgaatcgacctcatggtgctgtctcccacaaacgcccagcctcccctgttgtcactagaaacgccggtgttgatgacggaaggaaacgtcgttttggtgattctttctccaaggaaaaaagctctgcacctcctaacaaacaatcatcaccactcctctcggattcacaattgacgctttcagacacggtcttggctccctcaagggctaaacagataacctcttccccgacttatgtcagggaaagaccattccggttaaatctctctaagaaggcttccgctttagagaaaggtaaaggaaaggttgtggagcatcctactccgttgctaggtgaatcctctgttgttgggagctcggctaagaaatctcttaactttgaaccctctgaaccggctccgaagaaccttgatacgcccatctctgtaacaagcaagtcgctggagccacaactggaaaaacgaaagagttggtatgatatgactgtagaagaagatgaagctactgcgagaagtcttgagtccggtccggatacaatacttgcagccaaattctcgcaggtggtctctttcgcaagtccatctgtcgtctctccatctctctctgttcttccatctcctgctgctccggaggatgagtggaatgagtctctcaatccgctctcggaagctctaaatttggattggactgaagaagacgaggctgcttaccatcttgccgacgacctagatgtggatgctgacgatttgttgagtgaggagcttcaggagagtcttcaggatcaatccggtttggtgattccggggagccatgtagcacccatctctgagcttcagccggaaaaattgaagagcttgatcgtgagctcgcttcaatcggaggaggtggggccgtctattgctatccctaggaggaaggactcaaagaagaaagttgtgccccattccagaaaagcccaactaaattcgggcctttgtttgaacttggcttcaaaaaaaattcatcacatttagggtttatctcccgagaaaaggctatccaacaaatccggcccatctaggccgagatcctctaggagaaccacgacgggtaaaagaaatggagtgccgtctacttccaagactaagagtccggttttgagtgttgtttcggaagggatcccaccttccgacaacaaaacatg

SEQ ID NO: 13133 - DNA, 3000 bp, Unknown
  misc_feature (1)..( 3000): cDNA_ID_2713155_gDNA_ID_2214600_Annot_ID_135544 3000 nt of promoter + ATG
ttgattgcctatctttagttctggtttaagaatgataaatacttgtgtggtcaaatttgggaatgaaacttaaactttagttttttttggtaactttatgaaaaacctgttttcattttcttatgatcgagatcatatatgtaggtttagctgcttttctgctaatctagttttgaagctatgttaggtttggtcgaaagtgccttagaactcatagtttataagtaggcatgaattgtaactactagtgtctatatatacattaaaacatggtcttctgccttgtgtacggacacaaattcgtatgccggaacagtatacttaactgaaccgcataactgaaccgtatacagaacagtatgtcgtaacgctggtaaaggtaaaatagtcagattttggcataattgtcaaaatgtgagattcaaatctcactttgccaaaagctgagaccaaatcttgtttctagcataaacgtgaaaatttctttaagcttaacatgtgagccagtgtggttccaaatgcttttgattcccactttcatatcttttcataaattaatttgtaactttgggttaccttctgattgtatgacttgttgatacaacttggtctacttccattgtttattacaaaaccaaaaataatgtaaaatgagatgcttaggttgtcatgttgaagtatttcaacattttcagttacataggacactacttccagttctttgagattgtcttgttggttcgattattagaatatttgagttttgaaatcctccatcacgtctcattttctctatgagcagcagctgaagttacacaacgatcatgggaagactcagttctaaaaagcgaaaccccggtgttagtagaattctacacgagttggtgcggtccatgtcggatggtccacaggataatagacgaaatagcaggggactatgctggaaaactaaactgctatctccttaatgcagacaatgacttgccggtggctgaagagtacgagataaaggctgtgccggtagttctgctcttcaagaacggggagaaacgagagtcaatcatgggtacaatgcctaaagagttctatatttccgccattgaaagagtcttgaactcatgaagaaggtaacaatcgttgatgagaactctcactaccactttgattaaaaatattgttggaagattatcatcatcgctccattgcgatatggttgatgtctttgtttcttcttttattctctgtgaatataactgttgggtttgtggaaagatagctcaggaagtattgtgaatacataaatattccttcttcttattgatgattttagtgttctatattttcttttctttgaacttgtttttatagttactactgttgttgcctttaagaatttgtcaattccacctatgaaccttcggtcctcggatttcattagacgaaaagaagaagtttgatagaagtactgatttagtttggttttcgtttccacgagactcaatccagccggtttagtttctggggaattcgtttccaccgactcatgtcccttattcattctcgtcggtttatgtttataatattttgtgtgacattcaataaaggtttttcagtaaaaataaaataaaaaatacgagcaagagtaaacaatatttgtctattttgactatataaaatgggaaaaatatcgtttaatatatgaattttaaaaaaatagctatttaatatataaattttgtatataatcaattaatatatgtaaaaatcgttaattaattattttacacaaattaatcgttgaccaggttaaaattcacacgacgttatctgacgttaacagattgataacaaccgttaactaatcttcattagtttccaatacgatgtcattttgattatagcaaaaacgggaaaaatgtcatttaatattccaattttcaaattatatccattttaaccatcaacttcacatatgaccattttatacatgaaataaacgctaaccaacagtttaaaaaataagaatgtgttgaccaggccaaaaaaacatactgctatctaagcgtagatattcgaatttttgtttggatttggtttggatttattcagatttagataattcaggtaaagagtttattattcgttaaaattttatgactatttatttcggtttctgttagaatatgtatcatattttaatcgatttacataaaaaataaaataaaaaaattgtttaatatttttttgatatctaagttatttagaaaaaaatgtcgtttaatattttctatttaaatatatatatatatatatatatatatatttatttatttatttaagtgtttagaatcaatattttcatcagattttagtaaaattgatattttcaaaagaatttcttttaaaaaaaacattttctgcaaaaatctatttgccccaagcattacaatacgtaacagatcggattatcctttttcacatatatgcaactattctctttcaaaaagatcaaaacatttattattggatattcttttggcaaaataaaaactagttaataccaccgactctctctttatatgctttctctggacaaacgcaaaaacttttgtagaaccctaaaaattcccaaaatccgtcggagaagaagatcgagaagaatcaacaactaatctgaagaattttccaaattccgtcttcgtatcgtctacgagatccttatctctcccctgaatctggtaaaatttggtttcgaaatgacgaaatcaatagattctactttctcctacatcgcaatttctcgaacttcctttcataatcttcactgatctgtagctaattgtttatatgtgaatctctttgtttaatttccgtttccaggaacctttgatgatacaaaacgctatgtcaagttattataatccatcagcagcaacaactttagtctctattgattccgatgaacaaagaagaatcaaatacctagcggatttaaacatg

SEQ ID NO: 13134 - DNA, 3000 bp, Unknown
  misc_feature (1)..( 3000): cDNA_ID_2713153_gDNA_ID_2214600_Annot_ID_135545 3000 nt of promoter + ATG
aaatgcaaagaaataaatcgacaaatgttttgagtaaaaaggatattttgaaaatataaaaacacagtaaaaatgcttttaaaagtcatactacaataataataataaaaagtcatactacaatatttttaatacacgtaaatagtgtgagggtggcatagactagtaaagaaaacttattcgctttgtttcacgtttggtataaaaggttagaatcgtgtcagtttacgttacagtccaacatatttattaactacaaacaaaagtttttaacaaattaaaaagctatagtttttttagtatgccatatcactataatttatgtatttaatactcctccaatttctatatttgatgttacatatttttgcatgtaaattaaattattttttaaaaatattttcttatattaaacatcacataaatcatcaaaactaatacagaactaattaatctgcattaaaattttaaaatatcatctaatatgtcaagaacatattaatttagaaaatcactctacgattgatagcccattttggaggaaaatagtttacaaataagatttataaagtataaaatttagagtaacgaactagacaatctgcataaaaactacaagagcgaacaatattataaaacgagaaagaaagaaagaatcacgaagttggccaatctcatcaagtagattagagaaatcttgaaacatcagacgcctgcattatcaacactagctcgttactatcagttttgaacgcctgatcacaatcaatccttttaagatgatacttttcattgcccataaaagagtctccatttccgtgtgaagaagagagagactcgtccaatgacattttgctccaagtagtacagtttggttgtctctccgaaggcaccaccatctaaaacttatggttgaatccgattgtttccacgagccgtcaatccaacatcttactcactgttttgctaatttcttgtttcttctagatttgatagagcttctcccaacactaattgttcacttaagcgtaatttattatatctaaagattcggaatgtaaacatttaaagactttttcttcctattttttccataagaaccataaaatctatggaaaacaatgagatttttctttctcattcattaactggtaatctccaaaataagaagtctaaattcgaatataccaaaattaaaggaaaatatcttgctatggattttttttaagacagccatgagtcggctcccgtggctcactattgctagatccaaacatgagcaccaagtttagcgggttttgtggatggtcctcgaggttcatattctattaaattattattatttacgtaacaattcttttattttgttatgaaatcttgttcatcttcaaagtttaaactaagcttagacgcagacaatcaatatatcatcatcattcaattatagatggtggtctttgataaggattaaaaaatagtatgagtaagcaaagcatttcaaattaatccaaaacatagtaaaaattcatccgacatcatatttttaattgaaaatggctaaaacaatgtaaaataaaaaccaaatattgaaagaataataatagactttgtaaatgctttttttttttgaatgaatgtagaatctattcactacaaatcttgtgtgttccacatcttcatacgaatacatgtgggtaatctgtcatgcactgcacgccatgtaatcaaagcaaattttggtgtagcttcgacaaacccttagcccagctgcatgtaggttgttgtgctctcaaaagtttccaagtttcatttgaggagaatttccttttaaaacttgtcttccatcgccaatggttcacatcttcctcccatgtttttcatctcaatcgcatttctttgatttcagcttcaactttatttaagttctccactcgatgacgtctttctctgtgagtatcatccattatatcagcttttggtatcctaaggtctatacatcccctatcaccaaagatgtccaataatttccccacggaggaccatttttcatgccaaaaggatgttcctcaaccacttttaactttaacctgatgaaaactcttggccagtgccctgatctttagaattttcttctccatccaagacccttgaggtgagttgctttcacagcccaaaaaaactttttatggattagaaaactttttttggattagataggtatgaacacacttattctacaatgatgtcgaaacaaagagtagatattagcttcagctcgcaaaccttatttgttttcttgagtggtcttatacccaaccctccttaacttcgttgtaaatggttttctccacgcttgcttcacaaatcatgatcatccttacttacaatcattctcaatttcaccaccttcttctatatatatcacacacgaactaacataaatatattaaaacttaacaaattgactagaaaaaactttaataaaaatactttatattaccattttcatatgcttcaaatcctaataaccaactgtgactgtaaattaatgtttagcatttttgggaacaagacaacgtctcaaaactcgagctccaaccataatatgaatgctaaatcaccaaaaacttcaaaattatctaaattttaaagtgagtttttgtttttgtccggctcacccacataaccatatatatatatatatatataataaccattaaccaatatatatggttatgtgggtaagattaagaataaccattaaccaatatatcagaaacaggattggaagccaaattggatcatggtttactatcattaactcgattggttcgaccgaattctataattattattaaaataaaataaataaacaaataaataaataattcatctggacaagtggaagttcggttagtgggacccacttttctccgtttacgtttttcatctctctcagatctgagaaatgtcttcttcttctcaaatcactcttcaatg

SEQ ID NO: 13135 - DNA, 3000 bp, Unknown
  misc_feature (1)..( 3000): cDNA_ID_2713146_gDNA_ID_2214600_Annot_ID_135547 3000 nt of promoter + ATG
ttcaagctatggttgttttcgatatatttgaccagaattgtcatttcttcattttaaatatatgattacaaattgcagaatatgctagtatttttttttccaccataagtgaattatcttgggttgagcaaatagaaaatgtgtgttagatactttagatgtaggctggatcttgtaccagataacgaaaactggtttgcatggtattgcgacacgtatgtggaataacaaaacctttgtgtgtcggatcattctatcaaaatcaaaaagaagttgaaatatacgatacggtaaaacaaggtgcactagactaaagaactaaattttcgaaaagcagatgagaaatgagcccaataacttcaacaagaggtaacgtcctgccaccaccatctccttagtccaaacgtccacatgtacaacatttatttgcatatgggccaatgttttaaaaatatattaattttgaaaagcctaaagctgaaccgattgtaccgaatccgaaccgaagcaaaaaaaaccaaccgaattaaaaatttgaaaattgaaaataattgaatggatactaaacactataatccgaagagccgaaatcgaatcagtaccgaaccgaaatattttggataaccgaaaatatccgaaatacaattatatattcagaaattattagttatttgtagaccaaataataaaaaatacttgaatatatataaaaaataataaaaatactcagagataactgaatatctaaaaatatctaaaaatactcgtagcaaaataccaaattgatattaaattttaaaatcaaaagaactaaactttaaaaccgaaagtattgaaaccgaatagaatcgaaccgataaccgaagaggtaaccgaatgccaatgactacctaaaggtcttaaaataggcccagtcatctcaaaatcacgagaaagaacaaaatgataacatgtaggaacggtttatgtttcttctttagtatctgcgtaatttataaagtacttcttcttgcgtaagatacaactactaggtaggggggacgaaatatattcgtgatagataaatacatttaataattggatagggagatgatagaatagagttaatcacgatttctccgttagcgatcaaattctattactcgagttcagtttttcacttgtaaattttttttttacatctgagcttggaaaatcttgtttacatggatgaatcaatatagattgaaggttacatgtttaactgtgtgtttgtttttgttggaagaggaatgctaatctcgttgaataaaaagtgaaaattcataaactgaaaacttttcgctaaactcgaagtttggtatgaaactttttgggaatgcactgaagaattttctggatgaaaattagaagaaacagaaccaaaggtgtacagcttgtgttagatatcacataaatcatatctataaccaaacttatagacatgtttagaaataaatcatgttgaggtagatagtacgcacacggcacacttccttaagtgttcatttcaagctagtagataaacgatagggaaccaatgattcaggcatattaattagatgaggtaagtatacagttccaatgcaatattaattttaattaattaatttaacttcattgtgggtggtaacacaataatatgatttaatgaaataagtcatggttacaaaagttgttgctctatatccaccagtgaaccataatagtatattcatggctcttatccaattaaccaaataaaattttctaatcaaacggtttgaggacataaacaagtttaaaacaagagatagtggatgtgttttgtcacagccagatttctatagctttttctaataacagaggacaaacaaatagacgttagacttcccttcatcagatacatggtttcacaatgagatgtgacttgtgagtgttgcatgtgaagattcacaatgaaagtaatatgataaaaattggcaaaataacatggtccatggtttgagggaaacattgttggaatatcaatcatgccagaaattgcccaaaattagaaaataattgtttcatatataaatcatgccagaaattgcccaaaattagaaaataactgtttcatatgtatatcatgccagaaagtgcccaaaattaagcttaaaataattgtttgagagacattacagaaaagagagggtcttgtaaaaacaaaagacaatataatctcacgtagtttggtcgtttgcagagagattaagatccaatatttaaagacaaatcagcacaagcccgacaattacgagtttttggtcgcaatgaccaatttttcctcatttccaacaattagaactctcattaattagtcataacccacttctcaaaagaatagaaatcatattcataacttattttaagatagataatttttttgaaatatgttcttatagatttgttttctggtcaacaaaacattttcttatttattaagaatgcattcatcttttacaatcctaaaaaggtctgaaaaaaaaacttttgtcctaaagttaattataagttataacttaactttaaaagctgttaatttctacaatatccttctatttaaataattgctaacacgtcatcctgttattcaaacaaaatctattgaaatttaatattttccttatatactaacattttagagattttatcccaaaaaaaaacattttggagatagaggttttccattaaaggtaattaaaactggagatagagtttatacagtggaatatgctggccaatataatccttattaatactaaaacaaccccaaaatatggatcaatatatggctttacctcccaaaagagaagtaaaaactaatataaaattttaggagccttctcattccgaaaacattcacttttttctactacattaacacttttgtgtagatattattattcgtgttacatagcagaaatggttcttacacaatcaaaagaaacctagtcacta

SEQ ID NO: 13136 - DNA, 3000 bp, Unknown
  misc_feature (1)..( 3000): cDNA_ID_1807666_gDNA_ID_2214600_Annot_ID_135550 3000 nt of promoter + ATG
aatattattttctccgaatataatttagttaacattattttcctgaaaaaaaaaaaaccaaaattaagcccaactatacaatcgtaagaccaaacgaccaaatacataactatatcgtctaacaacaagtatataagatttgctatgagcagcttattctattttgcaattggacttctttaaaatgacattcatttcagattgtaaagagttggtattggattggatctaacaaaggagactaattggaccttcacggccttcctaagaagtaagaacggtgatacaaaatttcaccatgcttgaagacatgacaacaaaaagtccaaaagacaagttatccaaatcagaaaaacaaaacccaaaagacatgacaaccctttaattattttaaatcacaaatgtttgtggaataaaatcaatcatatgtaaaatcatacaaaattagctaattactgttttgggtttggatgcacaagtataagattttctattggctgcttactattttgaaactggacttcttcaaattggcattcatttcatattgtaaagagttgttattggatctaacaaaggaaactaatttgaccttcctttgttaatagtaaaaaaaattaattaatctaaacgccaaatagaacacaaaaacaatatataaatacaaaagtaaattagaattaattgttgattctatatagaataagaataaataaatatatatatacataataaaaagtttggaactcttggttctagaaccggccaaatagttggttttcaacattgaccggaaaagaacgaattcataaaattttgggattttaaactctacccaaactaataaaatagcatgtttaccagttcaattagtcggacaaaaaccggtaatgaaacaccaatagagtagggatgtgtcgtgtgtgaaatatttcaggttgtagtttttgttagtttgtcaagttgatttatggatatattaattcacgtggtcaattatttacgtcgaagatgtgatagatatttagtaagccggactataggaacaggagtgtggaagccacacgtggaatagcggtggagaataatttggatggatggcggtttaggccgaaccggggaaggttttgtttcttagacatcgtgagaagtcatacgttatgtccttaagattttaaaagctacaagagccactagctatttttcaattccaatatgataaattaattctttgtaagctaaattttattttaatttctaaataaatgttaaattttggataattaaccctaaagccataaacaattcagaaaaaaataacaaaattataacaagcctattcattgaaattcatatatgtacaaaaaagctataaatgttcatagtataaatgttttatgtactataatatgtatggatatgcaaattcatataaacataaaaaatagcagtgattaatatgagatatttagttcataatttgaatgtttatagtataaattttgttaattttttatataattaaaaatgacaatatatgaattttaataaccaaacataatgttgtcacctcgatgtatactaaattgcaggaagatgatacatataagttgaaaacgattgtgcgaataatctatagaaaagaaatataaattagaaaaaaaaagacaatgctaacgttttggtgtggacaagaaagaagacgttgcgacttgcgatgatgtttgaacctgcaggtagtttgattcatgtctctagaataacgctaaagaacacctatggctctgataacatattattaatatttacatttattttatttaaagtagtccattcataattgcacacgactaaatgctacacaacttgtcttagttgtttaatcaagatatttttaccttatgatattttgtgaaaaatgatacctataaaatccctaatgagcacatcaaccttttttaccttattatattttgtgaaaaatgatatctataaaatccctaatgaccacatcaaccttgaatcttctctaataaaccttttttccaaacacgcactaaaccaaaaattaacatctcaagaggaaaccatttaaaaaaaaaacagagttagattaagatcaacaaatatagttgaaaagaacatatgttaagcaacattaccataaattcataattagtagtgattaaaacttaagaatactaaagtatgaatatgaaaattgttgtatttttttgtagtatgtaatatgcggaaacttggatgttatcctattcattgaaattcatatatgtatgtagttatcattttttaaatatattaaaaaattaaaaagtaataatactataaacattcaaattatgaaataaatatctcatactaatcactgctaattttttttccaatgtttctctttagtatttctctttagtatgggagtgacaaacttaatatgaaatctatctccctacatgcaaaaatcgaatctcttttattattaatgaagtgtatggtcggtgtcaataactaatatgtcatattttttacagactgttcagatatgataaaaatagtttttttccaaccaaatggttggtcttctgagtgtatttgaaaacgacattgaagaattaatatatttttttttaattttagttttttatagtacaaatattaaaacaaacaatcctaccatatcataacatttgtaaataacattttaagttttgttttgagttttaattaattttctatgacaaaaaaatgaagtcaatagactaagtgaatcatatagtataaataaacacaatttaaatagtttcaaataaatttagaaagaataaaacaaatagaaatcagaaggtgtctgtttcctcctcgcaacatacgatcaaagagaaacaacttgaccctttacattgctcaagagctcatctcttccctctacaaaaatggccgcacgtctccaaccttctcccaactccttcttccgccatcatc

SEQ ID NO: 13137 - DNA, 3000 bp, Unknown
  misc_feature (1)..( 3000): cDNA_ID_3028243_gDNA_ID_2214600_Annot_ID_187045 3000 nt of promoter + ATG
ctttgggtggtagtgaatataaccagagtcatagcgagaataaagcagcttggagaacacttccatggctaacacgaagaggtagggagacaagggatcaccttgccttagacctttagtactgttgaaaaaacctcccgagaccccattaatagagattgagaaggaaggcattgagatgcactgataaatccagttgatgaaccgatcagggattgcaagcgccctcaaagctgcaatgacaaactcctatttgacggagtcaaaagcctttctcaaatccaccttgagcattccccaaggtgagatatgcaacctgttataaccatgaaccatctccgtggtaaagagaacattctcagctaaagatcttccaagcaagaaagccgactgagattgaccaatcacttctgaaaataagccctgcaacctgccagtcaaaaacttagatataattttgtacagcgtattaaggtaggagatgggcctaaaatctgatatgaaagaggcgttagaggttttagggattaagacaagggtggtagcattccactgcttaaggagctgcctagagataaagaactcgtgaatggcagcagtaacctccgacccaataacgctccaggaatctctaaaaaattcaaccggatacccgtcaggcccactaaatttgttccgcgggagagatttgaaagctgctttgatctcatcatcactaaacagcctttacatctcagtagactgcgcctgagagcacctataggtaagcagcaggttcatgtcatcttgctccaacgagaagggagtctcaacctcacccaacagcctctcataataggccatacaatgatcaataataccttgttgggagtcaatcaccaccccattgcagtcaacaagggactttatggggttaaaacactttctggaatccgccattctatggaaataggaagtattgctatcaccctcagcaaaccaagaaaccctggatctttgatggaagaaactctcctcagcagaggaaagcaaaagccacttacgctgagcctccagttccaaggctgcattgagatcggaggcattggcaagagtcaggtcttggcgccttaaaaaccactcatgagcctcttttgtacgcagctctataccagaataattgagcctactgaagtctttaataggcttcttgagggctttcagctttttagaaaccctgaacatgtgagacccaaccacgttagttgaataccaattttctataacaacattcaaaaactcctcattattcaacagaaaattatagaacttgaagggacgcttaacactaataccatcagcctccaacacaaccccacaagacacatgatctgagaagtccaaattaccaaagacaccaaagacggaggcgacaccggaagacccatcccgaacaccagaagagacagaggatgcagcacgagcacagactgctgcgaacttagaagagcttgtgaccaccccacgaagaagcttctttttctttttctttggcattagaacagaaatttccgaccaccgacgtgaggccgacgttggggaaaaagaagcgaaacgaagaaaagaaaggtttttaaaagatactttgaatatagagatcgaatttaatgttgtttctgtcaccaaacgctcagcctaaatcgaagctctacctatctttaagatatctattatctaccatgcatcaactactaggactactctttttttgcgttttattaattatctttttacttatttaattttctataatgtaatcttgtttttcttaacctagctagtatattttattttggtgtggtgaacatccaaattaatatataagaatgtttgaaaaaataatatattaatatcaacgctcattgtgttcttataacaaaaaagtaaataaaaaagtagttgctttcgtttattaacattgcttttctatatagagtttatattatgttgcataatatgaaaggtctgttatccaaataattaaaaaagatgcactgctcggagccttctaattaaaatactttatacactagacgtatgctaaaaacaccgtattgtcttttacatagagatcatataacaaaaaaatgtatatataattttttcagtatatatgaatatataattataatgatacaataacaaaaaaagccataaaattgatatgggtcaactttccaattttcagtttgtaaaaatatgattatctaacaattttcagttttttgtttttgtttttttcagttgttttgtaacacctccgaaatccgaactatacaaaactaagagtatgccaattgttcggttgtcgaataacgtttcacaattacgcaacttgagaaaaactaaacgtaggtgaaaaacaagaaagctaactacagtatgtggattcagtcaaaacttaaacccaaaaaaatccgaagaatccaaaaactaaaagagcaaaacataagtcaaacctaaaaaaatggaatgggtcacacgttattaactaatatactacctgatgcttaatgcttctgaaatgaacacataaaaaaaattgaataaaataaataaattagataaataaaaataaaaagatgtcggaatcatcaaaacgtcaccgtttcatagctcaagagctccgtcctcgaactttgcgcttcaattcccaaaaagtttcttaattttttattttttctcctgtgtaagtgcaaacatctaaattcccaagaaccaaaactaaagatccgtaaattcgaagcaacatcaacgttctcgagcctctctaattattgttttatagaccaaaaattcttcgtttttcttttttccaggaatttttaatttgtatgggctgatcagaaaaaagccactttgtgttttcttttttagctggacggtgtctgaatcattcaatgcctttctcttctctacctttctaaatctctctctctctatctctccatcgaagcagcc

SEQ ID NO: 13138 - DNA, 3000 bp, Unknown
  misc_feature (1)..( 3000): cDNA_ID_3028259_gDNA_ID_2214600_Annot_ID_187041 3000 nt of promoter + ATG
tggagtagaaggagatcccgagagatcagaatgtatataatctaatatacctttagtagtgtgcttagcagttgggaaactttgtttgtgagattttccaagtacgcaactctcacaaaattccagcttgtctacttcttttcctgacaagtaaccttcttcaaccagcacattcatgttcttcaagctcatatgacccagcctagaatgccataagctagtcatgtcaatgtctggtcttgccactgcaacttctccttttactacttttccttctagatagtacagcccatcttgatattttccagaaatgactttctgtccatctttgtagaaagtgactataaagtcttttccttcatacttgcagccgctcttctccaattgtaggtatgtaccgcacatttgttaatatgaccacataatcatctggatttaagatcttaatcttaccaatccctttcacttcactgtgagtcatattacccatcaaaactttgcctccatcaaattcttgtaggtcaaacagagaatccttgtctagtgtaatgtgaaaactacatccagaatccataacccattcttccttagtgtcttgagggctagctgttaatactagtggctgttttggctccgttgcaatgtttgctgaacttgaaggcttgtgaagacttttcaggacactccctcttccaatgtccttctttaccacagatgaaacaacccttgttgtttttattgtactttggccttgattttgatctgcctttgctcttagaacgtcctctccatggtttgccttttcctttttcaaacctcttctctgatctgcctcttgttccacatacagaccttcactttgagagctttccactttctgtgagttctctttcctttgattttgcagctccaatgacttcattcaagctcaaagtgtctctgccatactttaacgtctctttgagctgatcataccggtcatataatgaactcaacaatagtatagcttgaacctcctctgtcacatctactcctatgttgtttagatcagtaactagcttaaggaaatcatccacattcccatctatacttctagaatcagtcatcttataagtatagaacttaagctgtaagtagattcgattaggtagagaagtctccatgtataacctctttaatgtggaccacatggctgcagctgtctcacagtttttgatctttcttagtacttgatttcccacgtttagtactataagatcttttgccttctctgacttttcaaactttataagatcaacattggaaggcagctcaaaatctccgacgtgatagtctcttccagctactgcagcttcctcttctataacaggtggatctcttagcagctgctcatcgttcaagataccttttagccctaaaacaccataatgagccaacattctgaccttccacaaagagaagtcaccggttccatcaaatctgtcaacctcaacccgagcgttactactcatcttttaaaacttcttgtaacccctgatctgaaactccttagctgaaactccttaacaaccctatacaagcctggagctctgataccacttgtggagaaaagagtgatagagattgcttggtaaagaaataaacagacacagaaaattgataaccgagttcacggcctcaaccgctacgtctcgggggagatgtcttgctcccaagcttcactatatcaaagggattacaaacacaccactaacttgtgatgttgtcttttggtttttacagatttacactcaagaagaacaaaaattcaaaaacaacaaagaggaagaagaaaggttgctttagaagctcttttatctctcttctctataactctctttagattcttttttcacctacctccactatacgtcgcacgttgtaatgcatttataggtgacgtaaatggggcacagacttttgcccacacttttgttcttcttcaccttgccaatttcgttggcctattaaggcccaataattgtattatgtcaaatccaaacaacaagtttgcttttgttagatcatcttgaaaaatgtgaggcttctatgtgttgcacaatattgtgaagtttttgaagaacatcattgacagaaaaaaaaagtaagaggatcatatccattataaatgaaattgtgtggatcatgcgagaaggaaattgattaatttgtataaacgatatgaacgggtcattacaattgtatataattaacaaaatttaagttgactgggactctaatattctataaatatttagggaattttagacattcctctttgtacgaatgaatgttgtatctaaaaaaattgtcctcgatcaaaagtatatatatgtagatagaatcatataaccggaccagtttttatgtttgaaaatcagtgtctttgggtgaaatctactgatttaaaaaattgctgcggtaaatttatcatgatagtcaaacaatttaacctaccacgacaaattacattttcacgaaagaacatgtaatcagttggagatgtgacatagaaagagtctatctaagccatgcgtcgtatattttacgagttaaacgagcatcaacttgaacctatcgttgttaaattggactttgttaatctccatactccaattttggaggaatgataggaaccctttatattaaaaaaaagagaccttttgcatttcttacagaagtcgtggatgaagcaaacatgtcttgtttatagtatttgaccattacttacacggtaaactaatgacgtggcaaacaaacaacgtcgttaaaaaaaaaggcgcattataaccgaaataactaaactacgccaagaggtaaaattaaacacaaggatctgacgtgggtgatgataacaaccacggacccgtatcccaaagatctcatctttcgtcgagtggttcataaccaaaatcaaaacttgagtgaatcataatcgtcgtctcgtcgccggagaaaatg

SEQ ID NO: 13139 - DNA, 3000 bp, Unknown
  misc_feature (1)..( 3000): cDNA_ID_3028267_gDNA_ID_2214600_Annot_ID_187036 3000 nt of promoter + ATG
tggatgcaaaaaaatctgatagttgaaaaattgttggtttcttgaaaagcttctgttatgaatctgttgttaatcatgtcacgagttagtgttatcctttagatcagacttatactttgacttgagctctgtgaattgggaacttacgtcagaatagccaaccgcaatataatgctatgttcaatgaatttaaggatatgaacatgttcttgttacaaggttcttttgataatgacacaaaagttacgagttgagaatgaatgtgcttcttcaatagagcataaacgcataaataagagtgacaattaaaaaacaaaaacgcatagaaaagagcacaaaatgaagttgcccattgctttcagcctttcacttaactccaatgatcgtctatgtccttcttctcgttgcccctcctagtctgattctgaatctggctcatccaccaatgggggatggactgacttgagttgtttaaagtcgtgaacattaagatcctctacgtggtttacaaaggtgcaaactctacaagttttctttaacacttcaccaaaaccttggatttcaacacgttggagagtgttcctttcgggattgaagtagaaaacataaaacggttgcttaggtgtatatttgagcatcgaaaacactatttcacccgaagcagtccctccagcgatggaaacacgacgacggaagaatctatcatcggtccaagtgtaggcatatttcgaccattgctgtttcttaacatcctctagaacccacacacgcaactcattaatgtcatcatcgttaatattatactccacatattcgtcgacatccgaataataaagcttataaatgtcgacatcatcctcccaataaatcacagctaattttcccttatagttgatcaatcgacaaaacctttctacgtcaataaacgtgaatttctcagacctaatatcaaagcaaactatcacataatcagatactatgccatgaccatccttaacacaatccgacgtgctacctaagtaatacaaaactccattgatgcatatcccttcactcttaatatcatgtctatcatatcgtaagggacaatttatctttctccacttcatatgtccagccccaaatgtaagaattttactatgaccaggaccagatggataaaatatggacaatgccttgtattgcttgtcaatcgggtcaaatccgaaaaagctatacgcctttctgtaagtataccgattaggtaagatggcataccgtcctgtagtggggttacatattagaggtgtagcctcgcctcgatcaccatataaatagatcaaccccgaggcgtagccaattgaaaaatattttaggtcataacaatgacagatatatagcttgtctggagagaacttaacatgaaattcagcggctgctacaagagtcgatgaggatttctcatatggattctcaagctgtggcgtcgagaagaacctccacacacagtttttctcttcgttgactttctctgccatggcgaataagaggcgcggcttagtggaggacctggtcaggaacaactccttgaaatatggactaccaaaaattgatccccattgcttcgacacgcaatgaaacctcgcgactgactttgcaggcaatctcgacaaaatctccacggtgagatcattcgttattgtacttggattcatgattgccgatcaaacgaagaaagagagatgtgataacttgtatataaagtaagacctagagaaaccaattaacaaaagacctaaagagtaaagagtaaagaccatatttatatatcgttaacgtccaagtgggccaccagctattggattttcttcagtaatcgctgctttataaggagacgaacaagatgagaatcaatcctgatgatgtgtgacatacaattgcttgatgaagaagattgggttggttcctaccagatttgcttgcatggagaacaatgttatggagtctatgttttgtatattaatatatactttgattcattaattcatctgatatggttatcatgacagctttgaatgaactctgtttctggtgaatactataactcgttttgagacacagatttgcaaaagaaactcgattgttgcgagttataatgcaacttgtgaatctggtttgcttcttagtcattttctcagggaaactataaaacacactacatactaaaattggtccaaagcctcaaacacattgagctagatagaatgatagacccatcagatagacaataagaaaagttcagataccaacttaaacataaacgaaagtgatagattgttgttactcttaactcgattccacacttagaaagcacaaattcaacttagagaactacaatcgaaagagaagatcaaattcaattatcaaagcaataatcaaacagatctgagaatcaaatcgttcgctaagtgttagctcacgatacaatgatcaacaatgatcaacattgtaacatctccagacaaattctctctctctctcaacaatctcagaaaatacataaagaaatgaaatgagctgcaacggctcctttaaagctgagttctctttatttccatcagcgtcttccatatcctttgactccagcttgttgaagaataatcaaatctcgtataagtcaaagtcacattcgtataagttagttattaagttacgagtcgtgtctgttaacacagttgtgtctttatcaagagtcatgtcttttacacaagacaatgtttcatttcatataaatagatcgagtctctgtttcctgtaacacaattgagttttgtaatacaatcaagtcaataagattgattacattcatactctgttttttcgttcttactctgttcttctttcataacaaaacattaacatggtatcagagcttatcgattgagaggacaagagaaaacactaaaaagagagagaggcaacaaaagtgagatcgtatacgtctcagcaaaaagcgagacg

SEQ ID NO: 13140 - DNA, 3000 bp, Unknown; identical to SEQ ID NO: 13136
  misc_feature (1)..( 3000): cDNA_ID_1807666_gDNA_ID_2214600_Annot_ID_187033 3000 nt of promoter + ATG

SEQ ID NO: 13141 - DNA, 3000 bp, Unknown; identical to SEQ ID NO: 13135
  misc_feature (1)..( 3000): cDNA_ID_2713146_gDNA_ID_2214600_Annot_ID_187030 3000 nt of promoter + ATG

SEQ ID NO: 13142 - DNA, 3000 bp, Unknown; identical to SEQ ID NO: 13134
  misc_feature (1)..( 3000): cDNA_ID_2713153_gDNA_ID_2214600_Annot_ID_187028 3000 nt of promoter + ATG

SEQ ID NO: 13143 - DNA, 3000 bp, Unknown
  misc_feature (1)..( 3000): cDNA_ID_2710584_gDNA_ID_2214600_Annot_ID_187024 3000 nt of promoter + ATG
gtcttctatcctctcaggagacgagttgaggttgattctgccactttgactcgaagaaccttcttgatcaaagctaaagaccacacctttttcctttgacagatcatggtgaacaattggaagagattccaatcgcagaactgttttttgagtaaaagggtccttttctgcttcactaactgattgaataactctatccactcttacagatcgttcttcagcatttgcgacccgaaggtattgacgcataccttctaacacttccggagcaattctcggccttcccgtgtttggatccactcccacctggctttctttcaacacaccaaataaagggtctgattccttcagaatcggaggagtagtagcttttggaatgataatgcctttccttctggctgtagctaggtcctgtctagcttttactaggatagggcaaacatctttttcgtgcgtaagccgttgacactcataacacctcttctgaatcctctcataatgaaagttaacagtcgctgaccctccatttctgaaattcacaacttttgatctccttaagggtcttgagacatcaaacagcaccttcactctaacgaactcccgaatttgtttcaattctgggttaaagacgacttctttaacttcaccaatgagatcacccagcttagtgatcgccttggccgtgttgtaattgactgggatattccaaatttgaacccacagtagcatgtaacgaagatagtcatccggaggattttcataccacctatctaccacgattgaccaatcattgaaggtatgaactcctttcgctagcacttcctctaaatcatgttcagagtcgaaaatgaactggaatctctcattattgagagctattcctttgacctttccttctttctgccacttccttggcatatttcttaagagattcttcatcggttgacaagccgggttcaggacccttccaatgagactgaatttgtttctctcactagacagatactcaggaagatctggcatttcaaacggttcttccttttcttccaacgacatctccatcaatgccctatccatggcggatgacatcttcaagctaagaggaaaacagacaccgtagaactaagactatcgagctgaactaactccaccaacttcttcagaaaaaacagagatatggaacccagatctgagaaaacgaaagcagtagagcatggctgagaggatatgataatgaacacgaagggttagaatagttaatttcggctgaaaagaaagatggtttccggtcaaaagctttattttaaacctagtgaaagacactaaaagagaaagagggttctaagcccaaaagatagatttctaaaaaataatcacttgttaggattggatacttcgacgtcaactgctaacgacatgatatacagttattgaaaattggtaattatgaagttaaagaagtctaaacatctcaattgaaaaatctcaaattattcttacggtgacagttgtctttagtatgaagttattaccatagctagagcctaaaggacagcaccaagaccaccactaagacaagtgacgtcctgcaaaatctaacacttaaataaaattgtcagagaagattatttagcaccaaacttttattctattaatttccaaaagaaaaaaaaaaagtcatatctttccaaattttcattacataactaacattttgtcacatgaaatctgtacgtctctgaatcttctcttcttctccctcatccattgcttatgtgcttcttcttctgattaccaaattttcattcctcttcttctttctgataaaaaagtttgcattttttttctttgttgtgataatcgaaaaagagactaaaacctaagaatcgtgcagaggagaggataccacaccacacccagaaattgaaactaccaaaaagtttatgaatttgatttcaatttcaactttttatgagacccatttgattctttagggattttgaaggtaccatttgtctcaatcttataaaaaatttcacctttttttttttttttttgttaccactatgtgtctttaatctgtgttcattgttcagatcgttgtgaaatttggttcgtgattcgttgcattgcaatagctagacggatcgggattgacccactttaggtttctcatctcaaagattgcgaaattttctaatttggcatcggattgtttggatttgattgcttatgtaagtaacttgatttggttggtaacttggtattgcaatcagaaaatgtgctattcagtgttcctttgtgattaggtaattaagtatattagaaccgcatggtctttgttctcaatgctagtttagttgttttggtttcatgaagtagaagaagttttgacaatatttactctctgttgtgttaaaaattagcatagctttatgtaacatgtaccttgttttctctgtactttcatcttttgaatggattctatgttaaagaatccattgatgaagtttacaagtggtagtttgttacttgcttatatgttagttattacactagtttgacaaggttttggtacttacttgctcaattgctacactcacactgtgaaattcatgatttatacttatttcagttatgcaagaaacttttgattacataggaatgatgtttttgatatatgatagataatttgacatttattagtgaaagtttctgatcttgcctttttgtggtatcaattggaaacataatgcagaagctatagttggagcatgagtgtagcctgaagctagattgctggctggtatgtggtgatcgtaatggtaaatagggtgcgcttatttcagttttttaattttccctcattcatggatttcttatgcatatttattttcttgtttgtttctgtttgtgtgactctaggtctcctcaaagttcttttaacttttgttctatttactggagagtccttgtgttctagtttaaggtatgaatcca

SEQ ID NO: 13144 - DNA, 3000 bp, Unknown
  misc_feature (1)..( 3000): cDNA_ID_3028290_gDNA_ID_2214600_Annot_ID_187022 3000 nt of promoter + ATG
tgttctgttttcttttgattttcttcttcatcctgtaaaacctagaattttgtttcttcaaccaaaaatgaacagagaagtctctgagagaattcatattttgttcttccccttcatggctcaaggccacatgattccaattttggacatggccaagcttttctcgaggagaggagccaagtcaacccttctcacaaccccaatcaacgctaagatcttcgagaaacctattgaagcattcaaaaatcaaaaccctgatctcgaaatcggaatcaagatcttcaatttcccttgtgtagagcttggattgcctgaaggatgcgagaacgctgactttatcaactcataccaaaaatctgactcaggtgacttgttcttgaagtttcttttctctaccaagtatatgaaacaacagttggagagtttcattgaaacaaccaaaccaagtgctcttgttgccgatatgttcttcccttgggcgacagaatctgctgagaagctcggtgtaccaagacttgtgttccacggtacatctttcttttctttgtgttgttcgtataacatgaggattcataagccacacaagaaagtcgctacgagttctactccttttgtaatccctggtctcccaggagacatagttattacagaagaccaagccaatgttgccaaagaagaaacgccaatgggaaagtttatgaaagaggttagggaatcagagaccaatagctttggtgtattggttaatagcttctacgagctggaatcagcttatgctgatttttatcgtagttttgtggcgaaaagagcttggcatatcggtccgctttcgctatctaacagagagttaggagagaaagccagaagagggaaaaaggctaacattgatgagcaagaatgcctaaaatggctggactctaagacacctggttcagtagtttacttgtcctttgggagcggaactaatttcaccaacgaccagctgttagagatcgcttttggtcttgaaggttctggacaaagtttcatctgggtggttaggaaaaatgaaaaccaaggtaaattgtttctccccagccattattaaccaacatagtaatgttaatatttgtgtatatattcgtattgccaaatatgctctgataccatggcaagtaatagattggctcatgtattttatttgtgatcatgtagaattttcttaacagttatgacttggtgttggtatggttgggacaggtgacaatgaagagtggttgcctgaagggtttaaagagaggacaacagggaaagggctaataatacctggatgggcgccgcaagtgctgatacttgaccataaagcaattggaggatttgtgactcattgcggatggaactcggctatagagggcattgccgcggggctgcctatggtaacatggccaatgggggcagaacagttctacaatgagaagctattgacaaaagtgttgagaataggagtgaacgttggagctaccgagttggtgaaaaaaggaaagttgattagtagagcacaagtggagaaggcagtaagggaagtgattggtggtgagaaggcagaggaaaggcggctatgggctaagaagctgggcgagatggctaaagccgctgtggaagaaggagggtcctcttataatgatgtgaacaagtttatggaagagctgaatggtagaaagtagaggaagagaatatgtttaatgttctgagatagattattgactttgtgttcctctttggagttgttctttatgtcatcttagcttttgctactgtttagtaagagaaagtccattgtgtgtttctatataataaagaatagacctgaagataggcattttcaagtttctgctttaagataccaaatcttcgttgtgcatactttttacttcttgtgatcttactatgtgatttatatggcatggattatataggtcggattttctttgaattttaagtatataaatttgaagtaacaaagtatgtgtagtaatgatgcgatgaaaaattggtaatgaatctagggcctaaactagtatagtttcaggtttattccaccaaactcttagcgtatgtcacttggatccaccaaacttgatccaagcgttttacaaaattgtataccgagctaaaaataaaacattctttgttgtttccacaaaccttattttctaacatagcctacatgtctttctccttaagcactcattcttttggcctctcgactctttgaaaatctctcacattaagacttaatgttacccaaacctaattaaactactcgagaaccccatgttcgtgtccatgagaattctcactcaagtcttccctttagccacttacaaaactacttgtagaactatggctatgaatgatgacataactcgcacccaaaaccgcatcgtaacagtgttgtaatagtatcaaaatctttacatatacatatatatctatgtatttttgttactatttaaaccgcaccgcacttctcccacaccacaaaacgcagtcactattcggacaatatgttttaaaaacgctattttgccattccccataggctcatggctttaaatgcaaagccttcgaaatttatggctcatagcttgcacaatactcatcgctaagtgagaagtcaaagtttgcttctacgagaaacagaacacatgtgctgactcgattcccggtttgtagccaaccaaagatgacgaaccagaatacggcaacacaaaagtaaaatatgacgtatgcaaacacgtaagtgatcttcgttaattaattttttatctgatcttcctccactgtcttcttttaagtgcacacgtgcgtgtatatatctcgatatggccgaaactggaagaaacaattcagacaaagtcccaagctaagaaaagagactctctttgttttgtctggcagaatattttccattcttgttctgttttcttttcatttttcttcttaatcctaaaaccaaac

SEQ ID NO: 13145 - DNA, 3000 bp, Unknown; identical to SEQ ID NO: 13139
  misc_feature (1)..( 3000): cDNA_ID_2713128_gDNA_ID_2214600_Annot_ID_135553 3000 nt of promoter + ATG

SEQ ID NO: 13146 - DNA, 3000 bp, Unknown
  misc_feature (1)..( 3000): cDNA_ID_2713124_gDNA_ID_2214600_Annot_ID_135554 3000 nt of promoter + ATG
caccaaaagtaatatgtttcattcttcttgaatcatgtctcttgttccactatatgttctcttgaatacacatcatcaccactacaattggtgtagagaggacattactgctttcaactacatacagctgaacgttgactctcattccatcccaacagtataatgtctgaacactcccaggtgtcttcaatactctggcatgtctctcggtattcccaacctgctcaataactgatatgtcttgaaacttgctgtactttctcttgctcgtgtacagaaacttgctgtacttgcctacacggcgatgtttgttcttcctcatatagctttctttgccgccttgtttctcactctcctcctcgaaaacaactctgattgtttctccggtcaacggcttcgccattacctccaccactgtctactttattctcttttgttgaaaacgtgtagcttctaaggtgcttacattcacattcttagaaataaagattcaaaccaaagttttcaagatatgacaatccaaattaccattgagttgataattggattttaaagtcattcatacatatacatttattacgctacaaagatacatccgatagacaagaagcaaagttcagatatccacttaaaccaaactaaactcataacatcaataaattaaacacaaattgttttacacattaacttcttctccaagacaccctgatcacttccatcatcattagggttggaaacaactagaagtagctcctttgtgattcatacgtgatcaaataacaaggctaaaggaagaggtattaaaagctatttggtcaaacctgctttaacgatcagttttggttcttcctatccaatatagattggtgttgaacatgttgttaagtttttgttcttattgtctcacgatcaaaactgaatctaggtgttattggtgttgaacatgatagtcccgtaattgatgcaactacacattgaggcttcagcctcttcttctttgagcttctacttcttttgttgatgttttgaatcttggggttattgggttttcttagtcggttttggttttgatttcttttatcttttctctcttgatgagcaaaaaggaagttttacattcttcttcttatttcattatgtactcagttcttatataaggattcaattgggtgtttgcaatattcagtttttgatcaataacgaataagggttttaccttttatcaaagtctacgaacttcctctgctttctttgcaagaaaccaagagttcatagcaacaagtctttcttgtaatccattgatctacagaaagttcttgttctctatcttcctctgtattaagtatacataaagatcaatagatactaagattttaatttatgtattcgattatcttgaattgagtttgcttagaaaattgatcttagtgaaaccttgtttgatgtcttttggatgtaaatgttgaattttggttttgatttaagatttaagattttcaatttttgtttctttccaaagaactccaccatagattctataccattggactatgatttttttttttttgaaacacaagctctctcatctaacaatttatcaaaatataagttaaaaaatggtgagagcccattggtctaagtctctgatcattctctattctggtgatattaatgaaactctagggttttgtaaccacaaatataccataagtagcatcatatgttttttcattcctaatctcatttttttcggaatagtgcaaaattgtaggaaagaactgtacaagaaagttatacaaaaaagttgagagtaaaacttttcggatttgaatggtaacccactatcaaaactgtatactttgtacaagtttgacaattaccaatcacaaaagctttataaaaagcgtttactaaaagctttaccctcagtttttttgtacagctttctggtacacctcttcttatagttttgtactattccgaagaatgcttatagctccatttaacaactaaattttttatagttttgtgttaccaatcagactcttaagaacgctttaaataaaaaaaaatatgattggtatatataaaagttgtacacaatataccactttcataatgtgttaccattcaaacccataaattcatttataatcttaatataacatttggtaagaaaacaaataaaatgaaaaatatataaaaaaacaaatataatgagtcaacttttccaatataaaaatattaaaatgacacttttgttggaatgtatagtcaacactttttcccaaaacatttgtaaacaataccaattaatatattgcacaataatgaaaataatgtggtcaatataattattaccattaactaatgatagaattatgtttggaagtaaattcaattttgatatgcaaagagttcaattccatggaacaagatgaccacaaaaagattataacatttcggtttaatttgggtttaaattttggtctattggtttaattttgaaatataatataaatataaaccaaatctaatatattagtttggtagcttttttttgtttgtttatatcgaattcttaagaaaatgatattaactctttttagaaaaatgttttatttttatttctatatttcattttggttcaaaatcgcataagatgtttgctgatatttgaaaaataactattttaaccaacaataaaggaaattttttaattgttggattgatatgtttgacttagtttagattgaaaagtttggtttatcttaatcgccacaataacctttcaacaatattaaacaaatagtaattaatcttacatcttaatcaatcatctaccttatctatttcttttgactggcaccagtgttaaactctatttatataaattcttacgttaatctttattcagatatccaacaaaaaactaaaactcaaaaacgagagatcaaatcaaagagtgagcatggcgataaacaaactaagacttgcatg

SEQ ID NO: 13147 - DNA, 3000 bp, Unknown; identical to SEQ ID NO: 13138
  misc_feature (1)..( 3000): cDNA_ID_1807721_gDNA_ID_2214600_Annot_ID_135557 3000 nt of promoter + ATG

SEQ ID NO: 13148 - DNA, 3000 bp, Unknown
  misc_feature (1)..( 3000): cDNA_ID_2710616_gDNA_ID_2214601_Annot_ID_135569 3000 nt of promoter + ATG
gtgaatgaaatgcaataaaagggtgaaggcaaataagcaaataaatctaagaagaatagaagtcctaaggatggattcattgatatgggcatatctagggtctataaggtggctaatagacgaaaggcaaatacctcataactttaccacttcctaatctcaactctcgttaatgaaacatagcaaagcaggcattaagcaacaatctattaaagtcaataagcagtctaaacatccaatctcttgggctagaatatacaaatctctggaattagtagaacaagcattccattcatcttttggatgctggaataccttggagagaattctaattgatcagaaagaaataaggattaggcccaactaatccaaaagggatctaacctaaccttaaccacctgacaaacctcgaatttaccctaatctaatccaccctcaataaccgtaatcaccactctagcaacataatcaagaacacaaacctagaaattactctaaacatatcaaaatgtagatctaaacaagataaacaacttgagagtacgagtaattaaggttcaaagattctaaaacacaaagaaaaactagaggataaaagcttggtcctttgggcaaaccccaaagtgacctatttataataaaatcccgaaaaccctaaattcactagaagacaagagacttgaggcagtttggatgaatgctcgacccttggggattgagtgatagggtgccacaaagattgcgcctttgcctctatgattcgagtgattaattggtcgagtagttgcttcttcctctcctcttcttatgctcaactgtctggttgagtggggaatgaggaggatctaaaggctctttgatcgctcaacaagtcagaggtagagtagaggatcgagtagagggtcgagtgattgtctactgcttcctctatagctgctttgatagagtgactggtcgagtagctgctctgctgcttcccttctggtaatgatagaatagtgggttgagtaaactgcttttacacctgaaaacacaccaaaacatgcaataagtatgcagactgatctcgtgttttcttgtagcgcaagatcgttggaaccatcatcgacgctgaaatggaagtgatggtcatggcgctgaaggaacccttcggtgtgaccaagaacaacactgtgttggtaggtgacaagtctaactcttgtgctgttttcttcttgctgtgccacctctagagctacaaggcatgtgatatgtctataatttgcatgttttcagtgttcattcatcatcgttttgagtccagtttatatcattcatcactattttatatcatttctcatcattcttgcatactttgcatgattatgatagctttgcatacatattgcatttctgagttgttttcaggtgatttgacctgtttgcgagcaaattggaagaagcgagccagaaccagaagacatacttgaccccctggtcgagtatcatcactcaccaccaacaccatcactcgaccaagcactcgatcacatcttcataatctactcaaatccgcactcaaccagacaagctaagcacaaggaagagaagaggagaagaagaagtgtttggaagcggcctggagctccaccggatcacgaagcccatctcggcccattatcactctatgggccgggcgattaggttactggcccgtctactatcattttatttcgttttctataaataggtgtcagagggttttgtcctgggacatctagtcgacattgagtttttgcttcagttttattttctgttttactctggttgcgccgctgttgcttctgcaacctgtaattcgagatttttccaagttattcagattccgcatttgattttacctgtcatcttgtttctctactctttatctctttacttatgcaatatacttgtttacatgcgtttatgtctttgagcatgttgtctgagtagtgacatagagttcttaaggatgggatagaatggttgtggaatccttagtctgtagaatggttaagttttagaattgattgaatcccttcaggactagttgtgtttactgcttatttctttctgatcaactagaattcgatccaaagcattcccgtacccagaaggtgttcgatggaatgcttgatctactagttcctgagatattcgtctctatcccaagggattggccgtttagagcgattattgactttatcagtctgttcttattgcctgcataattagattccgttaatgggaattagtctgggctagctttccttgaggatttctatcacgggagtgaatttatcttttgttgaacctgttgtctagggatagcttgattgcgcttgttaacctttcgaataggctaggataccactctatttgatttccccatccttaggaatttctcgtctatctgatttctctgttttattgttatcgcttaatcgttcttattgcatgtttcttagtttttgcaattactagaccaacttattcgaccacacccagtgtctggcaacagactgtgcagtcgagtacaattgtctcattttctgccagttactcgaccacatcctgcctctggcatcggccagttgtagtcgagtgattttagtaattctgatactatttctgttttctgcatgttcgcttagggctgttagaaacctcaaaaccgttattgcttggtttgacttagtgacttctgatcacatctcatctgtttgcatcacaactgattggattgacacctaaaatactacaacgacatgattggtgttttaggataattgattaaaaatctattatcaatttggcgtcgttgccaattgggtgtttgtttgctatatttgagatttcagaatatttaagatcaagttctttttcattttactgaaaattactaactttgtgtttttttctgtttgtttgttttgatttaggtactgcgaatcaccagcttcaccagttggtactcgttgt

SEQ ID NO: 13149 - DNA, 3000 bp, Unknown
  misc_feature (1)..( 3000): cDNA_ID_3028334_gDNA_ID_2214601_Annot_ID_187069 3000 nt of promoter + ATG
gcaggatgtggtcgagtaactggcagaaaatgagacaattgtactcgactgcacagtctgttgccagacactgggtgtggtcgaataagttggtctagtaattgcaaaaactaagaaacatgcaataagaacgattaagcgataacaataaaacagagaaatcagatagacgagaaattcctaaggatggggaaatcaaatagagtggtatcctagcctattcgaaaggttaacaagcgcaatcaagctatccctagacaacaggttcaacaaaagataaattcactcccgtgatagaaatcctcaaggaaagctagcccagactaattcccattaacggaatctaattatgcaggcaataagaacagactgataaagtcaataatcgctctaaacggccaatcccttgggatagagacgaatatctcaggaactagtagatcaagcattccatcgaacaccttctgggtacgggaatgctttggatcgaattctagttgatcagaaagaaataagcagtaaacacaactagtcctgaagggattcaatcaattctaaaacttaaccattctacagactaaggattccacaaccattctatcccatccttaagaactctatgtcactactcagacaacatgctcaaagacataaacgcatgtaaacaagtatattgcataagtaaagagataaagagtagagaaacaagatgacaggtaaaatcaaatgcggaatctgaataacttggaaaaatctcgaattacaggttgcagaagcaacagcggcgcaaccagagtaaaacagaaaataaaactgaagcaaaaactcaatgtcgactagatgtcccaggacaaaaccctctgacacctatttatagaaaacgaaataaaatgatagtagacgggccagtaacctaatcgcccggcccatagagtgataatgggccgagatgggcttcgtgatccggtggagctccaggccgcttccaaacacttcttcttctcctcttctcttccttgtgcttagcttgtctggttgagtgcggatttgagtagattatgaagatgtgatcgagtgcttggtcgagtgatggtgttggtggtgagtgatgatactcgaccagggggtcaagtatgtcttctggttctggctcgcttcttccaatttgctcgcaaacaggtcaaatcacctgaaaacaactcagaaatgcaatatgtatgcaaagctatcataatcatgcaaagtatgcaagaatgatgagaaatgatataaaatagtgatgaatgatataaactggactcaaaacgatgatgaatgaacactgaaaacatgcaaattatagacatatcacatgccttgtagctctagaggtggcacagcaagaagaaaacagcacaagagttagacttgtcacctaccaacacagtgttgttcttggtcacaccgaagggttccttcagcgccatgaccatcacttccatttcagcgtcgatgatggttccaacgatcttgcgctacaagaaaacacgagatcagtctgcatacttattgcatgttttggtgtgttttcaggtgtaaaagcagtttactcaacccactattctatcattaccagaagggaagcagcagagcagctactcgaccagtcactctatcaaagcagctatagaggaagcagtagacaatcactcgaccctctactcgatcctctactctacctctgacttgttgagcgatcaaagagcctttagatcctcctcattccccactcaaccagacagttgagcataagaagaggagaggaagaagcaactactcgaccaattaatcactcgaatcatagaggcaaaggcgcaatctttgtggcaccctatcactcaatccccaagggtcgagcattcatccaaactgcctcaagtctcttgtcttctagtgaatttagggttttcgggattttattataaataggtcactttggggtttgcccaaaggaccaagcttttatcctctagtttttctttgtgttttagaatctttgaaccttaattactcgtactctcaagttgtttatcttgtttagatctacattttgatatgtttagagtaatttctaggtttgtgttcttgattatgttgctagagtggtgattacggttattgagggtggattagattagggtaaattcgaggtttgtcaggtggttaaggttaggttagatcccttttggattagttgggcctaatccttatttctttctgatcaattagaattctctccaaggtattccagcatccaaaagatgaatggaatgcttgttctactaattccagagatttgtatattctagcccaagagattggatgtttagactgcttattgactttaatagattgttgcttaatgcctgctttgctatgtttcattaacgagagttgagattaggaagtggtaaagttatgaggtatttgcctttcgtctattagccaccttatagaccctagatatgcccatatcaatgaatccatccttaggacttctattcttcttagatttatttgcttatttgccttcacccttttattgcatttcattcacctcttatttactttcatccttttgagttacctgttagtacttgaatatgttgcatgcttggttctactcgaccctatgatcgagtagggcactttagttcacatttttatagtttgaaacttgatttcggattattactagaaacccaccttcattacacatctagcttgacttagttgcttatatacacatcttgactgcctagtgataacatcgtatttttgcccacttttactatgttttttttaggttttccatggagaaatcaagagttaaaggacactgatataacctgattttcactgcttttatctatgttttaggtataagattttgagtttttatgttatttctcgagtgtttttagtgtcttttcaggtattctatgcaatgggacaacaatg

SEQ ID NO: 13150 - DNA, 3000 bp, Unknown
  misc_feature (1)..( 3000): cDNA_ID_2995137_gDNA_ID_2214602_Annot_ID_135571 3000 nt of promoter + ATG
gtatatatccttaatgagatccaaggaagagagaattaacgtcccagacacctccagcacccacataatccatggactctacgtccacttttagtctttctatccattttcgttcgatggtcggtttactagttttgaaaaaaacctttaaaacttatttattggataattattaaaaacaaaatataaaatttattggctcatgatttttgcaaaaaaattctctatgttttgttctcatttctcatttatacgatattaaaaattacttttcaatatgtcggccatcattaaattgcttcactctaatcccgtggccgtaaacgtttttctttcaagctagactccataacaactacgtgcatttaatttctcaagtataaaattttcatgttttcaaatagtacgatgtatttagtgattttatttatgtactttgttcattaaattagtcataattgttctgatttttaggggttttgatcgaacccttagatcaaaagttaccttaattgtttttttagctaagtactttattaaaaatttaatgtttagttctgattgagtagtactataaaggagacatgtgtcaatcttgtcaattggttttgagttcaacaatatgcaatattgcacatgcattaacgaccaaaagaagatgcaatgcacttaaatcattgaaactgattttgtttttgtagtgtataaaatatctatttaattaccaacgaaagaagtgagcttttaaaaacaaagagtcagaagatatatataactacaaaacctacagaagataagctggatttcaaaagaagagaaagagtaaaccaataaattgaccaaagcaaaatcggatatttgacataagtttccattcacattgacccaaatccaccagcatttcaaataaagttacttaatataatttttgtgtttataatatattccgcccactcttgccttcatttggaccttatcctaaaagtcaaaacaggtgaaaaaaatgagaatacaattaacacgaaaaatgcaaaagactgttaaaccgaaatcgaattctagtgtaatcaatccttttcccaatgatacaactataaatcaaaaagaaaaaatgtactgataaacgaaactaaacgtataaattaatatatttcttgacataaataggaggcttttgcctgctagtctgctacgatggaaggaaaaatgcatgcacacatgacacatgcaaaatgtttcaatgaagacgcattgcccaattaaccaacacaccacttcttccattccacccatattatttatttctaccattttctttaatttattgttttttctttgattcatacactgtttatgactattacattttccctttcgactaatattaacgcgtttaaaccaaagaatggatttgataatgaaattttattttattagcatatagataatggatggcttcatgcttggtttccatgacaaggaatgacacaagataattattttgaataaaatcataaatatgataatactagttgtaaaaaaacttgagtgtttcgtgtgttatttttcggtttcttgactttttatatttctcgtttttgtaattttaggatggattatttagcttgcttttctcttttattactttctaaaattttatttataaactcatttttaatatattgacaatcaataaatgagttatcttttaattaataaaaaatttgtaaactcttgtaaacagatcatagtcactaaaagctattataagttatttgtagctatatttttttatttcatgaacttaggataagatacgaaaatggaggttatatttacataaatgtcaccacattgcctttgtcatgcaaacggcgtgttgcgtcactcgcctcctattgggaatcttataatcgcgtgaatattattagagtttgcgatatttccacgtaatagttatctttcacaaattttatactcaattacaaaatcaacgaaaatgtacatttgtatctttaactatttacgttttttttacgtatcaactttcagttatatgttttggataatatatttttttacttttgacttttcagttttcacctaatgattgggatatacatatgcatgcatagttcccattatttaaatgtaagctaagtgcatatgaactgttagtcaaaattacgaagtttatttgtacatatatatagttataacaaaatggtacagtaaattaaacagaacatcaagaaagtacaaaagactgaacacaataatttacatgaaaacaaaacacttaaaaaatcatccgataaaatcgaaatgatatcccaaatgacaaaaataacaatatagaaaatacaaaaacaaaaacaaaatatgaaagagtgttatggtggggacgttaattgactcaattacgttcatacattatacacacctactcccatcacaatgaaacgctttactccaaaaaaaaaaaaaaaaccactcttcaaaaaatctcgtagtctcaccaaccgcgaaatgcaactatcgtcagccaccagccacgaccacttttaccaccgtgacgttgacgaaaaccaaagaaattcaccaccgtgttaaaatcaaattaaaaataactctctttttgcgacttaaaccaaatccacgaattataatctccaccactaaaatccatcactcactctccatctaacggtcatcattaattctcaaccaactccttctttctcactaattttcattttttctataatctttatatggaagaaaaaaagaaactagctatctctatacgcttacctaccaacaaacactaccaccttatttaaaccacccttcattcatctaattttcctcaggaacaaatacaattccttaaccaacaatattacaaataagctcctatcttctttctttcttttagagatcttgtaatctcctcttagttaatcttctattgtaaaactaagatcaaaagtctaaatg

SEQ ID NO: 13151 - DNA, 3000 bp, Unknown
  misc_feature (1)..( 3000): cDNA_ID_2713196_gDNA_ID_2214602_Annot_ID_135572 3000 nt of promoter + ATG
ggccaggaaggatcactacatctccactggggtcaatcttttgagatgcattacattagattagaacgacctaaaaaaagtcgtcataaaggaaaaaagatagtaacgagaatattatctttctgagtacaaaaagttggagtctgctaaagtccatacattaggaggcgataaaggaattcgtcatttgtccatacataataagacccattattgatttgcccataatacagatcatcattcagatatatattatttaatcaatttctatatgacttgtatttcaacttttataaagtatttatccaagatgataatatcaaagttaaccttaataattatacgggaatgagatcatacctaataatcttgtcatgctgtttttgttacgtgacaaaatataaccttttttagtttgctaagtacaaaatataaagtttataaagattacagtttaagggaaaataaaataaacatttaaacatattgatactataactaggatacgaaagtaaacaaaaaaaaaacaagaaaatgccattggaaaaggcaaacgaagcattatatatccattataataaagcaatagaagaggaggagattgatttaaaagctcattagccgatgcaatgatgttttaggaagaagataaaacagttaaacactcagatctcaagtttgtctactactctcccaaaacccgataatattgttctcttctttacgtttgaccggtgtctcctatcttcggtcttcgcatgagttcaattttttaaataaagatattttggatattattagtttgatcattatttacattaagttattttaattaaagctatatatatctacaagatctttttaccactttgatcctccaccttctttcataacgtttatcagcaattttgaattatcaatttcccactatgagtatgataaatatacacttttttcttcttttttttttcacttcaacattgctaataagaaaaatgattacaagtatttattttctctaatctaaatatactaaatcagcagtcacttttccaataactaatgcattcagtgattgacacatcagcttagtactattttttattttttcatttttacgcatagtatgtgtcgtttttatttaactttgtttctttctcaaatgattttctctttcatccccacgatctccacatctccactttctctcttccaaaaactccatgactactgtgtaaaatctcaaaaatgggtttctcaacatcattaatcgattactcagaaatcaggtactttgttcatctcaatgaaccaatttaccatcttctatttctgtttgtaattttgttttatatatatagaaattttccatagatccgaaaatcatatatccttcttctagatttctatggtttttttttttttttgctttgtttctgctttatttgactgaattcgatttctctcatacatctccatttttccataggattattctttaatacaatcaatgcctatgattctcccgtctcacaaacactcaaggaacaacgacaaattttggcttctcatctgaacagttgccttaaaacaagggtgagtttaatatcttaatcgaagctcaagtgtttttttgatggtaaattaattctcatactttttactattcttctttcatctcttattttacttctttatatctgcaatttcttttttgtattaaactgcaattgtattttcacgcaagatttttgtattaatacaaatacttcaattttaaagtcatctcttattttacttctttatatctgcaatatctttgatattgtttcaaaggcagcgtctgcgtcatgtagttacttatttgtgcacattttacatttttttttagacttccaagctttgggtgtcaacgaatgtttgtaaactgaattactgatgatgagaagaagaacacattacaattggttggagctaatgatgaaataagcggacatgtatatacccagcataattttcgtacttatactctcttatatttctaaactcttgatttgttagttattgcctatcgcaattgattcattgggtagaaaagttgtaccttctttatatctttttcttaatctttgtatattcttcgatcaatgataataaatttgttgtatattaatactgtctgctttattttaaaatttttagttaaaagttgtaacagatataatctaaaacaatgttatccctaaataggggccaaatgctagttatattctaaatcagtaaataatagttactacatgcacactaaaacagacatagcgtacgtgggggacttattttgggaattgtcacatgtgtgtgagtcactcaccactaggttcgatttatatctaacgatttttcccggaaatatttatggacgaaaaagcaaacattataagattcatttgtttgttttatatagtacacaaataatagagaattaaatcactaattttaatgaaaattaaaaataaataatatatatatatatatatatatatatctgttgacgaaaataaaagcaagtatatccgaataaaattacgaatataatttagggatgaaaatagaatctcctatacagttaagatattataagaatattcatggttagactatcttagaattagataattaaggaaaattatcgtgatcatcaatttacaaatttcatacctgaattcattgtttaataaggtaacctgtttattttagttttaaaagtatatcaacaagagaactttgatcactaaaaaacaaaattcatacaaactttaatcacttccctatattgaaatgatctaatctggatgaaaaaaatattatttattaatttcccataaaacaataaacatgtggatgtagctcttaaatattcttagaggcagagaatgtcatttattcaaatccggaaatatattaaaaatgttgaacaaaaagaaaaagaaatatattaaa

SEQ ID NO: 13152 - DNA, 3000 bp, Unknown
  misc_feature (1)..( 3000): cDNA_ID_3028416_gDNA_ID_2214602_Annot_ID_135574 3000 nt of promoter + ATG
ggtgctgataaaagtgaaaacctaatctctcaatcgcagacgttgtcatctctcttcttttctcaagcgtccgatcaatctctcctcttctctcgatctctctccctctctgcctcctctcttcctccaatcaacaaacacctctctgtttcactcccgccctttttcgaattcttctggtaaatcaatcttctctctcaacttctctgattcattgcttcatttcaattttccccttttcatatcttattaggatgtgttttgtctctgattttcttcgttttctgttgatgggttttgtctattttgtgttaattgttgtaaagttagggtttttttttctttctgagatggcggagtcgcaggccaagagtcccggaggctgtggaagccatgagagtggtggagatcaaagtcccaggtcgttacatgttcgtgagcaagataggtttcttccgattgctaacataagccgtatcatgaaaagaggtcttcctgctaatgggaaaatcgctaaagatgctaaggagattgtgcaggaatgtgtctctgaattcatcagtttcgtcaccagcgagtatgtcttttttaaccttttaacaatgctatgttgtgtttgctcttgctgaatgtttagaggcttgataggaactttgagttttagtttcaagtcttaaactttatagtgatttttgggtttttcttaactagtgaaagttgaggcctttttagtccttacattggttactctttcttgttgttcatctttgtttggctttgatgttgcatatttgatgatgcaatggtttttctatgacgttgatgagcagagcgagtgataaatgtcaaagagagaaaaggaagactattaatggagatgatttgctttgggcaatggctactttaggatttgaagactacatggaacctctcaaggtttacctgatgagatatagagaggtatgttctgagtacgatgtttattagttatgctgttgtgtgaagagagtttttgaatttcactaacttactctgtttctccttttccttttcttgctctactacgtgaactggaatatcacagatggaggtcagtggttcttcttattctatttcttgttcattcctaaaacttgcaacgatctatgatctttatggcttccgtgaatcatctctttttgtcaacttatgtatcaaactatttatgctttccttatccttttcaatgatcaatagggtgacacaaagggatcagcaaaaggtggggatccaaatgcaaagaaagatgggcaatcaagccaaaatggccaggtatatgtctcaaatctcatgcctttgaccattttttcgtcttcgcattcatctgcacgtattctctcttccgctttagctaagttagtctgacattcatggggtttgtttaccatttggcagttctcgcagcttgctcaccaaggtccttatgggaactctcaagtaacttttcctctcttctcttcacactcaagcaatacgcatcattctcttctaatttgttaagaattgaaaacttgtaaagcatcacttatgttataatctatgaatacctcaaaatctgtgaactaatttgacattggactcggtataattgtaggctcagcagcatatgatggttccaatgccgggaacagactagtatgagaggagtattcaactttggttatgttccaccaaaagaggttatcttatctgtatattatttgtgttgtaagagttttgctatgcagaacttgtgactataatcatctcattgttttgttttgtttttgtttccttggatttgttctgaatatgtcatcaagtcagtcagtctatttatatatttggtttgttgattatttcaacaccggtctaaagaatgaattctgattttaacaaagatttcatacaagaatgagaacaaatgaatacttatttggaaaatgttcaccatcgataacgtagtaagatccagaatctgttaaacaacccttacctaaaatagtaagaaccctagattttatgtttatatcgcctgcattatctttagtcttttagtagtaacgaaagcaaaattagatgcttattgttgtttatttggttacagttgttgtaatcgcggcgttatctgttaaaccaaattagagattcttttttaacatatcgtttctacaaaaaaaacgggaataatccaacggtcacaaatttacaaatcaacggatcacgttcatttcgggctcacttctgtcaaaagacttaagacaaaaaaaaaaactcaaaaattaacaaagaaaattgattaaatattaataaataagaaaccgccgatttgcttcgtttcaaattctttcatcttttatgcgataaagcttgtttgatttttcttcttattgaatctgtgtggtttgtctatgggagaagagaaggagaactggagaagcgagctcgacgatatcaatgggcttagtctgattgatttctccgccgaggatgataacctcctcctctcttcctttctcgatcccaccacctttgatttctcaggttatttcaatttccatctccaatttctggaaattgttagctgaagattttcctgggaaacttgtgaattgtgtgatttggttcatgattgttcattgtggggatttatagattttttaaagcttgattagatttttttatgatgatgatggattcagatactgataaggaagacagaggtctttgtttatttggagatacacataattgttgtgatgaagagactttgggctctactactttagaagagaaggagcctcataagatcatgaagactaacctacgcaaaagtcttgcttgggacaaagcctttttcaccaatgcaggcaagtatttttttagtggctgtgttctgtggatttgttatttagtagtagttagttttgctgagataagttggcgcatttaggtgttttggaaccggatgaactgtctagc

SEQ ID NO: 13153 - DNA, 3000 bp, Unknown
  misc_feature (1)..( 3000): cDNA_ID_2713189_gDNA_ID_2214602_Annot_ID_135575 3000 nt of promoter + ATG
aaacttttaggtgtttgtttcctccaacctaatattttaggttttaggagtccacggtttgtttttcaatggtagttatattatatgtggttgttaggtaagtggtagtatattttgactaattagtagtttgacattatattaggaggtcgactcatctttttcaatcgtgagataaaatggtttttgaaaagtggacttggatttgtacaaaatgaattcgcagactccatttatataatgtcatatgtgatgcatgaaaaatagatagtcccgtctaaactcggtgtcaataactcaacttgtgatactacagtttcctattataaatagaattttcataactttttccttttcatcatttttttttttcattattaggatttcgaataccggtaaattgagaaagaactactgtcttttttcatagagaaaaaactacatgatcaaatttgtaggaataaaaacagataatggattaaggtgtatctatataatatcttggttacataaataaataaatcgtatatggtgctatatgcgattactatgtaattcaaagaaactcttaagtaaattataagaaagaactgtactgagggattaggttaggtgcatctttacgcaaaaaaaaagtggagtatgggaattaaaatatagaaagtatacagagaaatgcatgcttagttttcatttattcaaacaataaaaagaaaataaattagaaaaacgaaagaaacatatattaccgttagcaattaagtagcaagcagcaaacatgaggccgaacaatggcacgtgactctggcgcctcaacaagcaacgcttctctttgtcttttatgtcttattcttgtttctattttacaaggatcctctcgtttttttcttcaacttgatgcaattatcagtcccacgaaaaattgtattctttcgaagtaaatatttaaagaaatactgtagaaggtcaagatgttaaaaatatttccctacatattttagacatattgtttggtatagtgtctataactgtttcttaggcaaattgtaacaacgcttagacgtctattgaatatatttttttctaatgttgttactctttagtctttaacttcttaagagtgtcaatgcatactagcacgtctcaagagcaaaaccgtaagaaactctctgtgttaatgtattaagacttttgtttgtttgtgtagtcttagtgagatggaattgaagaaagaggttgacgttacatttctttgaggctttgaatggtagttatatgttaaaactttaaacaattatggttatggagttactgatagtagtaacacgtacgtttatagtaaacaaattttggttggacacgtttatagttaattatgctacatatgtgttggcattaaactctactcctccaactcgcaagtgacaaatccgcaacacctaatctttagagtatttgcactaagtaaaagagaaaatagactagtagagcgttaatttgtccattgaacaatattgctcatctgtttctgtactcttttcataacatctttaaaaaaaaattgaattctacttcgttttaatttaccaagttaactcataattttaccatcaaaaacacagtctcaacctgtttcatgaggaacggtttatattttataccagacattaacgtattaaagcataattcatggacgaacatcacctgaccttttggtcggaaagagaaaagtaaataaaatatggactaaattgacataaaacaaaaagtatcggggcaaaatcatgatttcccaattcaatccttttttttcacacacactctcttttctctttctggatattaatgtgtaaacaaatagacagttcactggaacaaagaaaaaagaaaaaaaaaagacttgggaaacgagcagagtcagtgagagaacaacactagtcacaagggacaaagagagaggaagaagatgatatccatagctcaattggtctcaacccttccgtagtttagctctttcttcaatctctcatcttttcttcattacatttcgatctctctgttcttaaaacatttcggaccaaaagaggaaagctgcagccacagttgcaggtgaagaacatagaacactgtcccttctctctctctcttctttatctgtttgaaatacctaaaaattggttctttatctgtttctttcgttgatgagttcgaaatacctaaaattttgttctgtttttgagttactatgttgcagaaagttttaacctttgagggtttggtttagtttttatgtttactcttttctgggtttttcttgaagattcagctaaaagaaaagaaaaaaatttgttttcaagaaagtttttttttccttcaaattttgatttttttttttctgaaaaaatgttctcggttaggtttaaattgaaatttctagtttggttagtttcttttaagatctgttgtctattttagggaagatccacctaataaaaccagaacccacgttaaactaaatgacagaaattgttattatctcctctcctccttcaaaagattccaaattttttgaagagaaaacaaaactaaaattgatgacttgacaactacaaaaagattatgtggaatataaatgtactttctttgcttgtaatttggtttacctctgtgagattagattgaatcacactgagaaaaaatctatttcctttgactgtgaacagtttctttttaagtttgtcttgttgccttggtttggtggtagtggtagtggtttcaaatggagtctctttgaagccaatgtctctgtatagtttagtttgttagggttttgtttttgtacacttgcttaagctttgtacttctgttgagtttgttgtatatgcttgcttatgttaatcttataacaccgatttgtgtttcttgcttctttctcacacacagagtttatcttcaaaggacccaaaagagagtgttttagaactctaatctcaagcaatg

SEQ ID NO: 13154 - DNA, 3000 bp, Unknown
  misc_feature (1)..( 3000): cDNA_ID_3028400_gDNA_ID_2214602_Annot_ID_187096 3000 nt of promoter + ATG
cagaaaaaaaaaaaatctataatttccaaccaacatagtttactttcagtctgatagccaaatttcccaagtaaatatataagaaatcagtccatagtttcaagctctagtaccattacctttgtaacatgtacctaccatattatatacctcagatctcatgatatcataagcaaacaagtttttgtggacttaggctctgtgctgcaggaaagttcatgatgcttatacatgaaaaataaaccttaatagtacagatcttttagttcataagaaaaacttacatagaagagtttgtcaataacaacagacatacttcttttaaaccaaaagaaaagagaggcagaaaacaagcacggttgggaaactaagaagcctttgcatttaaagtatcactaaggttctcgactctccaaaccagagccatcaaaagtgaagagtaatacaaggagttcatcaaattacacactttcaaaaagtctatagaatttacagaaaagtctataggaaactgattaggaaatagaagaggatgaaagaataaggcacgatggcaaattatcatatactgtatccgcataaaagagcatcagagcaagttcatgcaaaataggtaacacttgatatcatcttttcagtttctatcaatgtactacttcttcgtttatattcaagtaaaggccttgtacatgtatttcactaaacttacaaccatagatgacatgagcaagaaaattacatggaaaatccaatagcaggacttaagcttaaaatatttttctgaaccgaaaccctcaaaagtgcacctgcaggcaaataatcctagaaggatataggtttagaaagtcctaaccacgaatacactacactacccaagtgataaagccgtcgtgcttgattgatcactgattcatcatttctgcacacctttaaagtagaccaacaggaagcaattaggcccttgacttcactaatacaatgagaacaccaaattctattccttctcctctgatccacaaattgaatacactacagtttccttagataaacggatttagtccacaaaagtactagcctgcaaaggcttactacctcatttactatttctgcgctcttattgtcttcaaacccaccagcacaccttaatagactcctgaattcgggcttgtgtgaaaggatgctttcttaaaattagcattatgtttcacatcattgtgcatccaaatcaaatgcttgtacgtgacagcatgtcactctagaaaccattatatgatagatgtagtttgttaggaagattgaagttccccactcatggataccgtacctcaagcatcttcaactgactaaacacactctggtacacatgtgatggcagagactagttatggttatttccttacccctatggatcagaataacttctagatgacttgagttcaagttcgctttgctttcccaatcaaccaagaaggtccacaacacaatccgcaaatcagaatacatcaaggataggccagccaccaatcctaatgggctaacatgaggaactaacatctgtttgaaatgtgttatcaatgcaatttctttaagaatgatgccataatttcaaagtttctaaaagttctcaaagaggaagatgaattctgacctgaaactatagccgtactagttctcaaatcttccaaacacttgaatcactgattaggcttttctccagtttctcaactaccagaggttcgtggtggagaaaggtatgatagaactagaaaccaccattgccactaaacctgcagcctgcaggatacaaaccagctaagcctaggttatgctaatacactatatcccaaactagcttacccgcatcgctgaagtagcagcctgaacaacattatcaacagctaaccaaaacacaaagcttacaacatctcctctaatcaccgagctggtctcttctcagtatcggaatcttaaaaagctaacaactacgtgaaagagaacaaattcgaagtctgaaattatcagaaccgactccggttaacggacatgatcgcgatcatacccgaagattgtgggaaaagtcaccgatgtagcagcaaaaccgggaataaaccggattaaaccgaaaaaaagaaacaatccatcatcacacaatcacaagagaaaaaaggaaacaacgatcggcttgtttatacataccaacacgaaataatcagctcaacggcgaaacaacaataatgatcggagaaatgagaaacattaccaaagcgttccggcgatgagaaaagaagaccgatcggagaaaagcaaagagacgtatggattcgtatagatgacgcaaccttttatgaaaaagaggttttagagagagaaatatgttttgaagacaaattgctttcttttttggtgatggttgagcgatgaagagtatcggtttatatttaagaaaaatcaaattaaagcggttgagttacgacgttgccgggacattaatcccttctctgaccaacttcaccggctaccggtaaaacccgttcactgtcttattgtcgactaaacaatttattaattaactatggttcttcagtaatgggcctatatttttggactgtacttgggcctcagctgtacgtatcaaaagggttcgagaaactcagagattaaagggatcttgaccgttgatcgagatgactttgattttatccattaatagtcaatttgattgatgagttaagaggatgattaagaaagcaataaaggaagcgaatcggaatccacattgtattaatctttttgatccagtagccattggcgaatccaggagtattaaagttccattttgattttggcgacgatgatgaacagagtttagagaaatttgcattgaagaagagaagatttttggattttgtgtagtgggagaagggtaaaccctagcttgggagggacatgatcggatgctctaagtagcttgtgaattagagaaagagcaagtgagcaaat

SEQ ID NO: 13155 - DNA, 3000 bp, Unknown
  misc_feature (1)..( 3000): cDNA_ID_3028404_gDNA_ID_2214602_Annot_ID_187095 3000 nt of promoter + ATG
ccaagctagggtttacccttctcccactacacaaaatccaaaaatcttctcttcttcaatgcaaatttctctaaactctgttcatcatcgtcgccaaaatcaaaatggaactttaatactcctggattcgccaatggctactggatcaaaaagattaatacaatgtggattccgattcgcttcctttattgctttcttaatcatcctcttaactcatcaatcaaattgactattaatggataaaatcaaagtcatctcgatcaacggtcaagatccctttaatctctgagtttctcgaacccttttgatacgtacagctgaggcccaagtacagtccaaaaatataggcccattactgaagaaccatagttaattaataaattgtttagtcgacaataagacagtgaacgggttttaccggtagccggtgaagttggtcagagaagggattaatgtcccggcaacgtcgtaactcaaccgctttaatttgatttttcttaaatataaaccgatactcttcatcgctcaaccatcaccaaaaaagaaagcaatttgtcttcaaaacatatttctctctctaaaacctctttttcataaaaggttgcgtcatctatacgaatccatacgtctctttgcttttctccgatcggtcttcttttctcatcgccggaacgctttggtaatgtttctcatttctccgatcattattgttgtttcgccgttgagctgattatttcgtgttggtatgtataaacaagccgatcgttgtttccttttttctcttgtgattgtgtgatgatggattgtttctttttttcggtttaatccggtttattcccggttttgctgctacatcggtgacttttcccacaatcttcgggtatgatcgcgatcatgtccgttaaccggagtcggttctgataatttcagacttcgaatttgttctctttcacgtagttgttagctttttaagattccgatactgagaagagaccagctcggtgattagaggagatgttgtaagctttgtgttttggttagctgttgataatgttgttcaggctgctacttcagcgatgcgggtaagctagtttgggatatagtgtattagcataacctaggcttagctggtttgtatcctgcaggctgcaggtttagtggcaatggtggtttctagttctatcatacctttctccaccacgaacctctggtagttgagaaactggagaaaagcctaatcagtgattcaagtgtttggaagatttgagaactagtacggctatagtttcaggtcagaattcatcttcctctttgagaacttttagaaactttgaaattatggcatcattcttaaagaaattgcattgataacacatttcaaacagatgttagttcctcatgttagcccattaggattggtggctggcctatccttgatgtattctgatttgcggattgtgttgtggaccttcttggttgattgggaaagcaaagcgaacttgaactcaagtcatctagaagttattctgatccataggggtaaggaaataaccataactagtctctgccatcacatgtgtaccagagtgtgtttagtcagttgaagatgcttgaggtacggtatccatgagtggggaacttcaatcttcctaacaaactacatctatcatataatggtttctagagtgacatgctgtcacgtacaagcatttgatttggatgcacaatgatgtgaaacataatgctaattttaagaaagcatcctttcacacaagcccgaattcaggagtctattaaggtgtgctggtgggtttgaagacaataagagcgcagaaatagtaaatgaggtagtaagcctttgcaggctagtacttttgtggactaaatccgtttatctaaggaaactgtagtgtattcaatttgtggatcagaggagaaggaatagaatttggtgttctcattgtattagtgaagtcaagggcctaattgcttcctgttggtctactttaaaggtgtgcagaaatgatgaatcagtgatcaatcaagcacgacggctttatcacttgggtagtgtagtgtattcgtggttaggactttctaaacctatatccttctaggattatttgcctgcaggtgcacttttgagggtttcggttcagaaaaatattttaagcttaagtcctgctattggattttccatgtaattttcttgctcatgtcatctatggttgtaagtttagtgaaatacatgtacaaggcctttacttgaatataaacgaagaagtagtacattgatagaaactgaaaagatgatatcaagtgttacctattttgcatgaacttgctctgatgctcttttatgcggatacagtatatgataatttgccatcgtgccttattctttcatcctcttctatttcctaatcagtttcctatagacttttctgtaaattctatagactttttgaaagtgtgtaatttgatgaactccttgtattactcttcacttttgatggctctggtttggagagtcgagaaccttagtgatactttaaatgcaaaggcttcttagtttcccaaccgtgcttgttttctgcctctcttttcttttggtttaaaagaagtatgtctgttgttattgacaaactcttctatgtaagtttttcttatgaactaaaagatctgtactattaaggtttatttttcatgtataagcatcatgaactttcctgcagcacagagcctaagtccacaaaaacttgtttgcttatgatatcatgagatctgaggtatataatatggtaggtacatgttacaaaggtaatggtactagagcttgaaactatggactgatttcttatatatttacttgggaaatttggctatcagactgaaagtaaactatgttggttggaaattatagattttttttttttctgagcttgcggatgttttcctgggattttgaatggtgagagaaatttttgtgcaggtttaatg

SEQ ID NO: 13156 - DNA, 3000 bp, Unknown
  misc_feature (1)..( 3000): cDNA_ID_3028408_gDNA_ID_2214602_Annot_ID_187093 3000 nt of promoter + ATG
taagatagttcttttttgctctattcgaaaacatcccaagcaagcttgaaaagacggttttcatcatataatctggtagtatgtatatgccatttggatcccatctacgcatacatagaatcagctttaatattatcataggtatgtattactcttgaaaacacacaaaatatcagatagcaatttacctttcaacgcaatgaacaagagttgaaacttcagaaataaaaaaaggaaaccaatgtttaaaatgtatttgcttgtgtacaaacaaacaaaaataagatatatattataaattcataaagacaaatatagccatacagattaagatttttttttttgtcggcatacagatttaaagatacttacgaatgtacgacacactccaaattaaatataataaaagtttttatgaaacggataaggcccttttagagatagttataaggtcaactcaaataagtcacattcatatttcgaagaaatataaaccaacttaaaaaaatatattatacttacaattatagagcaataatgcaattacatgttaacacagcccatattttattgacttttttagaacgaaacgataggaattttcagaattatttccgacacgcttgctttcaagtccagcatttcgcgggaagaagcaaaaggtgggtcaatatttttggatgccagaatccagatccaaattaatccacatgtatccgtagattttaagggatactataacatgtttttttctttctttctttagtaatagtatttgttttccgtttacactaaagatatttagtattgttattttttgtttaattggttagttcatttcacacacaaacatagctttacgattttcttcagaggccgtttcactattccaagtaaatcaacaattcattataacaaaattgtgttttagtcccaaagtattagagaatagggactttacatggctataaatgacgtcatcagtggataatatgtagctatgcatctaaatctgtagtcacgtcgtagctaatgactacaaaacttccgtagccatttcttctccagtgtgcctactgatattcatattagccaatcgtgtcttttaacaacgtttaagttatgataccatcaatcaccctttggctatgttattgatataatacatgtgacaaatcgaccaattaagtcgtctctctgatcaaaacaacttatacgaattcaaaatcaatctgacatattattatcacataattagttttacaaatcgaactaaccacacattaacctgaatatctatatagtaaaaattgttattggtgaaagtggatcatatactcgtatatataagcaactagataaaccacattaacttctagatgtagacttaaagaaaataagaatcattacatcaagaatattgaggataagtgaattggcaacaaagcattatgtctgcaagtgaatggattggacggtagttaatgcaattgtacatgtatttacagccgccataattaagaaagtgggattggttttattagtagtggtttgcgaatgcgcatgcgattactgaaatgtctaaaaggtcaaacttaatggctttcaattattcattatatacaccaaggaatctttttcttaattcttctttggattttcttcttaaaatattatattgttacatatctttattgctgacatataaaaatgtaacctttttgctttccaaactaactaaaactttacggtaactttaaaattcataaccaaattgctcatattcgtacgaaagaatgatagatgaacagctacttaaggatcttttcaaatttgatcagacttctatagtaacattctatcgaagatcggattcttatccccaattcccaacaatatatttgaatgattgctagatatatactgtattaataagtaaactttattaacggttgtacataatcttaaaaatttaaggtttttattcagtatttttgccaaatattttgatgagcagtctaattctttcgttctttttttgttaaaaattaacaactctaacagtactgaatatttctgaagtgagctaatgattccaaattggtaacaatatcttaaacggaaggtaaaatgcgggtaagtctggtagaatctgttaaattgaggtagcataaattttaccacaaaaaaaaaagcagaaaaggattataagattcaaaaaaaaaaaaagtaaattcacttaaccttcttttttttattgtcaactgattttgttattgataaacttgttggaaccaagataataggccaaaacttttttataatcatatatattaaataataattgtatttaagataataggccaatataagctataggttagcatagcgctgaaattaagagagttgggtatgtagacgttgacgtgtaatattcatgataatcattgcaagcaattttatttattttctatactaagaactatttcaaattgtatacatattactttttggtggaacatgaaaatgtttatagattgctgattaatatttgaaggaaaaaataacagaaaaatggatatatacttgaatcggtttgataatatattggaacaaaagtgaaaagctaaattaattaatgctactgtgctagtatattactatttttatcgaattaaattggacatcgagtctcactgaattcacaatttcacatgttcaacaactattgagttcagatagctagatagctagtggttttaaatttgagtattaatatgagtttagaacgattaagaaacccccgattattgaaaaataataattaattaatagtgacagcaaccactatgactaagaaataaagatgcttaattttatcatacacgattagagaggttctcaaactctatataaccctacattggaacacatatagagccacacaccaataattaattagacaaaagataagagagaatagagagagagagagcaatg

SEQ ID NO: 13157 - DNA, 3000 bp, Unknown
  misc_feature (1)..( 3000): cDNA_ID_3409327_gDNA_ID_2214602_Annot_ID_187090 3000 nt of promoter + ATG
gtacctaatgtggagattagtcttgaaaagtgtttgaaaaatatataataagaattaagaaactatccaatgttataaattgacagttttggtctcaagagtaaatatataaattgatgtttagatacagtatagattaattaattgagctattaataaatagatagaaactctaaataaatttacggagaccccactaatcaaacacttggaaattagtacgctcctaacgaaaaggaggttttgtcaaaagatcttaaaatcgagaatatataaagttattattcttaaacatatactgttgttcttaaaagcaggacccatttcgattgcttggagttggactagagatataatcccaatgaacaataatttgtgggcggtcaaatacattctaagatcatcatatacattctaagatcaaaaacatcatggatcttgcctcactcataagatccatatataccatataaagacattacaagcttttcaatgtaatgaaacaacaactaaaagatgagggaaaaaaaataacatattatagataattactgagtaaaccactcgtaagcagacaacgaagagttgaagataccacaaggagattcaagcttgattttgtcgacagccttttagtatttaagtaattaactctagactaagatacttgacaattagagaagcactagttaaaccaaaaaacatttgcagccaataatttgttgttttcaaaaaaaaagaatgagtagaactgaaagagatatcaacatgtgatatgcaaattagttggtcccaaagttattgccgtatcatatacgaaggcgaaactcatattttactggaagatatctagatttaaactaatattttcgttaacgagtccttcatatatatactcattgttctgcaagaaagttttgtatgatttccaccgttaaatctgaaagaaagctatgctaatacgttttctttatatacatacaaatctcagctcatttttttttcaatcttttatgctctgcaatgttctataaatgtcacgatgtaatttaccaatgactaatttaggaaaagaaataactacctcaatgtagttctcttaaaatacttttttagatcatgttgatataaactttctagcttcaaatacaaagcaatgtgtcccaaaaagtgaatctagcagcaagagatctcaacaaacaactagagagcatacagacaaaaagtacaaaatgttaaacttttctagtaaaaaggattagctaagtagaaccaccgatttcctcttatagaaaagatctcggccgtcaatttttctgaacccaacgtgtgaacataacaaaacattaaaaaatataaaaccacagtgttcgatctgaatcatatagagagggaccagaggaaccaaaaaaaagagtgagagtttcagtaccaaaaaatccttagacacaaaaagagatgaggttttcttcatctagacccgtttcgagtccgggtcgaaccgaaaacccgcctctactcatgcggttcttgcggaccaaaagcagaagcagaagccgttctcgttcaagaagacctatctttttccgtcggaaaaatgcttctgctgcggcggagacacaagaaccaacttcacctaaagtcacttgcatgggtcaagtaaggataaaccgatcaaagaaacccaaacccgaaactgctcgagtctccggaggtgcaacagaaaggcgacgccagagccgtcggtgcgggtgggtcaagaacgcttttccctgtcattctttcaccggaataatcaaacctacttgctttagccctgtgtggcgtaaatggaaatcattttctcatgctagtttctcgaaaaaatcagagaagagatcaagttcgtctagaagtgaacctatctttggccgctccacggtggagccagaggaaccagaagagactcgaaaagaagaaaaccaagaagaagaagcaagttcatgtaaatcattcacagctacaccaccgagaaacgcttttttactaactcgatgtagatctgcaccatatagatctccttcatcagctaatagcttatttgaagatcaagaagagacaaataaagctcctttccaacgacacgcttcgtcggaaaatgtatcagtttcggaagaaccgaagacaagcgttacagaaacaacagagagattagaggattcaagaagagaatcagcagcgagtgaagaaccaaaacgaagcgttttgggatcaccacgacagtgtctgatcctcacgcgctgtaactcggagccagcgagactcgttcccgagatgggttatcgacagaacccaaggttgggatttacgtgatgcgtttacattttttttctctttcttttgtattttttcgagaaatttacattgaaacgattactatattctttgctggatttacttggggaagtttcgctgaaatttagagctttaaaagctttctttatcgtagagaatcttgtggttccctgaccatgtaatatttttcaattgtcctatctatgacaatgtaactaaacaaacaatttcgttcgtacacttatacactaaacaaaaaaaagtctttgatatagttttatttttctgttatgccaactatgtttgtgttcttaaaattctacatctctaaaaacagatatattttccttatattacataaaaatggtttacccataaattgatgagttttatcaagagacttgcaaaatattgtggagatcacgaaaatgccttgaggcccagatattaatgggcttttaggcccatatgttaatgagatccaaatatttccaagttaagtaattggtaatgacggtgaaggtgcctttgactatcttaacgcgtacgggacggtcgataaatttagttaaagtctctttcttcttctttactttttcttcttcttttagatcaaagaaatcgttttgtgcagatttgatcttgcgttaattttctaagcaaaat

SEQ ID NO: 13158 - DNA, 3000 bp, Unknown
  misc_feature (1)..( 3000): cDNA_ID_2702176_gDNA_ID_2214602_Annot_ID_187088 3000 nt of promoter + ATG
ggacaattgaaaaatattacatggtcagggaaccacaagattctctacgataaagaaagcttttaaagctctaaatttcagcgaaacttccccaagtaaatccagcaaagaatatagtaatcgtttcaatgtaaatttctcgaaaaaatacaaaagaaagagaaaaaaaatgtaaacgcatcacgtaaatcccaaccttgggttctgtcgataacccatctcgggaacgagtctcgctggctccgagttacagcgcgtgaggatcagacactgtcgtggtgatcccaaaacgcttcgttttggttcttcactcgctgctgattctcttcttgaatcctctaatctctctgttgtttctgtaacgcttgtcttcggttcttccgaaactgatacattttccgacgaagcgtgtcgttggaaaggagctttatttgtctcttcttgatcttcaaataagctattagctgatgaaggagatctatatggtgcagatctacatcgagttagtaaaaaagcgtttctcggtggtgtagctgtgaatgatttacatgaacttgcttcttcttcttggttttcttcttttcgagtctcttctggttcctctggctccaccgtggagcggccaaagataggttcacttctagacgaacttgatctcttctctgattttttcgagaaactagcatgagaaaatgatttccatttacgccacacagggctaaagcaagtaggtttgattattccggtgaaagaatgacagggaaaagcgttcttgacccacccgcaccgacggctctggcgtcgcctttctgttgcacctccggagactcgagcagtttcgggtttgggtttctttgatcggtttatccttacttgacccatgcaagtgactttaggtgaagttggttcttgtgtctccgccgcagcagaagcatttttccgacggaaaaagataggtcttcttgaacgagaacggcttctgcttctgcttttggtccgcaagaaccgcatgagtagaggcgggttttcggttcgacccggactcgaaacgggtctagatgaagaaaacctcatctctttttgtgtctaaggattttttggtactgaaactctcactcttttttttggttcctctggtccctctctatatgattcagatcgaacactgtggttttatattttttaatgttttgttatgttcacacgttgggttcagaaaaattgacggccgagatcttttctataagaggaaatcggtggttctacttagctaatcctttttactagaaaagtttaacattttgtactttttgtctgtatgctctctagttgtttgttgagatctcttgctgctagattcactttttgggacacattgctttgtatttgaagctagaaagtttatatcaacatgatctaaaaaagtattttaagagaactacattgaggtagttatttcttttcctaaattagtcattggtaaattacatcgtgacatttatagaacattgcagagcataaaagattgaaaaaaaaatgagctgagatttgtatgtatataaagaaaacgtattagcatagctttctttcagatttaacggtggaaatcatacaaaactttcttgcagaacaatgagtatatatatgaaggactcgttaacgaaaatattagtttaaatctagatatcttccagtaaaatatgagtttcgccttcgtatatgatacggcaataactttgggaccaactaatttgcatatcacatgttgatatctctttcagttctactcattctttttttttgaaaacaacaaattattggctgcaaatgttttttggtttaactagtgcttctctaattgtcaagtatcttagtctagagttaattacttaaatactaaaaggctgtcgacaaaatcaagcttgaatctccttgtggtatcttcaactcttcgttgtctgcttacgagtggtttactcagtaattatctataatatgttattttttttccctcatcttttagttgttgtttcattacattgaaaagcttgtaatgtctttatatggtatatatggatcttatgagtgaggcaagatccatgatgtttttgatcttagaatgtatatgatgatcttagaatgtatttgaccgcccacaaattattgttcattgggattatatctctagtccaactccaagcaatcgaaatgggtcctgcttttaagaacaacagtatatgtttaagaataataactttatatattctcgattttaagatcttttgacaaaacctccttttcgttaggagcgtactaatttccaagtgtttgattagtggggtctccgtaaatttatttagagtttctatctatttattaatagctcaattaattaatctatactgtatctaaacatcaatttatatatttactcttgagaccaaaactgtcaatttataacattggatagtttcttaattcttattatatatttttcaaacacttttcaagactaatctccacattaggtactctctctagagataaaaatatttatcaaaaacatttttatttatttattaagtagtagataaactactgtggcaaaatcgtaaatgtctaaatgctgatgaattttttttgctgctccaatctggtttagtgctccatatacatccacggccaaaatgaatctatggcggcattaagattcattagtaagcaacgattatattaatataattgtttttagcaatgattttccgtaatttcccaaatatgtttcagttaatgtgttccaatcccaacaactggttgttgcaaaagaccaccaacgcaagcaatcatcaaacatcaaaataatcttaccttagcgaacaaacaataactacacaattctcataaagctcttatatatcactaacttcacacattttgttttccacaaaaataaaaacggaactcactcaagaaaccttcttccttgaagagagggttatg

SEQ ID NO: 13159 - DNA, 3000 bp, Unknown; identical to SEQ ID NO: 13153
  misc_feature (1)..( 3000): cDNA_ID_2713189_gDNA_ID_2214602_Annot_ID_187087 3000 nt of promoter + ATG

SEQ ID NO: 13160 - DNA, 3000 bp, Unknown
  misc_feature (1)..( 3000): cDNA_ID_3028416_gDNA_ID_2214602_Annot_ID_187086 3000 nt of promoter + ATG
gaagctggtaaagaagtgagaaaagaagactttagttattgccttaagtgtgtttgatatagatgcattttttacaaggaaaatagttatatttgaaagatatatgtacttagcttgtgtattaagaaactaaatattttaatatgactcagatacatttcctctctctaaattattgttttctgtttattttcataaaatagtagaagttttaaaaatattaaaatgatcacaaatattttcgtaattgtttatagattttacctatttcttgtattttaggaaaatttgtaaattttaaaatgtttatagttaattgaattcttaaataacttttaaaaccctaataagttttcgaaaaaaaaaaattactttccctactatacaataagaaaatgtatcaaaaatcaaaatttaataaaaatgaataaaagtaaacttatataaagggattgaataataataaagttccccttaatggttaaagataatgaatacacgtggcgtttctggatttggtagaatatgaaccagagagaaaataaataaagagattaaaaaaaaaacgaacggtgctgataaaagtgaaaacctaatctctcaatcgcagacgttgtcatctctcttcttttctcaagcgtccgatcaatctctcctcttctctcgatctctctccctctctgcctcctctcttcctccaatcaacaaacacctctctgtttcactcccgccctttttcgaattcttctggtaaatcaatcttctctctcaacttctctgattcattgcttcatttcaattttccccttttcatatcttattaggatgtgttttgtctctgattttcttcgttttctgttgatgggttttgtctattttgtgttaattgttgtaaagttagggtttttttttctttctgagatggcggagtcgcaggccaagagtcccggaggctgtggaagccatgagagtggtggagatcaaagtcccaggtcgttacatgttcgtgagcaagataggtttcttccgattgctaacataagccgtatcatgaaaagaggtcttcctgctaatgggaaaatcgctaaagatgctaaggagattgtgcaggaatgtgtctctgaattcatcagtttcgtcaccagcgagtatgtcttttttaaccttttaacaatgctatgttgtgtttgctcttgctgaatgtttagaggcttgataggaactttgagttttagtttcaagtcttaaactttatagtgatttttgggtttttcttaactagtgaaagttgaggcctttttagtccttacattggttactctttcttgttgttcatctttgtttggctttgatgttgcatatttgatgatgcaatggtttttctatgacgttgatgagcagagcgagtgataaatgtcaaagagagaaaaggaagactattaatggagatgatttgctttgggcaatggctactttaggatttgaagactacatggaacctctcaaggtttacctgatgagatatagagaggtatgttctgagtacgatgtttattagttatgctgttgtgtgaagagagtttttgaatttcactaacttactctgtttctccttttccttttcttgctctactacgtgaactggaatatcacagatggaggtcagtggttcttcttattctatttcttgttcattcctaaaacttgcaacgatctatgatctttatggcttccgtgaatcatctctttttgtcaacttatgtatcaaactatttatgctttccttatccttttcaatgatcaatagggtgacacaaagggatcagcaaaaggtggggatccaaatgcaaagaaagatgggcaatcaagccaaaatggccaggtatatgtctcaaatctcatgcctttgaccattttttcgtcttcgcattcatctgcacgtattctctcttccgctttagctaagttagtctgacattcatggggtttgtttaccatttggcagttctcgcagcttgctcaccaaggtccttatgggaactctcaagtaacttttcctctcttctcttcacactcaagcaatacgcatcattctcttctaatttgttaagaattgaaaacttgtaaagcatcacttatgttataatctatgaatacctcaaaatctgtgaactaatttgacattggactcggtataattgtaggctcagcagcatatgatggttccaatgccgggaacagactagtatgagaggagtattcaactttggttatgttccaccaaaagaggttatcttatctgtatattatttgtgttgtaagagttttgctatgcagaacttgtgactataatcatctcattgttttgttttgtttttgtttccttggatttgttctgaatatgtcatcaagtcagtcagtctatttatatatttggtttgttgattatttcaacaccggtctaaagaatgaattctgattttaacaaagatttcatacaagaatgagaacaaatgaatacttatttggaaaatgttcaccatcgataacgtagtaagatccagaatctgttaaacaacccttacctaaaatagtaagaaccctagattttatgtttatatcgcctgcattatctttagtcttttagtagtaacgaaagcaaaattagatgcttattgttgtttatttggttacagttgttgtaatcgcggcgttatctgttaaaccaaattagagattcttttttaacatatcgtttctacaaaaaaaacgggaataatccaacggtcacaaatttacaaatcaacggatcacgttcatttcgggctcacttctgtcaaaagacttaagacaaaaaaaaaaactcaaaaattaacaaagaaaattgattaaatattaataaataagaaaccgccgatttgcttcgtttcaaattctttcatcttttatgcgataaagcttgtttgatttttcttcttattgaatctgtgtggtttgtct

SEQ ID NO: 13161 - DNA, 3000 bp, Unknown; identical to SEQ ID NO: 13151
  misc_feature (1)..( 3000): cDNA_ID_3028423_gDNA_ID_2214602_Annot_ID_187084 3000 nt of promoter + ATG

SEQ ID NO: 13162 - DNA, 3000 bp, Unknown
  misc_feature (1)..( 3000): cDNA_ID_2713179_gDNA_ID_2214602_Annot_ID_187098 3000 nt of promoter + ATG
cgtctttggccatttctataactttttttgttatatatgaaagttgtgttttgtattgtggatatgttgtgtttgtgaagactgaagagacgaatgaaagttgtttatatagagagactatagctatagtgagtgctctcattaattttgcttgtcaatatacgttaataattgtatacgtgttattgattgattatattacgataatgttttccttttggtaggcttatggttgtttttattattcgtttcaatgaaatgaatatagaattgtgtgtatgacgattatgattatttttgtggaaactttctttcactaattaattacctagctagctgtcatgatgatatataatctaaaccaatctaatcattgctacataatcaatagaaactgattttgcttaatatattcatgttccactgttttttttttgtttaagcagaatttccatatacattagtataattaactgatgatagtaagaattagctactgctaagagtttttcatctcaattagtgtttgtcataatatgatagttaaggtattgttttgttgacaaaattaactataactaaattattattattttggtttcaacttcaactattgatacaaatctgtaactaaagatgaacttatttgagattctgattatttaaaagaatgattgtggagctatcaataggaacagagaccttttaattctaaaattatggttgataatggagttttgtggttaatttaacttagcctcgccgccccatacctaaacgttgttttcatttggaccgaccctaatatactatatgcttctatatttttctttctcttgtcctatgtcatgagccttgtcctccccctagaataatatagactgtcactcttttacacataaaataaataaaaaatatgaagttatgaaccttatctatttgggcaatacttgaaagttgttacttgttaacgataaagctttttgaactacgagatagctagattgatcaatagtaaaatttctgattatctagattctatcatccttcatttaatttctagaaggagctccttatatagttatactagttcttatgcatgtaattagtaacgattaaattgacttcctatgctcttaacgttacaaatcaaatctattaggtggataaaaaagagtcttttgatagctctcagctaaccctaccatataacaaaaacataatttatcacatggacatgataaaagaaacggcgtcgcttcacgggttatgtttccactaaagtagaaaatatgatgaaagttgggtccactggaccggagaaaccgccccatatagaattgattagctccgtcaattgcatcggcaccgtccatacagattaagtccaactccagttcagccgtcccaaccactcctcttatgccacgttgtttagtccccatattcaacaatcatttgctctcactcctcaattccaaatttccaattgcaattttcttacgtatattattcagtattcactaatcactagtctgtctacaaaaataaattggaaaaataaaaagtgtacatagacaaaaggaatgtggtgtaatgtggtgttcatggccaatgttttgccacgtcacaatatccttatcgttgtagcgacatttctctgctcttattggattatatttccacgtcagaaaggtgctctctctctctcggtctctcccctggttttatttttgttttctttcatctttgtcgctttctgttttgttaaagaattgtctactcgatattggttacgaatggtattgttctctgtggaaaaatgggttaatttgttatgataaacattttttgttccaaacaaataaatgttctttcatttcatagtaaattttttagtcttctgaacacacgtatatatatgcttgctaacaatgaatccacaataacagatcataaaattacatctgactcatatgtaattctatcatgatatgttgagtcaatatatagtcgatggagtatatatagagttataatttgattgtagtgtcctatgacagatttaacactcagcttacaccgaaaaagttaagtctcaaataaattacgtatttatgcgttatttaacttattatacaaaatgacctaaaataccatttcattttcctatacaaatattcgcttactatatatactatatgtttaccaactatcatgaaaaagatgcacgaatgatccagaatgtgcttgaaacggcagaaaaacaaaagaatcgtgtgacacgatcgagacaaatactttactaatcatataaaatcattatttatcaaaaacttaaaaagcacctacagtatatgcaatgtggatacagctaaaagataaggtatgtatgttaacacacaagtatatatgatcatcattgtcaaatatgttcacttatataattgctcacgttttatcggtttttggttttttgtcaacggtcaaattttttgggtgatgcctaacaaaatttaatgacgtgactcttgggacggtgatctatcagtagcatttaacaatctagttatttggaaatgaattacagtatgagatttatactatttgtataaacttttcaggaaatgttaaattatatctttaggagattttttgtattggttctcactgatttagattatcaagttactgagataaaaaaaaaattaatacttgttttagatttcctttagttaccactgaccaacttctttagcaaaaaaaaaaaattaccactaaaccaacttatgcattcgttacaaaaaaaaataccataaaacaaaacatcaatgttgtaagttgtgacattaaatcaaaagtgtcaaaatcaacagtagcacaaaccaagagctcactctatataaagaacctttattcttcatctcacaaccacaagccctacaacaaccacaaagcaaaacacttacttagaaagtccagaaacatccattaacacat

SEQ ID NO: 13163 - DNA, 3000 bp, Unknown
  misc_feature (1)..( 3000): cDNA_ID_2713183_gDNA_ID_2214602_Annot_ID_187097 3000 nt of promoter + ATG
ctttagccatatgtgttaatggatgtttctggactttctaagtaagtgttttgctttgtggttgttgtagggcttgtggttgtgagatgaagaataaaggttctttatatagagtgagctcttggtttgtgctactgttgattttgacacttttgatttaatgtcacaacttacaacattgatgttttgttttatggtatttttttttgtaacgaatgcataagttggtttagtggtaattttttttttttgctaaagaagttggtcagtggtaactaaaggaaatctaaaacaagtattaattttttttttatctcagtaacttgataatctaaatcagtgagaaccaatacaaaaaatctcctaaagatataatttaacatttcctgaaaagtttatacaaatagtataaatctcatactgtaattcatttccaaataactagattgttaaatgctactgatagatcaccgtcccaagagtcacgtcattaaattttgttaggcatcacccaaaaaatttgaccgttgacaaaaaaccaaaaaccgataaaacgtgagcaattatataagtgaacatatttgacaatgatgatcatatatacttgtgtgttaacatacataccttatcttttagctgtatccacattgcatatactgtaggtgctttttaagtttttgataaataatgattttatatgattagtaaagtatttgtctcgatcgtgtcacacgattcttttgtttttctgccgtttcaagcacattctggatcattcgtgcatctttttcatgatagttggtaaacatatagtatatatagtaagcgaatatttgtataggaaaatgaaatggtattttaggtcattttgtataataagttaaataacgcataaatacgtaatttatttgagacttaactttttcggtgtaagctgagtgttaaatctgtcataggacactacaatcaaattataactctatatatactccatcgactatatattgactcaacatatcatgatagaattacatatgagtcagatgtaattttatgatctgttattgtggattcattgttagcaagcatatatatacgtgtgttcagaagactaaaaaatttactatgaaatgaaagaacatttatttgtttggaacaaaaaatgtttatcataacaaattaacccatttttccacagagaacaataccattcgtaaccaatatcgagtagacaattctttaacaaaacagaaagcgacaaagatgaaagaaaacaaaaataaaaccaggggagagaccgagagagagagagcacctttctgacgtggaaatataatccaataagagcagagaaatgtcgctacaacgataaggatattgtgacgtggcaaaacattggccatgaacaccacattacaccacattccttttgtctatgtacactttttatttttccaatttatttttgtagacagactagtgattagtgaatactgaataatatacgtaagaaaattgcaattggaaatttggaattgaggagtgagagcaaatgattgttgaatatggggactaaacaacgtggcataagaggagtggttgggacggctgaactggagttggacttaatctgtatggacggtgccgatgcaattgacggagctaatcaattctatatggggcggtttctccggtccagtggacccaactttcatcatattttctactttagtggaaacataacccgtgaagcgacgccgtttcttttatcatgtccatgtgataaattatgtttttgttatatggtagggttagctgagagctatcaaaagactcttttttatccacctaatagatttgatttgtaacgttaagagcataggaagtcaatttaatcgttactaattacatgcataagaactagtataactatataaggagctccttctagaaattaaatgaaggatgatagaatctagataatcagaaattttactattgatcaatctagctatctcgtagttcaaaaagctttatcgttaacaagtaacaactttcaagtattgcccaaatagataaggttcataacttcatattttttatttattttatgtgtaaaagagtgacagtctatattattctagggggaggacaaggctcatgacataggacaagagaaagaaaaatatagaagcatatagtatattagggtcggtccaaatgaaaacaacgtttaggtatggggcggcgaggctaagttaaattaaccacaaaactccattatcaaccataattttagaattaaaaggtctctgttcctattgatagctccacaatcattcttttaaataatcagaatctcaaataagttcatctttagttacagatttgtatcaatagttgaagttgaaaccaaaataataataatttagttatagttaattttgtcaacaaaacaataccttaactatcatattatgacaaacactaattgagatgaaaaactcttagcagtagctaattcttactatcatcagttaattatactaatgtatatggaaattctgcttaaacaaaaaaaaaacagtggaacatgaatatattaagcaaaatcagtttctattgattatgtagcaatgattagattggtttagattatatatcatcatgacagctagctaggtaattaattagtgaaagaaagtttccacaaaaataatcataatcgtcatacacacaattctatattcatttcattgaaacgaataataaaaacaaccataagcctaccaaaaggaaaacattatcgtaatataatcaatcaataacacgtatacaattattaacgtatattgacaagcaaaattaatgagagcactcactatagctatagtctctctatataaacaactttcattcgtctcttcagtcttcacaaacacaacatatccacaatacaaaacacaactttcatatataacaaaaaaagttatagaaatg

SEQ ID NO: 13164 - DNA, 3000 bp, Unknown; identical to SEQ ID NO: 13150
  misc_feature (1)..( 3000): cDNA_ID_2995137_gDNA_ID_2214602_Annot_ID_187082 3000 nt of promoter + ATG

SEQ ID NO: 13165 - DNA, 3000 bp, Unknown; identical to SEQ ID NO: 13158
  misc_feature (1)..( 3000): cDNA_ID_2702176_gDNA_ID_2214602_Annot_ID_135576 3000 nt of promoter + ATG

SEQ ID NO: 13166 - DNA, 3000 bp, Unknown; identical to SEQ ID NO: 13157
  misc_feature (1)..( 3000): cDNA_ID_3409327_gDNA_ID_2214602_Annot_ID_135578 3000 nt of promoter + ATG

SEQ ID NO: 13167 - DNA, 3000 bp, Unknown; identical to SEQ ID NO: 13156
  misc_feature (1)..( 3000): cDNA_ID_2685906_gDNA_ID_2214602_Annot_ID_135580 3000 nt of promoter + ATG

SEQ ID NO: 13168 - DNA, 3000 bp, Unknown
  misc_feature (1)..( 3000): cDNA_ID_2702188_gDNA_ID_2214602_Annot_ID_135582 3000 nt of promoter + ATG
aaaatcttctcttcttcaatgcaaatttctctaaactctgttcatcatcgtcgccaaaatcaaaatggaactttaatactcctggattcgccaatggctactggatcaaaaagattaatacaatgtggattccgattcgcttcctttattgctttcttaatcatcctcttaactcatcaatcaaattgactattaatggataaaatcaaagtcatctcgatcaacggtcaagatccctttaatctctgagtttctcgaacccttttgatacgtacagctgaggcccaagtacagtccaaaaatataggcccattactgaagaaccatagttaattaataaattgtttagtcgacaataagacagtgaacgggttttaccggtagccggtgaagttggtcagagaagggattaatgtcccggcaacgtcgtaactcaaccgctttaatttgatttttcttaaatataaaccgatactcttcatcgctcaaccatcaccaaaaaagaaagcaatttgtcttcaaaacatatttctctctctaaaacctctttttcataaaaggttgcgtcatctatacgaatccatacgtctctttgcttttctccgatcggtcttcttttctcatcgccggaacgctttggtaatgtttctcatttctccgatcattattgttgtttcgccgttgagctgattatttcgtgttggtatgtataaacaagccgatcgttgtttccttttttctcttgtgattgtgtgatgatggattgtttctttttttcggtttaatccggtttattcccggttttgctgctacatcggtgacttttcccacaatcttcgggtatgatcgcgatcatgtccgttaaccggagtcggttctgataatttcagacttcgaatttgttctctttcacgtagttgttagctttttaagattccgatactgagaagagaccagctcggtgattagaggagatgttgtaagctttgtgttttggttagctgttgataatgttgttcaggctgctacttcagcgatgcgggtaagctagtttgggatatagtgtattagcataacctaggcttagctggtttgtatcctgcaggctgcaggtttagtggcaatggtggtttctagttctatcatacctttctccaccacgaacctctggtagttgagaaactggagaaaagcctaatcagtgattcaagtgtttggaagatttgagaactagtacggctatagtttcaggtcagaattcatcttcctctttgagaacttttagaaactttgaaattatggcatcattcttaaagaaattgcattgataacacatttcaaacagatgttagttcctcatgttagcccattaggattggtggctggcctatccttgatgtattctgatttgcggattgtgttgtggaccttcttggttgattgggaaagcaaagcgaacttgaactcaagtcatctagaagttattctgatccataggggtaaggaaataaccataactagtctctgccatcacatgtgtaccagagtgtgtttagtcagttgaagatgcttgaggtacggtatccatgagtggggaacttcaatcttcctaacaaactacatctatcatataatggtttctagagtgacatgctgtcacgtacaagcatttgatttggatgcacaatgatgtgaaacataatgctaattttaagaaagcatcctttcacacaagcccgaattcaggagtctattaaggtgtgctggtgggtttgaagacaataagagcgcagaaatagtaaatgaggtagtaagcctttgcaggctagtacttttgtggactaaatccgtttatctaaggaaactgtagtgtattcaatttgtggatcagaggagaaggaatagaatttggtgttctcattgtattagtgaagtcaagggcctaattgcttcctgttggtctactttaaaggtgtgcagaaatgatgaatcagtgatcaatcaagcacgacggctttatcacttgggtagtgtagtgtattcgtggttaggactttctaaacctatatccttctaggattatttgcctgcaggtgcacttttgagggtttcggttcagaaaaatattttaagcttaagtcctgctattggattttccatgtaattttcttgctcatgtcatctatggttgtaagtttagtgaaatacatgtacaaggcctttacttgaatataaacgaagaagtagtacattgatagaaactgaaaagatgatatcaagtgttacctattttgcatgaacttgctctgatgctcttttatgcggatacagtatatgataatttgccatcgtgccttattctttcatcctcttctatttcctaatcagtttcctatagacttttctgtaaattctatagactttttgaaagtgtgtaatttgatgaactccttgtattactcttcacttttgatggctctggtttggagagtcgagaaccttagtgatactttaaatgcaaaggcttcttagtttcccaaccgtgcttgttttctgcctctcttttcttttggtttaaaagaagtatgtctgttgttattgacaaactcttctatgtaagtttttcttatgaactaaaagatctgtactattaaggtttatttttcatgtataagcatcatgaactttcctgcagcacagagcctaagtccacaaaaacttgtttgcttatgatatcatgagatctgaggtatataatatggtaggtacatgttacaaaggtaatggtactagagcttgaaactatggactgatttcttatatatttacttgggaaatttggctatcagactgaaagtaaactatgttggttggaaattatagattttttttttttctgagcttgcggatgttttcctgggattttgaatggtgagagaaatttttgtgcaggtttaatggggcacagacattttcttggttcatcccagttttttgatg

SEQ ID NO: 13169 - DNA, 3000 bp, Unknown; identical to SEQ ID NO: 13154
  misc_feature (1)..( 3000): cDNA_ID_2702192_gDNA_ID_2214602_Annot_ID_135583 3000 nt of promoter + ATG

SEQ ID NO: 13170 - DNA, 3000 bp, Unknown; identical to SEQ ID NO: 13163
  misc_feature (1)..( 3000): cDNA_ID_2713183_gDNA_ID_2214602_Annot_ID_135584 3000 nt of promoter + ATG

SEQ ID NO: 13171 - DNA, 3000 bp, Unknown; identical to SEQ ID NO: 13162
  misc_feature (1)..( 3000): cDNA_ID_2713179_gDNA_ID_2214602_Annot_ID_135585 3000 nt of promoter + ATG

SEQ ID NO: 13172 - DNA, 1462 bp, Unknown
  misc_feature (1)..( 1462): cDNA_ID_1837267_gDNA_ID_2214603_Annot_ID_135590 3000 nt of promoter + ATG
gaattccttatttctttataaggacatacactaatttcctaatttatcagatgtccccaacatagacaagtacttggtatcatgtcaaaaattcatctcaagctactttcattttttcacttaaccgacctgcaaaatgtttttttgtctgcaaatccccaaatacagagacatcttgtgaagaaatcatggagaatgatagataatgtaaagtccatttcaatattggtaaattctaaattcagaccttattataaggagagatgatcaacactatagtctgaaatacctctaacacaatatctcattctcttcctattaagaagcattacattcgaaattacgaacaaacaaaaacgcatggaaccaatacagatggtgagaaaacatagacaagaccccaaatgtgaaaatgtggagagaaatagtcattggccggttttgaggatcttcctctgcctgaggaatctagcgattggaggagtcaacgccatcgtgatcggaactctgatcggaaaaagcgccttattgcacaaaaccgccaacgctagggctccgccggccgatttcgcaagctgtttcgtcttgttatcgctcgtaacggaaccttgctcttccagctttaaatcgaggctagggttagggttttccttgctggagaaccatgggatttggtatttctccaagagcgattcgacatcgacgttgttcttgatcgcgatgtagaatccactaattgagacgccggagaccgagaaatggactccaagcgcgacttttccgtacttcttcacaatctccttgagccgagtcgccatcgaaatcggtgattttcagaatcttccagaagcgaagccgacgcacatgaggaaagaaggtttgttcagcttagggtttatcttcatttaaacccctcttgggcctatttcggtccatttcaaagcccgttagtattcttataaacaataattgtctacatttgcgcctattaaaaaataaagttgtcacctttttagtagccgaaggattgattcgttatgacgtttatggtcgtgtaaatgttaatttttcttagtagtttggtcttcatatttttcaaagatggttgccaaaattgaccaagtcagtgtcagtggctgctacagttggatagaagcctccatcatcaaatcaattatacaaatgacacaaatttaatatttgtcgtgattgtcattttcaggttattaacttgcatgaccacaccatgtcgtttctagcataataatataagagtaattgttggagacctttgtcttctcttgatcttctcagacggcagttcataacaaaactcctaattaagaatttggtagttggatcccaggtacttttttatatgcacacgattctattatacaatggactctggctgatcgaattgtccggtgtacacgcaggtttgcataccgatccggggatg

SEQ ID NO: 13173 - DNA, 3000 bp, Unknown
  misc_feature (1)..( 3000): cDNA_ID_2710549_gDNA_ID_2214603_Annot_ID_135591 3000 nt of promoter + ATG
atcttttgtaattgcagcatgaacgtggaagagactacagtagagaaagatatgaagctgaaggcaatgtaacttcccggaacagaccttcaagcccatttcatccatcccaaagccgctctccaccgccacacgcaagggttagtggattcaatcattcattctctgatataacgcctttgttaatcattcattctctgatatattggctctacttagttgcagactcagagatacaacaacggaaaagatcatttcgaggggatgtacgaggcagatgccgatatcacaccgcgtaacagccctcccatgagtcctgttcatcaacacacaagctactctccaccaccgccgttctactcatccagtgacgacgaagacgacaacaattccacctatctctttccagaaattgccactggacgtcgttccaggggagtttcaggaagcagcacggttcgtttttttctctcgcgggtctctatttaccaaagtgtgaagaaaatgcttaaattcaaattgctttggtttgtgcagccggttcactacaagtatcagatcacatcggtagagacttacgagcaggagaggcaattcgagccgccggagctgccggacgagtcacagagcttcacgatgcaggagatcgccagaatgcgcggacttcaaagctacggaaaggaagagatacaattagcgatatccgagacttacgtctccgtcgccaattacaaggtacggatgagcatcgccgccacgctcgaagcgatcattgacaaacacggtgacatcgccgcctcgtcgaagttacaatctacctcaacgaggtcgttttatctcgaatccctagccgcagcagtaatggaactgaaatcaacggcgttgagagatctgacgaagacgcgagtggcggaaatcgcggcggtcgtgaaggacatggattcggtgaaaatcgatgtatcgtggctcaaaacagcggtgacggagctagcggaggcggtggagtactacgggaagtacgacacggcgaagattgtgagggaggagtgcgatagggaaatgacggcggggaaaaaagagatggaggagatgagggaggagctgcggcggagagagaaggaaacgaaggaatgtagagagagagtgacggagttggcgggacggctggggcagctggagatgaaggatgtgagagtgaagaagaatctggagctctatgagagcaaggtccttaaattcgacggtcattcggttctcgttgactgaacccgaccttttggaaatttaattaaaccggtttagtggagtaaaccgctttggaaaatgcttatccaagcataatcactcggagaagtctttgtttgttggaaaagagggagggagaaggttcatgctcattttttaaaagtcctcctatctattctaaacgttgtccatgtcaacgtgtgatagttgaattggtaagcataaaatcatccccaacaattatagtccgctgttatcatcgcgtttttgcgttagtttacggaaaaggtatagacgtttgatactgaggttttgtggacgggcctctagttgggtttgttcgtggcaactaggatgagatttcagctccttagagttgtggaaattacgtaaatttctaaatttggcatctcggaatcggtgtttcttcttttatttccgttatatacatatgtttttctcctttgctgttttgtcattgtctgtttttctgtacattttgttatttttttgctactagtactctttgtaacttcaatcgaaatttcgaaaattgtataaatatttcatattttaccaaataaaaaaataaaataaaaattagtatataattcaatatttgtgattctgactctggaaaaccattttgtggtcctctcttgaccgctttcattgaaaaacagttggtaaggtcacttttactactgctttgatttcgattactacctggtttttgtatttgggctgacagaagaaactgggccttcgaaagggcatatgttgtctattcctttctaccgcctatataattagggaaacgcgtcaaacgttcaacaaaagctaaattacgtgagtgatagtagttttttttttgttaaaaagatattcaattttttgttgttaaaaattcccccaagaatttaagaaatgataaaatataaaaataaatgtttttcaattaaactttgtcaactgagattcaaatagagcatttaaatataaccaaaaaaaaaaagaagaagaaaggaggaagcaaatgataatggagtaatgagaacacaatgaagttagagatctcctaaaatctttgattcttttcttctgcttagttagactgaaacctcttcgatccattctaactttgacaaatacataaaatactaaaagaaaagaaaaagaaatagccaattgacgaagtctcggctgaaactataaaatgactcatttttttattgcggtcaaagtcaacccatgttagaacccaataagatattattatatatacacctataagcttcattggctatctctcttatgtacagacaagatgagataaatcattcatctcatttcttcaactggctttgcttctttctttcttcttcctcaattataattttttcacaggtatcatcaatctctattctctcttgacctttttttttatctagcaaaagcttttaattagctgattatgagagtttttgcaatttatcaacatcacaatccgttattgattagtaagaaaaccagtggaagattgtcaagtctctctctttggagaagaaacataattaagcaaagagaaaacatgaatcttttattgtagtttccatatatagaaaccgttgactctcttcttgtgtgatgatatctacttgttttgctgggtcaatggatctgacgcttttttttttctttttggaatggtcaggtttgagatcttatcatagagttttgttttaagtttgtgag

SEQ ID NO: 13174 - DNA, 3000 bp, Unknown
  misc_feature (1)..( 3000): cDNA_ID_2713225_gDNA_ID_2214603_Annot_ID_135594 3000 nt of promoter + ATG
ttatacatcagtacaactaaaaaaagtaacaactcaggaagatggtacctcttctctgtcgacttattcacagcttcagatttcttgtttacgttctttgatgccttttgtcctgtaatttcaagatcagtcacacatttcaccttataagctttatttgtattgtgtcaaatgagaaagaagaagcatactggccatctcgttcaagaaacgtattccttgtgagtgtacattaggggtcactttatccgcgccactgcataatcacaattggctttagaatctgagaagcgggttctgttcgttatgttaaaagtaaaaaacttgttgagagtttccaaccttagagcctttcggagaccttccactgatagcactcgaacaggctgagtggtctttttgtttccgcttctatctgctggtggctcaactgtgtaaatcccttgcgattttagatctctgaacgctgttctcaagttcctgaaatagaaaaacatcccaagaatcatgaaaatttccaactcgtggtatgaccaacctatgaacacgactaggtaggattagcataccctcctttgagttcagttctcattgtagcaaatttgtctgatgcattctgtgaaaaattcatagttagtgaaaaacatggttcattgcattgacgccagaaaacaagaccaaagtattaccaaaatgtaccagtttatgaatcttgcagaatgctccttggcgcctgaaaccaaattcaaagttgtaactcaacattcaggaaacaatacaaagagagatgcatcgctaaggtaaacttacttgtttacaacagatgtacaagttgttccatctttccgctttgctgtgcagactccataatcagctgaaacccccagtttaaccatttgtttagcagagttgacactcaatgagaactcacgtccctgccacaaacataaattttttaaaaagaagatttagttaagccatccggctactggaaaagctgatgctatatacttaccccattgtccttgcgaagtgagcaattaaacagaccgaaaaccgttcctgccttttctgtctcattctttttgtaagcatcaccaaacaagaacaaggagacattgttttcatttaagctaccgatcttccatataccataagcctgcccaatggagcttgttttgggttgtcctttctctgttatcactcccattgtcgcccagcagccagagagtttgtcacccattagcaagttcctacacagaaacttgttttaaatctcttctgcttcccaagagtagtaagtaatgtttatctatctaagaagtgaacaacttactttattgttggcaatcgaacgaaacggatatctgaaaacagatcacttatctctgcagggctaagtaattgattcctacaaatacatcaaaagattggctatttcagctatagattggaactgaaaaaacaatctacgactatagtagctgtgactcacattgctagagtgaaaagggtttagctttacctaatgcgcaagccagaaaacttctcaatgtcattggtattggagttgttggagcctttgggtttagtgtttttggcgattggtttaggattatagtcaatgcaatcttgaacaacacttctgaagtcagacaagtcagagtgacccctacgcttgggggattcatcatccgtgagatatcctgcacaaacgttacctcgcattaaggacaagaacaatccaactgagagaaaagcatcaaactttacagattcttgagcgaattagatggaaacaagacgcccccagatcaatattcgaatcataagatctattacgcaagtgattgatcgaatcagagatgcaaatcggaatcgcacactggatttaagaaagcaaaaaacaaaaccctacaaaagtgagagagaaactcaccgggtgcagcagaaggagaaccaggaggagtttcgagaaccctatcgtcaagagacagaagcaattcaagatcctcttggtcgttttccatttttcaatttcacgatccaatagcgatgcacaagaacacaaaacaacatctcgtgggcgggagactgaatttcgttgcccgccgaaacgcataagcgacgccgtttcgttgttaataaataatgtttcataccacccggttttaccggttcgtgagaaagatcaggatggtgaaataaaccggaaatttgagtgacgatagtgtcggcatggcatttttttttgtctcttaacgagagagagtaaataaaatagtcagatgtcttacgtggtccatcaacaaccacagggccctaattgccaccaacatccacttaaagtgtgccacctgtcttaatcatgggcttcttatcaacatgcgatggcccaatataagatacttacccttctctttcaataattatccaaatgtgcccaaatatagtttttagaacaaatgaacaattatatatgttttcgtaaacaaaatactaattttctttgaaaacatatacgtaaatttcaatattgatgtatgtagaaagttatgaaaaaggaataagattttcattaattaatttattatagtatcatcagaaagcaatgttattattcgaagagagaataaaaattaaaaaaattaaattaaattgctgatattttttatttttaaaagtaaaagacaaaaaaagaacaataaaataaattggtccgtgtctttagcagcgaagcgcacacaaagtttgcttgccttctgggcttcacgattctcacgacatctgtttatcttctccgatttccacgtccatggatctcagtcaatgttccttaatctctcttttcgattagtccaatctccactaatctctgacctcagatcgcttccgacgccgctgaactgtgtccgtcttgatctgtgtttaggagaaagcttctagggtttttgttttggttgctgagtagaatttgttggatctgaaacggaaatcaaa

SEQ ID NO: 13175 - DNA, 3000 bp, Unknown
  misc_feature (1)..( 3000): cDNA_ID_2713221_gDNA_ID_2214603_Annot_ID_135597 3000 nt of promoter + ATG
cacaccgactcctgacgaaccggctccttgacgaaccggctccttgacgaaccggctccctgacaaaccagctccctgacgaaccgcctcctgacgaaccagctccctgacgaaccgcctcctgacgaaccagctccctgacgaaccagctccctgacgaaccagcttcctaacgaaccgactccttgacgaaccgcctcctgacaaaccaagcttgtgacaatctacaccgaataaatggtctagccgaaccaagctctccatgccatgttaatctcttcgaaagactccctcaccattacgtgacaagtcaagactccctcgtcgtgatgagccaacattctcaccattactagccaacgtcttttcctctagctaaaccatcccgcacaacaaagtcgtctcgcaaagtataatcatcaagtaaaacatagccatcccgccaagtagagccatatctccaaacgaagtcgtatcgccaaaccctttactgcaagcggatccatcgctaaacaacttagctcctcgtctaactgtcgacgtcatcacttaactgcttggctccaaagcgcatagttccaaactacaagctttcacctatgtaacatgaactacgaacggcttgatcccttcaaagggtacgtaggcagcctctaccgaggcgcatctataaaataaataaacttttgtctgtcaaaagcacgaccgagttctcgagtattcaaaggaagaaattgtttaccctaaaaccctttaattacttattgttacaacctcagtacaaacactatcctggaagaggtgctaaacactttcacgtgcattttctcatggattggaggctcctccagcataaaggagaactcctcattccactttgggtctttgttcttctttacatgctttgtttttctctcctcccctttgaagtagatgtgcacgtaaggattggtatggtgctttccttcaacatcctcagccgaatgcactattaccacaaacattcctccagcagccggtgtgccttctggagctttctgaaccgcttgcatttcttccttcgtgaatgacttatacaagagttcaacttccagcttccccctacaagctgccgttcttgaccaccgtccaaagtcttacgtagttccaaagtgaatgctttatgttcgtcaagcaccatttctttcagatagagtttcgtatgtccgagaattttgaagtaaacaaacctaaccatgttatcacctagattgagatctataccttatttattgaatcatgacatcaggagaaacccccgatgacctaacgcttctcttatagtttatttaaaacttaaatcaataactcaattaaattatatgcaataaaataatatattcgatagacttataaaatctctaaatgagttaccgactgtcacgtcatcgatacacggaagagttatgttgtaggagatttttcagattgtggtttgacctatgctatatttatttgacatggaggtttatcttgcaaaaacaaaattacattgaaggtttttttgcacaaattcttatgttttctaatagagttatcgagtgccacgtcatcgatacacgtaaggattgtattgcaggtgattttagagatggtgaagttgacttgcataattctggaaaatagtcatatcacattcgcttctcttcccactggaggaaatgatctcaaacgcatccgcttcaggtattttaactactcaaaacaatctctatatcttcatgacattcaaagctggaacatgagataaaaactaaccattacttgtgtcttgttttgaaagccgagagatgtacaataagtggcaagctcaacggcggtggggtgagaactatgacaagatcgttgagctttacaatgtacagagatttaaccgccaagctctccaaacgcctgcaagatccgacgatcaggtaaaagacatatatcctagatcctttggtctttcttcagacaagaaccttgtgaatcttgtcctttgatccaaagaaggtaacacaagtttatttttcagtcacagagagattcaacatactcaaagatggattcagcaagagaaagcaaagactggactccaagacacaacttcagacctccaggatctgtcccgcatcacttttatggcggctctagcaactatggaccaggaagttatcatggaggaccaccgatggatgcagcaagaaccacaacttcttccagagatgatccaccttccatgagcaatgctagtgaaatgcaagctgagtggattgaagaggactagcccggtgtttacattactatcagacaattatcagatgtacgtcgagtcagattcaggtataacaaaacatcttaaactaagcattggctaatcatatacattttgaaagttgataatcataccgtgactaacaggaatctatgattttgtggtttaatcaacagccgggaacagtttggggaagtgcatgttaagacatggtgggagcagaacagagagagaatacaaacacagtacctctaaaaagaaacattatgagcttctctaccacaatctttaattaattaattaatctcattcacataacaacacaactatatacattttgcttatcttttgttcatcttaattagcttaacatcttatacataaatcaagtgttctgaagtatcatctctaatcaaagctgattacatataagtataattatcgttaaatgctctacacgttttcaagtaatgtaaaccatgtcttgtttttgtgacacaaagataaagaagtcaactatgaacctaactattctttaattctagctagatctttctcctctttgggggtttaaaaatatcaaatgttagttcttttatgatcaacatgtggtatagaatataaaaagtcaactttattatttgcttataaggaatacaaagtagagttgaccatttgaggttttagatgagcaaaccataaacatg

SEQ ID NO: 13176 - DNA, 3000 bp, Unknown
  misc_feature (1)..( 3000): cDNA_ID_2702224_gDNA_ID_2214603_Annot_ID_135602 3000 nt of promoter + ATG
taatgttcgagattgtattattttttccttttcgggaaactaaagggagcgatgggcccgctttgatctggacggttggggatgctttgcaggaggcttctcagccgttagattcaaatctaagagttgaaagttattcaaagcttatcttcttcttctcccgaaaagatctaacagagtgaagggtacaatgggaaaaagacaagtttatatatttaataatttaatattattctggttcagtcaacattaaagttgacggacgtaagcagatattttgactagtcgtcccatatttttgggaacgcaaactgcgtgccgtttctttttttatttttattttattacgctctcgtacaaataaatagtggattttcacagagtagccccaaagtttttttgtatgtatttattttggtcaaaatctcaaaagagtggtcaaaagcgtaacgtccatagtccaaatgacatgacgatgggacctgtcaatgcacatttacactttccaaacaaaaaaaatactacatgtatccaattttgaaatctttagttttacccaaaataattcaatgaaaagatgagtttggttactaatagtagtttggccactaagtttatctgtatcaattatgattctatctacctatatttaaagaagtgattgagctttaaatgtgcctcttttaaatttatgaaggtatgaatgatttgaatcccaagagtttgtaaagatgttttgactctgaataatgacaaaaccgcaaagtgtgatacagtttcgatagtaacgaaaattttgtatatatttatttaatttattattatttgaacctcaacgcaacttatcgaacaacacatttttattcggagttttagttatgggatcttcgagtttttatctaacatgaaggtcatggaatcaacgtttgtttcatgtaagtgtgtgataatgtttaactttttacttgcgaatggaaaaccatattgatattatgacattgtatattaaagatgtctaactcttttagaatcatctaaatgactcacatgtaaaaatttaattggtaggttctaaaggcatctccatcagtgagataccttattggtttttaaaaaaaaatatattagtattttaataaatattagttctataattaaattttaataataaaataatatttgaccaatagatgatatacaagtgttcttatgggtttttcagagtttttcacttgagagactaattttactctctctcttactttttgattatattttatttttatattaaacagtttttcaataaaaaatcattgatggagatggtttaataccttaattatcatctcggaataatagtagatcgcaaaccaaaaactaaaaaagaaaatatagtagaaaaatatctaatttttaacatttgctttcacactaatgatactagctaactcggctactaatttttattttgaaaaacaaccattgaaatatatagactgcaagcgtgggtttttcccatttttctaatttccaactaagaaatatggacaaactaaaacaaaaaaattaacagattttacagtcattgtcgaagaaaaagatggtatctctacacatatactttacacttttacagtcgttgctaaatcttttatgttggtaaattagctatataacttcaataattagaacctttttttttgtcatgagagttctcttcgaatattgattagttttagaaaataatcaataattcgtaaacacgtatactattaaaatacatttgatattgtagttgaagtgtgactttattaacttgaaagtatgtttcatcgagtaagaatgacattcatgctaaagtatacttaagctctggatgattttttttttcttgatacttattggctccatcttaataaaaaaaaacagaatggcagacgtaggattatataatttcgactaagcatcctctctgttctactatgtaaattcgaatacatgtccgaataattaggactttgaaaattctccacaactacatgatcataatgccaattctctttgatttaattaatttttatttttgataaatagactactttgttcaatcgatcatcgggtttggagacacaacttttttacttttttagtaatacattttttataagctcttgttaaaaacaaatacattttcgcttacttatcaaaaatgaataaacttattcctagtaatatttttttttttggatcataattcgtagtaatatatatgatggtgattacatgagacaatgatcttgagtcaacaagtcaataatttgtagactaatagaaaaaggttttaaaatgttttagcatacaaataaaatgataaatgaaaaaactaactgaatatacaaatgtaattggcttttaaaataaggtgctacttaaaataggatgaatctaacgaaaaaacctaactaaatcctttagagtttcagttagtgattcaacacttcaactttttgatgctattataaccaatcttgcgattcttttaggcgagttgggacgaaaaatttaataaaactattgatgagtagaattattttagtctttttaattatttattttggagcatgcacatgatagaagatttatcagtttcggattaaaccccgtttaagatttttccacatatcttataaaatattaatttttattttcacttctcacgaaaatatttatattatttttttattggttaattagttaatatagtgaagataaaaggaaactttaatatgaaaagaagattatcatatttgagccaaaagtaattaaaaataataattttgttgctcgaacgacgtcgctttgctgggagcgcaaataatctccggcttctgatcaaagccgctaactcaggcagaggctttaacatgccttcactccagttcaccgccgttgtcttctctctcaccgacggcttaagttttatctgtcggagtagtttca

SEQ ID NO: 13177 - DNA, 3000 bp, Unknown
  misc_feature (1)..( 3000): cDNA_ID_3028499_gDNA_ID_2214603_Annot_ID_135603 3000 nt of promoter + ATG
gataaaaggaaactttaatatgaaaagaagattatcatatttgagccaaaagtaattaaaaataataattttgttgctcgaacgacgtcgctttgctgggagcgcaaataatctccggcttctgatcaaagccgctaactcaggcagaggctttaacatgccttcactccagttcaccgccgttgtcttctctctcaccgacggcttaagttttatctgtcggagtagtttcaatgcggagtgggaagaagagagctcgctcagaacctggatccacaaagcaaccccgaagcaaatactccgacaacccaccggattttgcctcgttagcgtctctttacccatctttcaagccctttgttttcttctccggtagtcgagctcgcatcgactggaccgattacaacgcaacccgagagctcactcgtgtcctccttctacatgaccatggcgtcaactggtatgatttcaattgtacaaaggaactagcttttttgctctcaagaacagttagttatttaccaaagtcttatatatataggtggattcctgatggacagctttgcccaactgttcctaatagatcgaattacattcattggatcaatgatcttttgtcctctgggatcattcaaagtttgggtggtgatggaagtaaagtaaagggctttgacattggtactggggctaattgcatttatcctctccttggtgcatctctttttggttggagttttgttggctcaggtttttcttcttcttttattatacttcatctgcattatactagcttctttagtagttggctctatgttctcaatttggtgacaatgttgttttgtatgcagattttactgttgtagctctagaatgggcagagaagaatgttcaaagtaatccccatttttcagaccttatcgagatcagagactctaaagttcctccacagtgttcctctgtccctgaggttgaaaatacagagagggagaaaaccatacaggaggaagctgaaatttccgccacggttaagtctgattatcatgacaacaagagttttattgaaccagctgtactactcggtgttgtcaaggaaaacgaaacattcgacttctgtatgtccaatcctccattttttgagacctttgaagaagcggggctaaatcctaaaacttcatgcggtggaactcctgaagagatggtttgcaatggtggggagcaagcttttgtgtcacgtattatcaaagatagcgctgtactgaggcaaagattcaggtaaattgtacccaaataaacctttggatcttccacattctggttttccatccatcaggacttatcgttttgtgaacatgtttaatattaggtggtacacttcaatgcttggaaagaaggctaacctcaaactcttgatatctaagctttgggaagtgggagtgaccattgtgaagaccactgaatttgtccaaggtcaaacatcccgttggggcctcgcttggtcgtttatgccaatagctaggaagattatagcacctcctgtagtcaaaaagagcgttctttcttttatgcttgaggtattctatctataactttcgtcatcctttacttatatttgttctgtaactatataaaagtctcgggctttacaaaagccttacattctccatggtggatttgtgtgtttatagtgcattaaacggcagtacagtgccgtagatgtgctgcaatcagttgaagaattcttcaagagctgtggcgcctcgtgcaagttaaactcttctacattttctgttgacgtaagtgcactacctgtattgttttgtcttgccatccaatcttgtttctacagtatctcaagctcaatggagtttctttctattgttgtgcagattgttgcatctaatgaccagtgcaacacaatctcaaagaatgacattgcagatgtagatagtgtaagaagccatggatatgaaaaacagtcactggatggctccagtttgcaagtccctgaatataacctatctttccgcatcttggtatgtttggatttcatttgagaaatccctaacaattgccttcaccttttcgaattgtttatgatgaagaaacttcttttacaggtgttccaacagatgccaggaacgttgcttataaaaggatcattgcagcagaaagatagtcccctctcaggttagtcattttgctcggtttccctaagttgctggaaaaaatttcacttctttattcatgaatctgcaaaagctttggttctattcatttgatctcaccaaaatcgcgaagtaccaaaactttcgctgttagttaccaacgtgaagacaactgaattgtcggtttaattttgcatatgcaggattgttctccagggtcttcggttcgttggaagaaagtttgaagtccaaattttgccggtaacgagtcccagggtactgttctgacttgaagactggcatctgtcaaaaactaaatgaaaatgatgaatcttcaaatcttagacacatgacatgttcttacacacaaaaacaagccgtcttttgaattgattcctacataaactgagacaattactctcaacagaagcaagcaaacttttttcagctaatcttgttgtggatgaaaagtgttgcatagcagaccactcgtgtttctcaactgcatatataactagaatcaagacttgaaaagacttaccttacggggaaagatacacagagccaagttggattacccaaaagtagtaaaggagagagagagagagagggttcttcacttcacgtgactaagcaagttacttttgcctttctctccagtttctctttttgatcaaccatcgtttgtgatgaaaaatgtaagacctctaccacctatatatatcttgcattgcatgtgggtgtagttattttgaattgtcattttctcttttcgcagtgaccacctatatataactttggtgatccctcaaccctttgattcatttggaaagat

SEQ ID NO: 13178 - DNA, 3000 bp, Unknown
  misc_feature (1)..( 3000): cDNA_ID_2702200_gDNA_ID_2214603_Annot_ID_135605 3000 nt of promoter + ATG
caatgatactccatggcacaagagaagaggaacaacaacaagcttcttcaggtaaaaaaaaaaaaactcttgcattttccatcatcgatcatatctgtttattcttctgctgccattattaagcataatactggtctgatctttgggtgttcagaacatgtaagatggtacgactcgagaaagagcatgaacgaagaacatttggtaagcctgtacagtcctgaatactaggaagaagaagatgcaatatctctaggctctcaatagattgaatgaaatttgccaaaaacaagcctcatgagtcttaaaactggatcaatcaacaaatctgcggtcgggttcatttttgtattgttttatggtcactgtacagacaaaaaagtttgtctagttaaaaaaacttcacattctttagttttgatctttgtgtctctcttcttagtacagtacaggtcttcttcttatctggactcttttgtccaaatttacactgttatatatttatatatgtatctacatttttctaggatgaaatattccttcattgtatctcacttgaatgaaataataaggtaaaagtttgatcagaattgagagaaataacaagaatctctgtttcgtttctttataaatcgatcaacgagagagacagagaacatgaatattaccattttagagaatctgaatgatcgataagtccgttatacgaaggaagacaagacttcttagattcataacaagttagaaatctaccggtgaaatcattgtaggatactaaagtgatagaagtttgttcggtggtagcttgagactttgtctttctttaccaccagtcaccaaaactctatcattttaatctcggacattttagtgagcatctaacataagaaggaagaattgtcttctctttctcttggaaacgatgaagttaagagatatatagacaagtaatgatctactatcttatccaggaaggtgacacgaaagtaagccacatgtactcaccttacattgtctagatatatagacaagtaatgatctactttcttgtaatttaggtgtagaaatagataatttctattctcatacaaattatgaaaaacagactaaaaacatataaattacaacaaaaacaaatttcttgttcttggtattatatatttcttgtgatttggtactacaaataagtcataattactctctcatattagtattcattatagcaaaacataactagatgagaattaaataataatgatttctttcaaattctaatcatttgatttgtttcttactttattttaatataaactgtatgcatatggtaaagaaatgtaacatggatttgactccagatcagtctaaagcctgacctattgagtcactatcttcctattcaattgcaacctttggtcactcttttatattacaatacatgtaaaacctctaacaaaaaacattacaggtaaaccaaaagagattaatggggaagaatttaggattagtagttagtttttatctttgcatcacgttcgcactcggcgaatacttttcagaaactcgtccaatcacaccgaaacaactagtggtcacaaatctccatttcttctttcacgacactctcaccgctccaaacccatcagccatcctcattgccaagcctactcacacaagaggagacaacgactcttctccctcacctttcggttctctttttgctctcgacgaccctctcaccgttggaccagacccgaaatccgagaagatcgggaacgctagagggatgtacgtttcctctggaaaacatgtccccacgttgaccatgtacgtcgacttcgggttcacatcgggcaagtttaacggtagttctatagccgtgttttcgaggaatacgataacggagaaagagagggaggttgcagttgtgggaggccgaggaaggtttaggatggctagaggagtggctcaactcaatacatattacgttaacttgaccaatggggatgctatcgttgagtacaatgtcactctctatcattattaacaacactatatacataaaggtctttctaaatcttaatgtaatcacttcccttggaataatttaatgcatgttcatgatttttatatattaagctgttttggttgccatgccttttaaattgtaagaaataatacattccatgaaaacaaagttagtctatgaaatctccttaaaagcatcttcaactcttttacattttgcatacatattaacaagtgcactcccgtgcaacaaaaaaggtggtccgaatcaattttttttttttttggttgcccactttctatctattactcaaaatcttaatcagtattagtactaaaattgtgttaaatactttgttaaacaatttttattgaaactttttttttgactcttatgcacattacaataatttctcttcaaaaccaaagaatgcacttgcctaccaagatcaagcattttttcagaagcaatccatcaacagtacatccaaatcgtctcgtagatgtaaactactaaaaagcttgacggatcgggaatattatggattcaatttttctatttatctcatacatgtaaactactaaaaaccacacagtttaaaactataaattacatttgaccagaagatcctatcagcaccattacataatttacatagccgagttcggagttattagatccaccaatgcaataacatagagttctcttaagtagtctaattcaaacaattaaattattaggtgaaccattacaccaccacatactgactttgtcacatatgtcccagcatactttttcttttagttaaagatcattttgcagtttggttgaactaacttggactgggtgtgattcatgtatatgtaagttccctataaatagaattatatacgactgcaccaaaaactcattttactctcacaattacaaacactttgttacaatttagaccccaccagaaaaaagcgaaaatg

SEQ ID NO: 13179 - DNA, 3000 bp, Unknown
  misc_feature (1)..( 3000): cDNA_ID_2702234_gDNA_ID_2214603_Annot_ID_135607 3000 nt of promoter + ATG
cgtaatattctctttaattgaattgttcaattaatttgaattatacttggttaagcccgtattgttgtgagtgccaatttctgcatcaagagttggcataaaaaaagagaaggagaagatacaaagggcaagggtaagagtgcaaaagaaccttctttcttagtccaaaaatgtctattcttgtaaggcccaaaaatggttcctaaattaaaagattcagcccatttaaaccccaaatcaataataacctcctataatactatttttcctcttaccaaaaaataaaataatacaaattttttgttttattgagaatttctattttgtatttattcattcgatgcattgtttacattattattattattattatcatatatttaaatttgaaatttatgaatattcatttctatagatagtttacagttttatctatcttttactatttacattactttgatttttattagtataaattaaaattttaaaatgaacaatgtaaccattcttttttacacgttctcctttttacttgtcgttttcgacataatatttccgtttcttttgaatactttcctttttgtttgtcttttttaacataatattttcgtttctcttgaatacttctccttttacttgtttttttcgacataatatttccatttcaataccatacttcggtttttttccttcgaaaattccctttttacttgtcattttagacataatttttcagtttctatgtcatatttacgtccttttaattatcaaaatgtaggtaaaaattaagaatacactatattttcattttttaaaaaattcattgaaaatggaaataagtaaaaaagtaaattggggtttgcaacattacagagcaacaacacgtgtcgacctcgggatggacaattcgagagcatttaccgtggtcaaaaactcaacctaaccacggttcaagaaacaatggagatatcgacacgtgtctcaatctaaatacccgatgatattatctcacagatattcgcttcctctataaatatcttctcttcgtcctcaacagcttctccagaaaatctaggtcacacacttttaaaatcctcgttcccaaaatcgaacaacaacaatggcgtcgcatcctaaagttttcttcgacatgaccatcggcggtgcaccagcggggaagatcgtgatggagctttacaccgacaagacaccaaagacggcggagaatttcagagctctatgcaccggagagaaaggcgtcggacgtagcggaaagccacttcacttcaaaggatcttcgtttcaccgcgtgatcccaaatttcatgtgccaaggaggagatttcaccaaaggtaacggaactggtggcgaatcgatctacggagccaaatttgaggatgagaatttcgagaggaagcacacaggacctgggattttgtcgatggctaacgctggtgctaacactaatggatctcagtttttcatctgtacggtgaagactgattggcttgatggtaagcatgtggtgtttggtcaggtggttgaaggcttggacgttgttaaggctattgagaagatcggatcttcttctggaaagccgacgaagcctgttgtgatcgctgattgtggtgagatctcttcttagattccggttgtggtggtgacggtttcaatttctatgtttctagaagtttcttcttagctaattatggactgtgatctttgctctgtttctgcttttgcgtattttcctaattaagcaccattaataataagaaagttttaaggaattgtggcgtttttgtaatactgctattaaagatttttggcgttttgtccaatagaccataaatggatattttctataattagaaaagcattatatccatagggtaatgagatccaaattgttttatatatcgatgcaatacggctggggcctttaggcccaacaaaaattgagcttatgcaagacctaacgtattcacatacctgtaaagttgttatgggcttcattcgtaatctagaaatgtcttaagagtgttgttgttacaagttttctttttggatcttataagggtcaggactaatttattaaaagtagtcgtcgactatgtacaacaaaattcatagttaatcaaatttgactataaaaagtttagtaacatgttgataaattaattaattagcaacgttccgcgtaatgctgcagctagtaagatacgcaggcatgtgctgattttgaatgataaatatgacaatattaaaaaatagagagaggcaaaccaaagaccaaacgtgtcaaagtttatatgatccctcgattttttattattattctcgtttgaatcgttaagagtacagtatagtagttatataatttaaaagtgaaataattaggtgagaaatggttactatggttaccaaatgaaatcaactacacaagtagtctgcgatggtgtgtgatagaaaaattccaaaaataaaattgagcagccgacggcgatatagtgaatgaaagcaaagtgtttctaattgagtaatttctatcgaactaattgactaaaccaaaacgcgtaccggacccggttaagcatcggcaagacccacgaattttcctgagctgtcgtcttgccagaggcaaaaagacagagagaggagagacgagagctcgtcgaaccagatctctttctctttcttctctctaattttgatttttttgaattttcttctgcaaagcaaaatcgcagaagtcgtcgtgtgtccgcgttgcatcgaaccacttgttcgattctctttcgtcatcctctcttatatcatcagcaacaacaacccttgtttcaaatttcttcatttccgccggatttataatcgcagattgattctgatcgatagagatagggttattcaaggagagacctcgattgacttcaattgtcttcctgattcgatagataagatttagggttagcttgacgttgacgttgatataggggaatg

SEQ ID NO: 13180 - DNA, 3000 bp, Unknown
  misc_feature (1)..( 3000): cDNA_ID_3439595_gDNA_ID_2214603_Annot_ID_187140 3000 nt of promoter + ATG
ttattgttgttaaagattagtatgaacaggacatgtctttaaaattctgttctgatcgggtttgtgagagatatgagtgattggtggttaggacatgagaacaaggaagcttatctcagtagcctaccataaaaaagacactcacttcaccttgttccactcattgtatatataataattacatgttgtgcctaatgtatgtcgatttcagggattcataccattgttcttttttttttggtgagtataccattgttctttttgtacaaagacaacaatatatgtaaatccttttttaaaatttgatttgattcattttaattaagactcaaaatataatgtgcaattgattaaagagaatataatacattatgtttttaaaatatagacaagatgtttttgacccaaaaaatagaagaaaaatcttaacaaatatagcatattttggtatttttatttttatccttaccaaaaaaaaattagtttggtatttttatgatatataaaaagaaatcctaattaaaaaatggtaattcaagaaatatttattccaacaaaaaaaaaacagataaatactttcttatagggcctaaaacggtttttgtgacccggcccatttaatgtgagtcacaaatggagttatcttatagtttacctgtaaaaaaaaaacttttgtcgtcacttaaccgagaaagcaaaagagaagaagaagaaggaatcgaaaaatgaagactccgatccacgcggtttcgacatgggtgaggaggcagcctccaaaggtgaaagctttccttgccgtcgtatctggcatggcggctcttgttctcctcaaactcatcgttcacgatcacgacaatctcttcgttgccgccgaagctgttcattctattggaatctctgttcttatctataaactcatgaaggagaagacttgtgctggtataacctcatttcctgctttgacttcgttatctgtagggttcttagctttaactagagaatttcgatctgtgttgagatataaaaatgtaaactttattcaacttttgagtacccaaatctcccaaaggagttgatttagttgaatcagcattcttcttacagattaaaagtctatttacataccttttttggggggtatttgcaggattgtcattgaaatctcaggagcttacggcgatatttctagctgtgaggctttattgcagttttgtaatggaatatgatatacataccattctggacttggctactttgggaacaactctctgggttatatatatgatccgttttaacctcaaaactacttacatggaggaaaaagacaacttcgctctctattatgtggtaagtgagtcattctcggttttgatctttttacttagattctgttcatgctaggcatgttggttatataagcagcttaaagtcttttgtttttagttaagcgtaccctttaaggtcagatgaagatggtgcttattaatgttattcatttgaagcttagttataagttataaccagtgttcctttgtatttgccatcagtatcaaatttattttatctgcatattacatgccttttagaacatggtggcatctaactactggtgcaatagtttaaggattcatgaatattaagttttagttcttttggttttttgcagctggcgccctgtgttgtgctagctgtatggattcatccatcaacgtcacacaatatattgaatagaatatcctggggattctgtgtttacctcgaagctgtttcagtactgccacagttgagagtgatgcagaacacaaaggtatgtgttttctaaggttgttgctttcggaaacttgagtactgaaaaacaagtgtaatccctgatatttttggtgtgttcagattgtcgaacccttcacggctcattatgtttttgcacttggagtagcaagattttttagctgtgcacactgggttttacaggtaggttcttatcttcaacagagagttgtgattacatggttaagttgttctttccatctcttgcataaaccaatggctttacaaatatgtctaacatcctatgcttatggcactggagcaaatggtcaactccacaatatccccattagatatgatattttcgcaagtttgtttgtgtgatttttccaaactgaacgcataaatttggtttggtcttctgtgttgaaacagatgatggacacgcacggacgactgcttgtagtgctgggttatggactatggccatcgatggttataatctcagaaatagtccaaacattcatattggcagatttctgttactactacgttaaaaggtacttttactttcttcccccacacaagctcttcggtcttttcgcttcacctctttgatctatctttcttgtgcagtgttttcggtggccagcttgttctaaggcttccatctggggttgtgtaagttataaaggaaaaaagataagacacattatgacgaaatttgttacacgaagatagatctcagcttggtgtaatctgagtagcctctggttactctcaagttactccctcaggccaagtcctaattctattaactgtgttgtatatttttgtgtgggtcatcatcatagacagtcccttggatattattgacatgattttttccactgcatttgtgctaaattatccttggttcccacggtaaagttgctgcaaatttcaccaagcagagtaaaatattacacttcccacacaagttcataaagacattgtaatcgggcaatcgttgcaagccgcataatttgcaaagaacctgtaactacaaagaccacaaagaatttggtttgctgctagtcttaagattttacccgaaacactactgttcactgattgggctaaatttatgtctgtatacgtaaataggccggttaattacgaataggcccaatgcttatataatctgaaccgttctcttattttttttgttatcgacactattacaccaaagag

SEQ ID NO: 13181 - DNA, 3000 bp, Unknown
  misc_feature (1)..( 3000): cDNA_ID_3028473_gDNA_ID_2214603_Annot_ID_187139 3000 nt of promoter + ATG
atttttatgataaacatagaaaattctaaaaaaaggaaaaaacccgaaaaatacctcatttattttttatttggacgtttaatatctaattttttttggttggaagaaaaatacttcagttaattatattcggtcaaaaaataccttatttttaaattattggtagattcaaacctctgttttaacggtcgttaacggacgttacggtatctataaacaacgttaaattataacaagaaaaatagacgaaaaatactcaatctatttacttttggacttttaatacctcatttttttgttggaagaaaaatactccatttaaatatttttatctcgtgagttagtaacttttaaaatcgtactttatataataagatgtaaaatttctaacacgttatttcgaccaaatggttttatatcgactattatcaagccaaattctactattcaaaatatgtatatccaacgacatatttatatcggattaactattaataccatagtaaattcataggttttttactttgagttttttgcttagaaaataaaaaaataatgacataaatacataatgtatattagatatagtatagaaaccataaaaatgaactcagtttcttatgtataaagatcactatttcgtgtttattcttttatttgatccagttcttccatagaatatccaaattccaaaggattacaatatttcatttttcttagagatgtttttggaaatttgaaatgtaaaagatgagtgtattatacagataataaagctaacgtggatacagagaattggtcatttctaattaaatatgaagtgttatacgattgaaggtggaacgtcattatcaaatttccttattttcctttgcttcaactgtatcattaatcacatcttccataaaattcaacgatatggcgtaaaaggatttgaccttttaccctaagaaccttaactctaatctgcctaatctcaaaatgacataatttactctcttaattcacagcttctttcctaattacataattataaaaaatcgcagtaaactttactaattggttccgtagattttaattttcattattttggattccattattatgtatagtaaaatggaaatttaacttgttggaatacaagagaaagttttgccgtatgattgaagatagagcaagatcgatcatacaaatataacaaatcaaggttaaggttaaaattgaatattgtaaccaatcacgttcgtcagatccaccaaaatcggtgcttcacgtcacacatatttgcttcacgtaaacatcaagaatacctaaaaatatacgaaatcatttatttacataaacgcaaacccaacaacactaaccacgagatcagaactagtagtagcaaacgcatctccagcgaccgcagggacagtagtacgtatatctctttacctgaggagacagcaacttcgaattgaacgacggaggaaagggctaaaaggacgagagccaccgtgatcatgactattaccggcaacggagacgtcgatactctacaccgtgcgcagaagcaaccgtggtaatgcatcgctgatcgccttctcactgttttctttggtttgtttaatggtttctattactcggaagataatgaaacaaagaaagataaagagagtgataatggtttgttaggactataaatgatattattatgatcgatgatgataccactatttcgagaaaaatcataagtactagctagtggggtaacgaaggaaaatatgtggtaatttacttatgtatttcgtcaattagtgggtccataatttgtctaattttgactgaaatatttgtattaacactcaactaattaaacattggtttcttcatgtttattttgcgtttatgggtttgaatggtaacttttaatcaaaacgatagttctgtacaactttgatagctactgatcacaaaactttatcaaaagcgttattataagttttactttcagttttttttttacaactttctcgtacaactctatcttacagttttacattattccgaaaaaacttataactaaatttattgtactgttttgtattaccaatgagacctatatcatattcgctcatacaatttgtttttaggtgttgatttctttgctaagcactcgccactttcctatagtacacatttcaatcccacaaaaacaagtaaaatttgtagaaatgatactttaacaaatgaatgtaactattaaagatcgatttcttttctattcaccttattattgttgttaaagattagtatgaacaggacatgtctttaaaattctgttctgatcgggtttgtgagagatatgagtgattggtggttaggacatgagaacaaggaagcttatctcagtagcctaccataaaaaagacactcacttcaccttgttccactcattgtatatataataattacatgttgtgcctaatgtatgtcgatttcagggattcataccattgttcttttttttttggtgagtataccattgttctttttgtacaaagacaacaatatatgtaaatccttttttaaaatttgatttgattcattttaattaagactcaaaatataatgtgcaattgattaaagagaatataatacattatgtttttaaaatatagacaagatgtttttgacccaaaaaatagaagaaaaatcttaacaaatatagcatattttggtatttttatttttatccttaccaaaaaaaaattagtttggtatttttatgatatataaaaagaaatcctaattaaaaaatggtaattcaagaaatatttattccaacaaaaaaaaaacagataaatactttcttatagggcctaaaacggtttttgtgacccggcccatttaatgtgagtcacaaatggagttatcttatagtttacctgtaaaaaaaaaacttttgtcgtcacttaaccgagaaagcaaaagagaagaagaagaaggaatcgaaaa

SEQ ID NO: 13182 - DNA, 3000 bp, Unknown
  misc_feature (1)..( 3000): cDNA_ID_2991533_gDNA_ID_2214603_Annot_ID_187136 3000 nt of promoter + ATG
tacggaaccaattagtaaagtttactgcgattttttataattatgtaattaggaaagaagctgtgaattaagagagtaaattatgtcattttgagattaggcagattagagttaaggttcttagggtaaaaggtcaaatccttttacgccatatcgttgaattttatggaagatgtgattaatgatacagttgaagcaaaggaaaataaggaaatttgataatgacgttccaccttcaatcgtataacacttcatatttaattagaaatgaccaattctctgtatccacgttagctttattatctgtataatacactcatcttttacatttcaaatttccaaaaacatctctaagaaaaatgaaatattgtaatcctttggaatttggatattctatggaagaactggatcaaataaaagaataaacacgaaatagtgatctttatacataagaaactgagttcatttttatggtttctatactatatctaatatacattatgtatttatgtcattatttttttattttctaagcaaaaaactcaaagtaaaaaacctatgaatttactatggtattaatagttaatccgatataaatatgtcgttggatatacatattttgaatagtagaatttggcttgataatagtcgatataaaaccatttggtcgaaataacgtgttagaaattttacatcttattatataaagtacgattttaaaagttactaactcacgagataaaaatatttaaatggagtatttttcttccaacaaaaaaatgaggtattaaaagtccaaaagtaaatagattgagtatttttcgtctatttttcttgttataatttaacgttgtttatagataccgtaacgtccgttaacgaccgttaaaacagaggtttgaatctaccaataatttaaaaataaggtattttttgaccgaatataattaactgaagtatttttcttccaaccaaaaaaaattagatattaaacgtccaaataaaaaataaatgaggtatttttcgggttttttcctttttttagaattttctatgtttatcataaaaataccaaactatgctatatttgttaaaggtttttcttcttctttttttgggtcaaaaacatcttgtctatctttttaatcaaatgcacattatattttgagtctttattaaactgaatcaaatcaaattaaaaaaaaggattaatattgttgtctttgtacaaaaaaaaacaatggtatgaatccttggaaatgagtggaacaaagagaagtgagagtctttttcatggtaggccattaagataagcttccttgttctcatgtcctaaccaccaatcactcatatctctcacacacaaagccgacccgaattttaaagatctgtcctgtttttggatagagttcaagctaatcttttttttttttgcaattaacaacaataaggtgaataagaaagaaatcatttgttaaagtatcatttctacaaatttcacttgtcttttggttgaattgagaactccatgtgtattgtgtgtatgagacgatagctagcgaaagctaagcaaaggaagactaagaaaatacttaattaacaaagtgaagatgatataaacgcaaaataacattagaaatcgcttgagcactctaaggaaaggagaggtcgagaaatatgcgggtgggatcgatccaaatgtaatttgcatcgagacaacatcaaggatagaagatctttgtaatttgtcctaagaaaaacgcaaaataaatatgatgaaaccaaatacttaatcagcttagtatcaatacgaatatcccttgaaattagagaaactatggtctgactaatccacaaaacacatatgtaaattaccacataaattccttcgttaccccactagctagtacttatgtttttttctaaaaacagtgagtggtatcatcatcgaccataataatatcatttatagtgtacctaacaaaccattatctctcgctttatctttctttgtttcactatcttccgaggaataaaaagctagcatttgacaaatcaataagtaaaccattaaacaaaccaaagaaaacagtgagagggcgatgcattaccacggctgctgctgcggacggtgtagagtatcgacgtctccgttgccggtaatagtcatgatcacggtggccctcgtcctcttagccctttcctccgtcgttaaattcgaagttgctgtctcctcaggcgaagatgtgctgagttggctcctcctagccgcggttccattggctctgctcttcgccgtgagatgtctctcttgtcttgaaacgtcaaagcgatctacttactactgtccctgcggtcgctggagatgcgtttgctactactagttctgatctcgtggttagtgttgttgggtttgcgtttatgtaaataaatgatttcgtatatttttaggtattcttgatgtttacgtgaagcaaatatgtgtgacgtgaagcaccgatttaggtggatttgacgaacgtgattggttacaatattcaattttaaccttaaccttgatttattatatttgtatgatcgattatgctctatcttcaatcatacggcaaaactctcctgtgttccaaaaagttaaatttccattttactatacaaaataatggaatctaaaataatgaatatcaaaatctacggaaccgaatagtaaatgtttattgcgatattttataattatgtaattaggaaaggaaagaagctgtgaattaacagagtaaattatgtcaatttgagattaggcagattagagttaaggtgcttagggtaaaaggtcaaatccttttacgtcatcgttgaattttatggaagatgtggttaatgataacagttgaagcaaaggaaaataaggaaatttgataatgacgctccacctacaatcgtctaggtgtagcccattggccattacgaaagagagaagcaactaataatatttaattagaaatg

SEQ ID NO: 13183 - DNA, 3000 bp, Unknown
  misc_feature (1)..( 3000): cDNA_ID_3028480_gDNA_ID_2214603_Annot_ID_187135 3000 nt of promoter + ATG
agttgaagcaaaggaaaataaggaaatttgataatgacgctccacctacaatcgtctaggtgtagcccattggccattacgaaagagagaagcaactaataatatttaattagaaatgaccaattctctgtatccacgttagctttattatctgtatatacactcatcttttacatttcaaatttccaaaaacataactctgaaggaaaatgaaattatgtaactatttggaatttggatattttatggatgaactggatcaagtaaaagaataaacacgaaatagtaatctttgtacataagaaactgagttcatgtttatggtttctatactatatctaatatacattatggcactatattttattttctaagcaaagaactcgaagttaataacctactaatttgctatggtattaatgattaatccgagttggatatacgtatttttaatagaatttggcttagtcgatataaaactatttggtcgaaataacgtgttagaaattctacactttctataaaaagaaatttaaagtacatactgcttaagaaaatagaccaaactactaatctttaaattacagatggtattggtaatgaatttgaacaaaaacattaatataatctttcatctgtcggtcaaacatataatattataacctaaagtcggtttctataagtttccctcagcacataaaagaaccaagaagaccttctctcatcatcattattataggaagttaggaactatggcttatgaagagagaagatcatcgatcctggattcattctcgctatcgccactaccatacccagttcttttgatcctagccgttgcttcagtgttcttgttgagttcatggtacttcagcttggaagaagcagccgaatcagcggaagagcagataaattttgcgcttctcttgattcctctgtttcttatagtcttggtccggtggttatcttccatggagaaccctgatgcgcttctcgggatgttttcaagcagtcgtcggacaacttacgtgagtcccggagccggaggtgacggtggaagctcgccgtggggagtggcggcgttgatagttttgttgcttgtattgcttcagtatcaatcaagtttcttggagatgtggtctggttaatgatattgataggtttttttgattttcacgtgttttgttttgtcgtctagtagcacgatgatgtaaaaatttggtcattacttacgaattacgaggtttaaaatctcgtgacggtactacatgttatccaatatcggcttgtctcttggttacacgttgcccaatactttgataattcatactttgagcaagaagtatggcgttgatatttttcaaaaactgcattttcaagaatgcatttacgataaagtttttaaaagaccctatgaattgaattgtattgaatacatcctcaatcaatgcatgatattcatatagttgtcacctccattttacgaatcgtgattaatcgtcatacacaaatgatccaccaaaccgcatgtgatggcactatatggctcaagagcgtagcctcacaacagttttagttcgtgtttataaccttttagttcaaatgtttatatgttgaagaggaaaaaccatttgtgattttgagagagattcatcaggtgataaatttgagttctatatatgtctttggatttcgtattatgatattttgacaacttttgttttctaaacttttatgttcaaatttgtcttcagatatttgttttagacatttgtttaaataattatgcttaaacagtgtgctcaattctttttgtacctttttaaaaacatgttttattatgattaacggacatggttgttaatagacataatcactatttgttcacaatcgaaatggtcaatattggtctagtccattttgatagttttaggtttgattggtagcttcttatcaaaacagtaaaatatataccgtttaaaagatccaatgaaacttgatcggtggtgaaatcaatgtttggacaaaaaggagaaaataatggatcattctcacccaaactatggtggttaccagagagccactttgcgtgagctttcaaaacaaattttttctcgatatttaaacttttaactttaaacatatatatatatatatatatatatatattaataaatgaataacaaagatctctacaagagtaagagtagtattacaattaaccattagaagctattcttgttgcttgacaattggaatgaaatatttggaaccaaactgtaagataaaatgtctttaagatggaaagttcacagaaaagtggccatacggttcatgttgaaagctgaccgcaaagtgatcacttcatgtggaaagttggaggaagtgggctgcgacgttgttacacttgaaccctataggggaaagagtggactggtataaggctatttggtttaaaggaaggattctcaagcatgcttttattgcttgggttaataagagacacatgctccatactaaagacaggctgaacagctggatacttagtgttccatccctatgccttctccggcaagtatagtgactaattgttgaccacagaaaaatttatacctacaaattaggcccttaggaatacttttaccaaattattatatgttcaatcttagaaattagtagtactaattagttaaacgtctcgacggaaacagtgttaatgaaatgattattcatcgaccattttgggcacctgatcttaggattggactacagcgcgtggcaacgagacgtgacataggcgcgtgagaacgaggcttgatgataccatctgtgagtgcgagaaagacaaaattaccctcgagagtaagagagagagcacaaccaccaaccctctcatcgcctctatctcctctgctaccttaagctgagagagtcacagtctcgtctctatctctcctctttgcctttttccactcactacacgccaaacccgacgacatg

SEQ ID NO: 13184 - DNA, 3000 bp, Unknown
  misc_feature (1)..( 3000): cDNA_ID_2702206_gDNA_ID_2214603_Annot_ID_187132 3000 nt of promoter + ATG
aatgaattatgggttgtcccctaaaaagtatggaacaaatgataacctttaggacgattagacacaccatctacaaaatcatgctatttaataatgtatccatttgtctgttttaattagttaatcatatattcatatagatcttattacttagttttataaatgcgatcaatgtatacaaacagtcgaaagaccctgttccttaattctaagtaacccctatctatagtcattagttttgttgaaaagctagggatcgtcgggaaacattacaaaatataaaggtttgattacatagtttactttagtagctagctagaaataaatcggatcgatatgaaataatagatatgtttctcggatttgatcacacaatttaaaaactgatgatcatttagatttcgaatggttacaacataacgtatataatgtcgaatatatacaattcacatttgtctatatatgggttaatggttatatgtaaagtagttgagagaagaataacagattgtgtttgagctggcttttctgttaacaggaagtcaggaattgtggctgagggaccttgccagcttcaaaagtgtaatgacataaattagtatctctcttctaccttctaaccaataaccatatattataaatttatcacaaatttcctctctaaccaaattcaacaagacaacaacatacgtatatatacttttacaactatatttcggcataattgttgtaataaccttcgttacttagggcttgattggttctccctctgccacccgcaaacgctgcgtttgcgggtgatagcggttattagcggttgacaccaatcatagaaaccgctagataccgctttggaccgctcgaaatcgccagatttcaaaagctccttcccacaagcgtttgcggttgcgggcggtagcggttaggttaaaaaaaaaaaattaattaattaaaataattatgtcttccacccaaaccttatacttattcttatcagaaaaccctaatcaatgaaaccctattctctcaattatggcatccacccaaactaacaaaaatcaaagtcaaaatcaagaatcaaacgtaagtatgatctatcctttcatccattcattagctagtgtaattctcggaatatttcatggcatcgttgtttttttttattttgtttttttttgagttttttgattgaatacatgttttgatttgttttctcgattagaaaatcatttggtcaaacgagaccacatttgcgttacttcaacgggttattgtggagaaataaacggaagaatccaaagaccccaaaatcagatttctaagtgatgttcaaaaagaaaatattcttaagaatattaacgtttggaaaaaatttgagttggagatgtgttaaaaatcgtttggatatcttgaagaaactttatcatatgtatagaggcaatccggaaaacccgcgagttcaacgttatttacagtttatcacactacttgatgcaatttttggtgatgtaccaaatgcataaagtattaaactttttcttacaaaatttatttatttttgaatttttagttttatttatggttttaattattaagtatgtttaatttttcaaatattatcaatttatcataataatatattgtatttttttttcttttaatagtaatatattatatttattttggttattttttatttaattactatcgcatccgctggtttaccagtcataaaactcccgcaaacgcacccataaccaaacgctcaaccagtcgttcaaaacacttgataacgcttgaaaccgcaaccgcccgtttccgcaaactcccgcaaccgcaaccgcacccgctgcgtttaaaccagtcaggcccttagatcatgcgacttgcatgcatgccaacgccgtacttttagccatagtggtaaaaaacatgacttgttaattcaagccttttagatgtggacgtattaccaactacgttattcttatttcctattactatatatagaacttgtgataaggtatatactttacaattttgtgtcctctattaatgttgtcgaagttgttcaccgacttttcctaaaaatacacacatactagagttaccatcacacataatgtacgtgactactataaaactcgacacgaatatagttttttttttctttttttttgtgtgtgtgtcaaattatggacgtaaaaaaaaacaaattatggacgtatagctagtgattagtgactaggacttcatagtatcctcgggtgaagatcgttgtctcttttatgacacattgacaccaaatactcaaaccaagtcaatactttgtctatgttaaacggtataaaattgttaattgtctttaagaatttccacatatttaggtgatgatgatcaacgtgaactctccctatctgtttctttggcgcaaataaactaaagtttatcctctaaatgctctcatgtgagacgaattaatatggggtcggtggtgcgtagacatacgatttcaattattcatctgcatacgtttctatttatgattttttgtattaacgtgtttattccggatcaatgtattccaagttaaactgaaaaagcaattgactttaaaatttaacatgttttagttacttaaagaaaactgatgcaattgatatccgaaacaaattggaaacataaaatcctaaatctaaaattttcagtttgtttttaaggttaacaatgtttgaaactcgaattcaaactaaagaccaaatcaatgtaattgtatcaatatattcagtttatttaggttctcatcttcgtggcaatggtaccaccaagtatttgaatagtaacttttacaaacaaacacactaaattaattaattcatgaattgataaaataatagccctaacgaacctataaatatacacgtgaggcgatctcatcagtagaatcatatcttctttctcctctactagttacatatcttcaacaaagtgaatctcatg

SEQ ID NO: 13185 - DNA, 3000 bp, Unknown; identical to SEQ ID NO: 13179
  misc_feature (1)..( 3000): cDNA_ID_3028491_gDNA_ID_2214603_Annot_ID_187130 3000 nt of promoter + ATG

SEQ ID NO: 13186 - DNA, 3000 bp, Unknown; identical to SEQ ID NO: 13176
  misc_feature (1)..( 3000): cDNA_ID_3028499_gDNA_ID_2214603_Annot_ID_187127 3000 nt of promoter + ATG

SEQ ID NO: 13187 - DNA, 3000 bp, Unknown
  misc_feature (1)..( 3000): cDNA_ID_3028507_gDNA_ID_2214603_Annot_ID_187122 3000 nt of promoter + ATG
aaccggctccttgacgaaccggctccctgacaaaccagctccctgacgaaccgcctcctgacgaaccagctccctgacgaaccgcctcctgacgaaccagctccctgacgaaccagctccctgacgaaccagcttcctaacgaaccgactccttgacgaaccgcctcctgacaaaccaagcttgtgacaatctacaccgaataaatggtctagccgaaccaagctctccatgccatgttaatctcttcgaaagactccctcaccattacgtgacaagtcaagactccctcgtcgtgatgagccaacattctcaccattactagccaacgtcttttcctctagctaaaccatcccgcacaacaaagtcgtctcgcaaagtataatcatcaagtaaaacatagccatcccgccaagtagagccatatctccaaacgaagtcgtatcgccaaaccctttactgcaagcggatccatcgctaaacaacttagctcctcgtctaactgtcgacgtcatcacttaactgcttggctccaaagcgcatagttccaaactacaagctttcacctatgtaacatgaactacgaacggcttgatcccttcaaagggtacgtaggcagcctctaccgaggcgcatctataaaataaataaacttttgtctgtcaaaagcacgaccgagttctcgagtattcaaaggaagaaattgtttaccctaaaaccctttaattacttattgttacaacctcagtacaaacactatcctggaagaggtgctaaacactttcacgtgcattttctcatggattggaggctcctccagcataaaggagaactcctcattccactttgggtctttgttcttctttacatgctttgtttttctctcctcccctttgaagtagatgtgcacgtaaggattggtatggtgctttccttcaacatcctcagccgaatgcactattaccacaaacattcctccagcagccggtgtgccttctggagctttctgaaccgcttgcatttcttccttcgtgaatgacttatacaagagttcaacttccagcttccccctacaagctgccgttcttgaccaccgtccaaagtcttacgtagttccaaagtgaatgctttatgttcgtcaagcaccatttctttcagatagagtttcgtatgtccgagaattttgaagtaaacaaacctaaccatgttatcacctagattgagatctataccttatttattgaatcatgacatcaggagaaacccccgatgacctaacgcttctcttatagtttatttaaaacttaaatcaataactcaattaaattatatgcaataaaataatatattcgatagacttataaaatctctaaatgagttaccgactgtcacgtcatcgatacacggaagagttatgttgtaggagatttttcagattgtggtttgacctatgctatatttatttgacatggaggtttatcttgcaaaaacaaaattacattgaaggtttttttgcacaaattcttatgttttctaatagagttatcgagtgccacgtcatcgatacacgtaaggattgtattgcaggtgattttagagatggtgaagttgacttgcataattctggaaaatagtcatatcacattcgcttctcttcccactggaggaaatgatctcaaacgcatccgcttcaggtattttaactactcaaaacaatctctatatcttcatgacattcaaagctggaacatgagataaaaactaaccattacttgtgtcttgttttgaaagccgagagatgtacaataagtggcaagctcaacggcggtggggtgagaactatgacaagatcgttgagctttacaatgtacagagatttaaccgccaagctctccaaacgcctgcaagatccgacgatcaggtaaaagacatatatcctagatcctttggtctttcttcagacaagaaccttgtgaatcttgtcctttgatccaaagaaggtaacacaagtttatttttcagtcacagagagattcaacatactcaaagatggattcagcaagagaaagcaaagactggactccaagacacaacttcagacctccaggatctgtcccgcatcacttttatggcggctctagcaactatggaccaggaagttatcatggaggaccaccgatggatgcagcaagaaccacaacttcttccagagatgatccaccttccatgagcaatgctagtgaaatgcaagctgagtggattgaagaggactagcccggtgtttacattactatcagacaattatcagatgtacgtcgagtcagattcaggtataacaaaacatcttaaactaagcattggctaatcatatacattttgaaagttgataatcataccgtgactaacaggaatctatgattttgtggtttaatcaacagccgggaacagtttggggaagtgcatgttaagacatggtgggagcagaacagagagagaatacaaacacagtacctctaaaaagaaacattatgagcttctctaccacaatctttaattaattaattaatctcattcacataacaacacaactatatacattttgcttatcttttgttcatcttaattagcttaacatcttatacataaatcaagtgttctgaagtatcatctctaatcaaagctgattacatataagtataattatcgttaaatgctctacacgttttcaagtaatgtaaaccatgtcttgtttttgtgacacaaagataaagaagtcaactatgaacctaactattctttaattctagctagatctttctcctctttgggggtttaaaaatatcaaatgttagttcttttatgatcaacatgtggtatagaatataaaaagtcaactttattatttgcttataaggaatacaaagtagagttgaccatttgaggttttagatgagcaaaccataaacatgtttggagaaagagtcatcatagttccatcaatg

SEQ ID NO: 13188 - DNA, 3000 bp, Unknown; identical to SEQ ID NO: 13174
  misc_feature (1)..( 3000): cDNA_ID_3028511_gDNA_ID_2214603_Annot_ID_187121 3000 nt of promoter + ATG

SEQ ID NO: 13189 - DNA, 3000 bp, Unknown; identical to SEQ ID NO: 13173
  misc_feature (1)..( 3000): cDNA_ID_2710549_gDNA_ID_2214603_Annot_ID_187118 3000 nt of promoter + ATG

SEQ ID NO: 13190 - DNA, 1462 bp, Unknown; identical to SEQ ID NO: 13172
  misc_feature (1)..( 1462): cDNA_ID_1837267_gDNA_ID_2214603_Annot_ID_187117 3000 nt of promoter + ATG

SEQ ID NO: 13191 - DNA, 3000 bp, Unknown; identical to SEQ ID NO: 13184
  misc_feature (1)..( 3000): cDNA_ID_2702206_gDNA_ID_2214603_Annot_ID_135609 3000 nt of promoter + ATG

SEQ ID NO: 13192 - DNA, 3000 bp, Unknown; identical to SEQ ID NO: 13183
  misc_feature (1)..( 3000): cDNA_ID_2713210_gDNA_ID_2214603_Annot_ID_135612 3000 nt of promoter + ATG

SEQ ID NO: 13193 - DNA, 3000 bp, Unknown; identical to SEQ ID NO: 13181
  misc_feature (1)..( 3000): cDNA_ID_2713206_gDNA_ID_2214603_Annot_ID_135614 3000 nt of promoter + ATG

SEQ ID NO: 13194 - DNA, 3000 bp, Unknown
  misc_feature (1)..( 3000): cDNA_ID_2713236_gDNA_ID_2214604_Annot_ID_135621 3000 nt of promoter + ATG
aaacattgtcatttttctagtattctcacagctttcccttatctttccgagcatcatcatccatccgtccaacgtcgttgaatgtttgaccggtcatttgatccgacgccttcagtgaagtcgccaccttacccggctttgaatcctcgaccttgacttcaaccacagtcctacccgtccctccatgctcacgtgccgcgcgtgtttcctccacaatgtctgatggcattgtcagtttgctctttattgcttccgttacattccctaatgcaccaaaaatagtccctttcgcttcatttcccctgcatgatttaatcacatcaaaaaacaaaacaaagagtttcacagtcacctttaaacttgaagaacatgacaagatataactggcatttcatcatttacctcacggcagcagaatctttggtctcttcggctttttgagctcccgactcagtactctccctagtcttttgagatgcctcttgggcttttgctccagcttcttctttgagctctttaccttccaatctcatttcctccatcttttgtcttgttacttctccagctttctccatgttttcctatgttatcaaaacatcacattatatcaaaccatttgacatatgtaatcttcatttacatggaaacaaagttccaagaaattataccttggcagtatctttggtctccacagcttttcctttggcctcctctgtcttccccgacaagaaacccatagctctcttcgctgtctcaacggcactatccttcagctctcctagcttactcaccgtaacatctttcccctccgtcgccttctccaccgtatagtccttatactctccagtcttctcagctgtcttatcctttgcttcaatagccttctccgctgtgtaatccctagcttccacggccttgtccaccgtgtaatccttatactcaccaaccttctcagccgtcttgtccttagcctctttagccttatccgccgtataattcgcagtctccttcgccttctccgctgtcttatctttagcttctactgccttatccaccgcatagtctttgtactcaccaatcttctccgccgtcttatcctttgcttccaccgccttatccgcagtataattagcagtctccttcgccttctctgcagttgtgtccttagcctctttagctttatcaaccgtatagtctttatactcacccaccttctccgcagtataatcagcggtttccttagctttctcgacggttgcgtcctttgctccaaccgctttctctgaagctatctgagctccttctttggtagactcagccgcttcgtgggtttttccaactacagcgtctctcgcatgctcatacgttccttggacagccctgaacactgatcctatcacaccgggcctatcttgctccggtggatgttcagttgttctctccgtcaccttatacattgtgacatcagcaccaccggatttgttaatgtcatgcaagtcctcagccgctagcctcgccgcaacctcggctctctccgccttttgtttgtctgacgccattgcttttttctcgattgcttgaaaattgatgaaaaaccgctttagaactttacgattttagaattctttaacttgtgctatcagttgagctgcttttgttacttcttatagtaatgctctgtttctgttgagacgctacgtggtagatagagggacgcaacagctgccacgtacaatttacttagctttatcttctacggacgtggtatgacacgtggacttttcatgcatggatcatgattcttgagtgttcatggcatgacttaagagctaagacataagcaagcaagcatcgatggtcggtcgtatcaaatcttttgatatcataatttgtgttggtcgaggaaaatgttaggtgaagatcacattcgccatttcaaacttactgaggcacataacttggaaacaagcaatttagagatatgaaagattacttagttattgccacacagtttattggaagttattgcctcaacatcaaaaacttggaaacaagcattttagaaaaataaggacgcaagttaatcattggatagagccgtttattgatcaagtcggttatcaatataattttgagtttttgacggttcttgggagggtatacaaaaaagttcattgcaatagtttggatttatttccaaattttctctaatttgccagctaattcaggttagcacatgagtctattgtcttaaccgaatagacaactctcttttttgttaaacatctctattagtcaccttaactttttttttttatcaaaaataaataaatcacgttaatcatgttctcacatagattacttttatacttaattaggtacgtcctttttttattatttctccgacaactttgttgacgcgcatttgatgccgaatcatccaaatcggtcacgttttctacatgatttgtcgtaaatatgatatacactaacgtgagtaccttaagatctcaagtatatagttaagatcagatcaaatcagaaacacttagtttgagtttcgatttgatcaaccatataacaatatatggaacttctagctagcatcatggctttcataatgtgtaggtacgtgtgagtatgagtacacacgtacgtatgtcgtgtaagtggagaatccgatgcccaaacgagtaagcaagcaaaagcaatggtcaaaaagcaaccgatctcaattaattatcttattgtaaaaactcaataaaaagttaagggaaaagaataatcttacaagacatgtatcctccacaacaaaaagaggactgtataaaactatttttttcatgagaccaatgattcgtataaaccatttaaatttgatcaaaccctcacaagattgatcaatcaattctcgagtctctgtttcggtcacataaccgaaaggaaacttttttagtcagaaagaaagatttttggagttgaaagcaacataagagatta

SEQ ID NO: 13195 - DNA, 3000 bp, Unknown
  misc_feature (1)..( 3000): cDNA_ID_2702291_gDNA_ID_2214604_Annot_ID_135624 3000 nt of promoter + ATG
atgttatgtgctgttggccagaaagaaaaaacgatatgtcatgtgcagttttatctgtgcattatgggaacttgtcttaggttagaaaagaaaaaaccaaatcaaaaaaccaaaataacacattctaaatttatgttatcatcacgagcattcaaacaaaaacgatttagtaaaatgtttggtagttgtcaaattgctaggtggcaataaatttgattatacaaaaattattaagcgaataatatatagatggtgattgtcaacagatcatttgattattactaaatcactgtttaaccaaacatggatatctgttgtaaattttaccagtatctgaacattaattgttatatcattacgttccatcattttctaatttctatcatattttagtgtccctagtatcatagctcatatcccgaaacattcattgatagtgttcgaatgtggaattatgtatgttaagcaagacttagtcatcattaaattacgcggtgtttctacccaatcaaataaaactacgcggtgttaatgtttccaatcttaaagctgaccggcatggccgtgtttgtatctagaatccaaaaacgacgccgtgtatctctagaagtcaaagaattgaccgttaaaagccgacaaggtctcctgattcaatgggggcttttaaaggtctggccatgtccgtaaacggaaacagtactttcagatgtacttctggtcaacgatcaattaaaaccagatcaactaatcattcatttctttttcaaattcgcatttgcatttaatgtgagacatcacataatataacaaatgcatgcatgatctttgaattattgctcaattctaaccagtaaccactagttttttttatatttgatgattattgtccaacatttctatatatttatatttgtttacaacgtttgaaaaaatcatactatttttttttgttctcactactttttccacagttaggaataagagaagtgaaaaaacgacacccccagcacaaaaatctccgagcacagttgttacatatggtgtcaagacaagagatctaaagtctaaactaatcgaaaggaataagttaaacgattcacaatgtgttttccgcataaatagtattaagtattaacatagtttcattttctgttttctgtcccatgtaaaaaagtaccgcaaatcatttcaacaaaaacacacattttttttggaagaatggaagaaataatgggtagatcaccgtagatgtacatgtttaaagaacgtgaaaattgggctcacataaatagactaaacttttgtaattaaaacggacaagctacgctggcttgagctttatttgattttgatttttaaagaagtcaatcaagtcgagctaaaacaaaaatgtcacttatatctcccattgccaatttttttcttgggggagaataagaaagccattgtaatgtttgttctcaaacgggggcaaaaaaatcaaatggattgaatttaattctatggaaacctctgctggtcttttgcgaattgaatttagacctttcaagtactaagaaaaatggctagccttgacaaaacacctcgaaagtccactttaatatacatataatatttaagactacaaagatgtattatgtataaaatacaatttcgaaattcaactagtatgtcaatcaacaacaatagatcatttgatagggaaacacataaagtccaagctagcaaacacgtgaataaaagttttctactaaattatatttttcaaatgattttacataattttaaacatacttttttttttttttttgagcaaaaacttcaaacatactattccccaaaaatcttattatataaagtatggtttttaaaattactaactcataggattatgccatgtgtcaagtctatcgatcagatgttgacacgtgtaagaaaataattaacttttttcttcttaaagaaatagaaatactaaaaaagaaatcaattaacttttttcttcttaaagaaatagaaaactaaaaaataaatcattattaacatatactaattcatatgtctatatctaaaaaatattacattttatttttcttaaccaaaaggaaaattaaccaaaaatatttatatatgttattggtcaaatttttaatatgtatggtattaacaaattttttattattattaattatgttttgttaattgttaataatttttaatattaactaagatatagatttgatctcatatatatattattttgacatgaaatcattatcaagtaagatgaagtgtgtagaattaaaatcgagttttttatgaaatagataattaaattgtattacaaaattgaatatgtaagataaaaatttgttcttttcttctatataaatactaaattataataaagaaaaagtgtgtaggttactatttagacttcaaatatcatcaataagattgaatgagtataataaaataaaatgcataaaactactattttactattcaaaattatatatcaagaacaatgtatagattattattttactattcaaaatttaaatattatcgataaaaaattacagttacatcttacgcccgcctatttaggcgggccttatctagtgttatatatttgacaaaaaaaaaaagttatgttattgctcatttcagtcatttatgcaaagcatgtaaatttacgacgagttgcccaaaaaaaaaaaaaggaagtaaatttacgacgatagattaggctgacggcccgaccacccgttatgggtcaataataaaggcccattaacggtataacttagcaagataacaaacgaagaagaaaagtcgttgacaaaaagaaaaaaaaaacacgattttgagacaatttgccgattcctcgatcatttcatctgctgaataacaacagtgattggctcttctgattagcaagcttcttcttttcgaaatcgcatcactttggctgatcggtggattctacgaaccatg

SEQ ID NO: 13196 - DNA, 3000 bp, Unknown
  misc_feature (1)..( 3000): cDNA_ID_2702287_gDNA_ID_2214604_Annot_ID_135625 3000 nt of promoter + ATG
aataaacaaattttataatatttttttagaataaagcagaaatttgttttgttaagaattctacttctgtaaattatttttcaaatttaaaagatcatacgttataaatccttacgtatatctacatgtattcaaaggacatgtcacatgtgtattactaaatttatagaaatttgaaaattgtaaaaattatattttattatctgcgggatcgtatatacatgctggtcgatcggtccagacttgatatgtgacgaacacacaaaaataaaacttgaataggatgtaatcgaaagactgttatgaagtaaacatttaaacatatataaatagaatcactatttttaaggaaatttttatatttgcaattttgcaaaagtcaacatatatacaaagtcctattgagttgacccaatcccctcctcaacgggacccaagcaacgaagtttcgcgccaactagttccgtttcagtcaattgcttaaatatcatataacggatcttttatacaccactacgagtaattttatagaaaaattacactgaataaacgaaaaacataggcaacatgagccattttttcttattatgaatatgattttttttttttggggaatccgtttaaaaaaaaaagtagtcttgatcacgaaatttcttcttccacatgtttatgtatatatgatcacaaatgacggaatcaaagatacatcatttagacatttaccattaatttcaaaatatttattttcctcgctacaaaatattctgtattgacatattgtcatcaaatatgcatcatttaccatttcaacatgtttattttcctcactacaaaatattctgtgtcgacaagtagtagcatgattttccttaacaagaataatttctgaactgtcttcaaccacacattcaaatcttcacccgaatgcattccccataaaataatgttacttagatactgttataccgatacacatgatcttaaacttgttgactgttttttctttttcaaataccatacaaagtaaaaataaaataatctttactgatcctagctcttgatggctgctggaattaaacattcacgaaccctttaattccgctgtgaactcgacccgatatatatatatatatatatatatatatatattttacctactttgtagagatatatccatatacttaatcattttgtacatcctatatagcaatttttttcaacaatttgtttttctgccaattagtagtttttgtgatggttaccaacttcttgtgatggcttttaagatattgcgaacgaatttgttgtaacataaattttatgtctacttatcaaattgtcatatttcacattattttactgacttttagcaactactttgaaaattccctctccatatatataataatgcgatagagtatggaagtactggcaatagtcgtagctcagttgcaaacaatttgcgatgaattttttgcaacaatattttcgccagatactaatgaaacattatatttagttgtgaatttgtgactagctaaaaaatgagatgaaaccattgctaattcatgatatactggtattctcgtcccaataatatgcgacgacttcttttacagtcttttccatcacatagatgtttttgtacttgtaaagatgtttctattttcataatacactacagtcttttacagccttttccatcacatagatggttttttgtacttaaatacttttttgttaaagacgcttgagtccgtgactcgtgagtacggataccccacaaggccacaacagccgcaaacgaatccaaaatcagtatattcgaaatgcattacgtacttaccttttcgaacgaatctaaaacgtgtccagtttgagattgcatggctcatatcgttgttgtacatgcatgtacattgtttatgtaaaatacaataacttttaattatatacgtatatataatcatttttaaaatgtctattgtagcttcaattcaaatggttcgggagaaaaaatactctctaaacccatattaaaacttgcaaataattaatttagtatcttctaataataattaaatatatatacatcaaaactatcatttttatctggtaatgtttttcttatctggtaactataattaaaagttatcgaacaaactttcaaaatcattaatttttaatttataaattagaataaataaggataaatattttatatgatattctatcatctccatttagagctatgtgaatagctgttgcgcatttgtgaccaaaaggcgagagagctaaagatctcgttatggccatctattggtttactaaacgctaacattatctatgattttttttttcctttgtaaacaatatatcaaactttttttgttgtgaaaattcaggaggtggctcgtattattatattttaataaatctattctattttttctcataaactaggtagacttttattatttttattattattttctctatcattttcaattatatttaatattattgcgagctagaccctaccatctcgtgtcttatcgttcaaatactatagaataataatattaacaatatgtcaacggttttttggtaaggacgagttaagaagaagaagtcagtctccaagaatttgactcagaacaataccaaaactgctttaattcgtcaaaatatcaattctggactattcatttcaacgtctcctccaaaaacgtatgtatataaatacctacacccaccaacaccacaacttaccaagtctccaaacatagttcctcgcatttacatatatacatataataatatctctagaattttcaagagcatcaagatccatcaagatccaccaggtatatatatacgtgcttcgtacatacatacatctcctgagtttccgttctttgataagttctctatatttgctaattgattattgatgcatatgtacgtgacaatgtctcattaacagtgtaacggagaaga

SEQ ID NO: 13197 - DNA, 3000 bp, Unknown
  misc_feature (1)..( 3000): cDNA_ID_2702281_gDNA_ID_2214604_Annot_ID_135628 3000 nt of promoter + ATG
tacacacatgaaaactcatatcattatatgcgttagctaattaggtttaattgttgtgacctcgatatccttaccttgaaactaatgttgtaagctgtgaagttagctgcaaacactacaaaggagaagctatcagcagtgtttccggcggattttgctgtgtcgttccattcgatggatgtgttttgatatcctcttccttgaataacaaggtttgtcttgttttcattaaccgtaaccttttccctgcttgcttaaattgaactcaaacattactaaatatatatatcatattacactataaaagaaaattattgagcaatggagataggggaaaaagaacaagagcttggagttgaagataggacctataagaacccgaattaacgatgatgagagtcttggaagagcttaaatcagggacaacatcaatggcgctttgaacattgctgaagttaccacaaccatgcaaatcaacagtcaacacaagagaagtcttgtattggtgtctaagccttgacgtccatttctcacaacattttattggttcatggtggtgataatgatgatggtgatggtggtgatggtgatgatggtggtgtttgtgtccaaaaaatgttgaatattttgctaatgctccgatagttgtagctatagaagagagagatctagaggatggcaattggatcgtgtagagagcaagaatgatggataaaagagctattagggtggttaaaaccggtttgatgggcatgtttaagataatagtagatgggtttagtgtgtctcaactagttaaaagtaaaaagaggccaaatgttgtttggtatttatacatgtgtgaggaagagtggcgtgagagtaaagtgaaggatgggcttcgaagacagtgtggtacctttttcttcgtaaatcagatacgttttatctaaagtcatttctgaacaatttcgtgataattaaacaaaaaaagtatatacgtcgctttagaaacttagaaaaactgtggaataagttttctcataggcatcttcaatcgtttaagttagagacgcaataatggaataagatgatgaagtatttttacaaatatcagacgacaattatgaatatttttgacttactaagtattgtttttttttggttttgggttagaaaaatcgaaatcttgtttttttcttagacataacgtctgttttgcaagacttataacctgaaagtttataattttttttcttttaaagacatttttacatatgaaatattttatgattttgcttaatagatcattccttgttgtattaaccatcttgaaaacgaagtatcacggccagtcggctatcataacaaaaagaaaaagaaaaacttataatgaaatctagccaaaagcatattataaatttttatgtaacaatctataaaatttataagagttcaatttagaaatgggtgacttatatgatgttggaaaaaatagttgttgagattataagagaattttcaaatcaaccgacaggcgagcgagttgggggtggtacacgccaagatggttaatgatgcttaataaaaccatttcaaaagcaacttttactatattttaattttgcgttgtttaataaaattgtgagtgttttatctattttggtaaaaaacactgactcatttatttacagaaaccactgagtttgactcgtcgaaagaaaaataatttcatttacataaacaatgcttttctccataaactttctaactccaaatttggtatcggtatggttttaggagattacataacagtatgaattactttgaaaaatcttgaactattaacatcttaatgagtcggttgacgtactgtatatttattcaagcaatgatgcatggatccagaaactattttgagccgaggcaaaaataaacgtaaattaatagtattgaacaataaattaaacaagaaatgaaccgtgtaaatttggaaaaagaaaacatcatttttctacgtaatttatcaacattgatctattttaaaatttcaaagagtcttgcaaaacaaattcgagttcatcactttctttcaatatatatcgtctcgtgaatccaagtgaaataattgccatgaatcatgcaagatgcaccttataaaacagaataaatttatcattttttccaatgctaataacattaaggcgaaataaattgttttatagacttacgttgtatcatgtatggttaaagtcttaaagagatagagaataacaaatacacaaagtgtataaaacataaagaagagacttgagaaatgagttctcaaccaaatcaaaccgatcacacacgattagtaaaagaaaaatttagatttaactgcaatagttttataaattctaaaactactcataagaggttaaacaaagtttaaattttcaactcataattcctaacaatttaactataacgcacaacataaatgcagttgttaattctaggaaaaaaaacagattagtaagcgcaagttttcgaaatgggcattaggcccaattgatttatcttcaagaaatacccattaaaaaggttaatatttacgaaatctgccactgctctaaagactgtaatttactgcgtttttctctatcttccttcctctccagtggctgcaaaatcctaaatctcaccgaaaaggattttgtattgttacatcctcttcttcttcctccagatccatgtatgaaacctcccctgaaccctaatttagctatcgaatttgagattcgatccgatgtttacttccaaatcttcgtttcgtctctgataatataactccatcgtaatagaactgatttcaagacggttcgtttcgttttcctctatcccagattcggaaagctaccttgttttgaactccatagttttcccgaatctattcatcacttgctactatcagtttgcttcttctgttctgtgtagatttccttggagggggtttgttttgacgcagtttcgttgcaa

SEQ ID NO: 13198 - DNA, 1743 bp, Unknown
  misc_feature (1)..( 1743): cDNA_ID_3028536_gDNA_ID_2214604_Annot_ID_187183 3000 nt of promoter + ATG
tggctgctccagagcgcagctgcgattcgatgtcaaactgcagttgtacaagctccgcgtgagtcttcccatcaagaagttctctcacaccagcttcaacaccagcgtgtagtgctctttcttgagaagcaagcaattcctcatctcttctacgagctttagttaactcccattctctgatcctcttagtttaacagagaattcatctagagatgctccatgatgaacatctttttcaatcttcttccgccacacgaatgtctcggctatgttggaatcccaaaagggtttgaatcattggagtacccaataactgactgtctcttcagtttctttgaagcacttagtgcccttttggccatatactcgatttcgtctctctgcttcttccgccttccatgcctatctctcttactcttaccatgaaaattcatatttgtctagttggagacgacaatctgagatcagtgggacggtggtgaaaacttctcctctccgatccgacgataatggatcttgtgattgaaacagattttcagaatatcggattgtgttatgctcgagcctttacgtatatttagctaaaaggctaaacttagtccaaagcaaaaactgaaaaagggtatttaattttctccatttttttaaaccaacctctcctaattggtaattgcacaccacattctacctctttaaaagaaaaaaataatatattaaatttaactattacaaatataataattaggaaaaaattgaaagcattaataaaataattaaataaagaaaactcttgtaggttcaagcccttaattatcacactatggaaaaaaaaaatataggagaaagaaggcgagaagaagcaaacataagaaaacagctaagaagaagcaaagccaattgactagagaaatgtttccggggaaaatattgctaacatgtatcattagattcaagtcggtgtgtgaagtacaaaaattgctcatggaatcttcactcttccgccattatcctacctacgtgaagataatagatttataaattatcggttagaggaattggaactcgatctctatctacaagagtcatggtaaatacttgtctcttgaaagcagtgttttgcaaaacgaattttttacccacttgtgtaaattttttggtagtacacaaacaaatggaaatagaaaaatgaagccaaagtttataataattactcttatagatgatcatcatcctaattgtcacttattagtgttactactccaattttgctgcatccaacacttgcattcctccattcaaagccataatttacactctagttagtgttgaaagaaaaaaggaacaaagtgattcagagaacaccgctcaaattattgggccaataatttgagcattcttatcaatctatagaaacaaaagaatgatccaaaagcaacgggcttaaaaaaaccgctattatacccggacccgtcttgtcgggtatgggtccatcggttacaattggtttcatatatttgttttcttcccccaaactttttctttttaacattcaagtccctccgacaagaggcgacgcaaatttcataactaactaccgagctccgagagctggctctctctttcttctcacctctctcggtcggattcttctccgtctgaaaaaaatcttgatcgatcaaaacagtcgaatttttggtcttcgaaattctgggtttttgaaatagttgatcggtttttgaaatg

SEQ ID NO: 13199 - DNA, 3000 bp, Unknown
  misc_feature (1)..( 3000): cDNA_ID_2702261_gDNA_ID_2214604_Annot_ID_187177 3000 nt of promoter + ATG
atagctagaaatctagagtacacactttgatttagtttgaagacaaatgttgaggcttgtttgtccatacgacataaaaagaaggagagactgagatattccgaatttgatttttctttctttattcgtttatccaatactaatttttacggctataaacttttcactatcttttcgacgtacctctagctaaaagatattttctcttaaaattttgggcttatatgaatacaaaagaacatatgagtgcccgccacgatatgtactgtgaaccacttagtgtgttttgtaactattacgaataataagccaatttccttttgttctttcttacatcacatcttaatatatgtaggcacagagaaacacacacattatcggaaccaaagcaaaaaaaataaaccttagaagagagttcctcatggcatcggaatttcgtcctcctcttcattttgttctcttccctttcatggctcaaggccacatgatcccaatggtagatattgcaaggctcctggctcagcgcggggtgactataaccattgtcactacacctcaaaacgcaggccggttcaagaacgttcttagccgggctatccaatccggcttgcccatcaatctcgtgcaagtaaagtttccatctcaagaatcgggttcaccggaaggacaggagaatttggacttgctcgattcattgggggcttcattaaccttcttcaaagcatttagcctgctcgaggaaccagtcgagaagctcttgaaagagattcaacctaggccaaactgcataatcgctgacatgtgtttgccttatacaaacagaattgccaagaatcttggtataccaaaaatcatctttcatggcatgtgttgcttcaatcttctttgtacgcacataatgcaccaaaaccacgagttcttggaaactatagagtctgacaaggaatacttccccattcctaatttccctgacagagttgagttcacaaaatctcagcttccaatggtattagttgctggagattggaaagacttccttgacggaatgacagaaggggataacacttcttatggtgtgattgttaacacgtttgaagagctcgagccagcttatgttagagactacaagaaggttaaagcgggtaagatatggagcatcggaccggtttccttgtgcaacaagttaggagaagaccaagctgagaggggaaacaaggcggacattgatcaagacgagtgtattaaatggcttgattctaaagaagaagggtcggtgctatatgtttgccttggaagtatatgcaatcttcctctgtctcagctcaaagagctcggcttaggcctcgaggaatcccaaagacctttcatttgggtcataagaggttgggagaagtataacgagttacttgaatggatctcagagagcggttataaggaaagaatcaaagaaagaggccttctcataacaggatggtcgcctcaaatgcttatccttacacatcctgccgttggaggattcttgacacattgtggatggaactctactcttgaaggaatcacttcaggcgttccattactcacgtggccactgtttggagaccaattctgcaatgagaaattggcggtgcagatactaaaagccggtgtgagagctggggttgaagagtccatgagatggggagaagaggagaaaataggagtactggtggataaagaaggagtaaagaaggcagtggaggaattgatgggtgatagtaatgatgctaaggagagaagaaaaagagtgaaagagcttggagaattagctcacaaggctgtggaagaaggaggctcttctcattccaacatcacattcttgctacaagacataatgcaattagaacaacccaagaaatgattgtaacttttcttagattgtaacttttcttttgtattacccaaaaaaaatgattgtgacgtttgttctcgattacttctctttgttcaagaacaatttatgatagttttatttgaaattgtctctattatcgaatcttatactaacatcttagttagtacatacttattaagcattcgaattcgtacactcaaattgaagaaaaaaacacaatttcttatatactttttttttttctgtagctttagaagagtgtagaaaccttctccagtggtcctgcatgagatcgcaacttcgatattgcttgctccttggagtttagaggagtgtagaaacactttttgtttgtttacttttgctttctcgatcatgacaagttgacaactcgtgttatatccaaaatgacatcatgcatgacttgaaaattgaaatctatctatgatattaccatttctggacaattttgttaaccgatttatatatcttaacatctttcttttttggtattatttacgttacgatttttcatcgtaaatttaatttaaaattttatatatgccagtgtaaaaagaaattactcaaggtcattaataaaaataaaaataaaacgtttttccccagcggtctatcattgtaagttttattttacaaaaagaatcttctaatataatatgggctttgaaaatgtctaagtggaaggcccattaatatctcaagtccaataacaatggtgtacgaaccagcggcaccgtgtgtgaaagagtgaatcaaagaggtgcggcggtcgccggcgaagacgtgtgctcgtcgaagaaacttctccaacctaaaattttccgaaggtaactcctcgagcgagattttaagctcatcacacaaattacttttcattctcgctttcatgggctcttcttcgattactgtgtacatcactcaaattttgggtttttgttcctgtttccctctcgatataatcgtaaagtcttgaaattgcgagaaaccctaatttgggggttccttgctgatttgttaatttgtgtgttatgacattttcgtttaaatttgtgaacttgtagaagtaagagttgagcaagttatcaatg

SEQ ID NO: 13200 - DNA, 3000 bp, Unknown; identical to SEQ ID NO: 13196
  misc_feature (1)..( 3000): cDNA_ID_2702287_gDNA_ID_2214604_Annot_ID_187170 3000 nt of promoter + ATG

SEQ ID NO: 13201 - DNA, 3000 bp, Unknown; identical to SEQ ID NO: 13195
  misc_feature (1)..( 3000): cDNA_ID_3028552_gDNA_ID_2214604_Annot_ID_187169 3000 nt of promoter + ATG

SEQ ID NO: 13202 - DNA, 3000 bp, Unknown; identical to SEQ ID NO: 13199
  misc_feature (1)..( 3000): cDNA_ID_2702261_gDNA_ID_2214604_Annot_ID_135630 3000 nt of promoter + ATG

SEQ ID NO: 13203 - DNA, 3000 bp, Unknown
  misc_feature (1)..( 3000): cDNA_ID_2713232_gDNA_ID_2214604_Annot_ID_135637 3000 nt of promoter + ATG
gttgaaagaaaaaaggaacaaagtgattcagagaacaccgctcaaattattgggccaataatttgagcattcttatcaatctatagaaacaaaagaatgatccaaaagcaacgggcttaaaaaaaccgctattatacccggacccgtcttgtcgggtatgggtccatcggttacaattggtttcatatatttgttttcttcccccaaactttttctttttaacattcaagtccctccgacaagaggcgacgcaaatttcataactaactaccgagctccgagagctggctctctctttcttctcacctctctcggtcggattcttctccgtctgaaaaaaatcttgatcgatcaaaacagtcgaatttttggtcttcgaaattctgggtttttgaaatagttgatcggtttttgaaatggcttcttcaagtttagggagctcaatccctgcaccaggtataaaactttcttcctgaatcttcgatttcgattttttaatctacctcaaattgatcagtgtattggcttgtttgatcgaaaactcttgaattgtgtaattgggtcaacattggttttggcaatgtctgttttatctgatcaagtttactttttttatattttgttggcagaggctgttcaacttctggtatcatctctagctgatgattcctctgtggttagagaagcttccatggcttctcttagagatattgcctccctgtatgtactatttatctcattttacttcgtacacaagacatgcaactatgagtatcgggagatctttgatactgagctgttgtgtgattttttttttttttttttatttaggaatccgcttctggtacttgattgttgctatgctgtgtctcgtggaggacgaagggtaatgttctgtttgcttgtcttttgtttccttttattggtgggttgaaacttaaatcttgtgctgtttggtgttgcagcggtttggtaacatggctggggtttttcaagtaatggcatttagtgttggtgcgttagagaaaggggagagtgattcagttttcatgggaaagcttgctaagattgctacagctgagattatatcttccaaggtgtgttgcgacggctgaatcattgttaaagatttcttttttgtacgtactgatagttagatagatttacgtagtgaacttggaatcgtaggtgagctacattatttctataaaaacaggggacacttcttgcaatgctcacaaactttctcgcaactgttcgtatatgtttcctgatcaattttggatcttttaatggttcatcataacgtaggaactaaatgctgattggcaaaggcaagcatcagggctgctcgtctcaattggaacacattttcctgatcttgtaagtcttgtttttttcttttctgtttgctaattcaaagagggatttcttgacattgagaaaaaactgtttttttagttccatgtgactgtacactcttgagttgttgccttttactatacacaaaaggttggtaacatgattggtggtgagatgcattacgattcggattatctttgatagtttgcatgatataatatgagttgctgctgagaaaaccatagtagagactttcatctgccatcatgttaacatctatattgagacattttagatagtgtcatgagtaaagctggtccttgtctctatactgtcatttatgaggtagaaggcagcctatcccgttagacgtggggcttgatttcccttctttttggataaagtccaagatatttgatattttttaattgatatggacagatgatggaagaaatatttcttcatctgtctggtccggctacagctgcacctgctatggttcaaatacttgctgactttgcctcatctgatggttaatttctaactctcattcgtgtccctgtaattttttgtttctcatattgaaaagtttatggaacttgcagttctctgatattttgagttactttcatatttcctttgaagctttgcagttcactccacgcctgaaaggtgtactttcaaaggtgtcgcctattcttgggaatgttcgggacatacaccgaccaatatttgcaaatggtacagtgaaacttttgtagtctgtttttgtttagggagtgaaattcttttacagaaactactattttgtgccaattttcctccctcatcctgtaagcttttttttgtcttgcactatgtggttagttgactctaatctggcttctagaagggtcatgaggtcagagtttgttttcttgctgaaccaatatggcaatataattcatactaacataaaagtaggttattaacctgttgatctgtacatcttcgcactctaattatcgactttgtgtgtttagcatttaagtgctggtctcaggcagtgtggctatacatcacagatcttacctcagattctccgcttgacagtgatgtcatgtgagaccactttctttgttctgtttatttctgccagtttttgtgttaaacgctctcaaatcaagggcttcatctgatgcaggtcatttctgaattcagtttttgagctattgttgagagtttgggcagtttcccgagatcataaggtgagtccctgatctcttttagcattatactccactttacgttttaatagtattgcgcgtttcagtttaaaaatattattcaagagattaccaaggtaagaacatggttcgtaaatgttcacagactattattttataacaaagacaatgaagaaagatggtatgtaactttattaagataaaaataagaaatgaaagtttgttttcgggtttttctttcctcttcccccagtaatgtatctttgaaattcataatatggagagatacatctctagaagatattgctagttagttattcacttgctctccagacatgtctcgtgactttaaagtgtgcctcttctgctgaataaggtacgagtatcaactgtagacgctctgggtcaaatg

SEQ ID NO: 13204 - DNA, 3000 bp, Unknown
  misc_feature (1)..( 3000): cDNA_ID_2713280_gDNA_ID_2214605_Annot_ID_135640 3000 nt of promoter + ATG
agatagatatttgaatattcagatctttgatgacccgtctttagatccaataaaccctataatctagttattaacctgcagtataccgcaggtaggcttatactttagttaaactaaaaacttttattgtaaagatgatttaaatatatatgatattattttatttgattttaaatgtatagtaaactgtgagttgtatatgttttgttgatattatctatattgtttagtgtttaagattatacacttgtagtttggttgttaatttaagagtttcacctgtagtatatcatcttgtattaatatcgatctaaatccgtccattttacgattttccagcttgtattaaaaattgaatcacatctaatatgttattaattactgtagtatataagattataaattttcaatataatatgtgtgaaattgaatagaactatttcaaattatgattcgttactcagtagaaagttttcttaaatctatttttctcccgttataatattttttcatgtattgaacagtttatattcgtttttaaaaatttaaattatggcatatgcgaaaaaaactctaattatttgtttataatgatgatattatttttcggcaaaaatagaatcatataaagatgagaagtgaactataataattaataaaaaattaatatgataatttagatattaaatctaatttgttgattttaattggttacttttttggaaattaataatgtatttcgtttttctaattaaattaaattaattaaaatttagatatcaaatcttatatgttaattttgattggttattatttttggaaattaataatatatttcgttttttaattaaatttaattaattaaattagtatttgactttttaatctttaaagagataaattaatttactctttaaaattttatttctaatggtatacccatgtaattacttacaaaaattaaggttacattttaaaatgtacttcccaaataatatagtaggattttattaatttttatttgtctttaaacaataaagcttaaagcaaaagtgaaaccaattacaaatttacaacagttgcgatgtgtctagaaaagcgaaaaccgattttaaccctataaggccagaccaggccaaggcctatcatatcaaaaagggcaaaaacgagtgaatttggacaaaatcgaaaccaccaatcagaaaatatatgtggttaaaactttgaacacatcaataaacacgaaaagggtaataacgtcatttccataaattcgtaatcattcgtcctcaaatctttattgtcacttttacaaaaaatactcccaatttcagagaaacctgttgaaaaaaaattcagggaaaattggaaaaagtgatgatgatgacgagagatcaattcaaatcttaagtcctccaaattttaaaaatttcgatctccactaccttcgtcatcttcctctacttctgattctcttttctgggtttgtcgtttaatgggttgattttgtatcgtcaaaacggagaaaacaagaagacttcttttggttttcttattgcgaagaagatatttctagggtttcgagattttctgggttttctgggtttttgtgtgttctttgattggatttgattattgggcaatttccttggaattcaagaaacttctaaggttcttaaagtgtaaagctttgtgattttctcttattcatacattctaggactttggttttggagttgtaatggcttttgggtctgaaaatgagagcgagacgaagatggaaggttggttgtatataatacgatctaatcgatttggattgcatttctctagaaaacgttactttgtccttggagatcatcttctcaagagtttcaagtctatctccgattctaaaaccaaggtcaccaccatttgattaatcgcaagttcgtttggttgttcataatctcccattttggattaggattttaacttttagtagaatctgaatttggtttttacagaatgctggacgaagtgcggtgatagattcgtgtatccgtgttactgacaatgggagagaaaatgttcatagaaaagtatgaaagttctcatttttaaatctttagttgtggagtttagttatgcttttgttttaatggtttgtctggaatacttgtaggcattcttcatatttacactatacaatacatcaaatcacaatgatcagctcaaggtaaggtaatttctgttgttttgtttttatgttggtacactatatacatctctttttttcatttgttaagctttcttgttttaattgttatatagttaggagcaagcagtcctgaggatgcagcaaggtggattaatttgattaaagaggcggctttaaaggttatataaatggcaattagtaacaagttaagagctcttcttggaggttggagacttatagttatatgttttatgcagggtgccccttttcctggagatgtttttaattgttccaggagtcgatgggactctttgaggtacctctttttttccacgtaatcaattggatacatctctaagctaactgttaaataaattgctgagccagtagttcctgccaatttttgttagttacgtagtacagataatggtttgtggttacttaagaaagaaaatttctgaaatcagattgagtagctcagtgcgggaccatcactcaaactctattgactggacacttcggtcgtctgcacgagttgatcctgttacaactgatgttgttgcgccttctccctggacaatattcggttgtcagaatggtatagttcatactcaaatttcattgatttttgtttggctggaatgcatagtgttaacatgtgttgcacgcaggtcttcggctttttaaagaggcaaaagagagagattctctcggaagggtcggtatttttttcactcttaatctgttgaaaaggtattttgggtttattgaagggaatcatgttttgatgattttgttgc

SEQ ID NO: 13205 - DNA, 3000 bp, Unknown
  misc_feature (1)..( 3000): cDNA_ID_2713272_gDNA_ID_2214605_Annot_ID_135643 3000 nt of promoter + ATG
aatgcaagacaacccaccaacacattattcaccattctaattttgtgttgcttctttctagccatgtcaagtccacatattaattatatatgcattttatatacacatttacatgtataccagtgtgtgtattcgagataagatgaaaaagtatatggctgaaatacacttgaaagacaaagaaactgtgtgtcttgtcgatgattttatgtttttttcagaagtcatgcattaattgatccttttgttttcttcttccctcctggtccatttattctctattaactattttttgtttgctcattctttgaaaacgaacttaaacaatattttatttacattttacgttagaatagtcatgtgatttatctcttaaaattcacaagtagacaaaaaaaattagttacttcgtttcatataaggtcaatagaagtaaggtcaatagaagtaatacatacttaagttgtctgtttagtgtttgtatagttaaaaaggagtaaatttattacctacatacgactattttttttcaaactttttaatatcaaaacaagggacgaatattaatatagttcgtatgaatcctttatcgttgaatgtgacttaattatagaagataataatagttccaatttattaatattgtagctaatattctcaaataaaaataattgttgtagagacaaaaagagattcgtgtatttttttaacttatcatttttgaagttaagatagaaaaacataactgaaaacccatgtaaagctgttttgtgactaatctgttttgcgaatctacttttaaaaaaacatatttttcacaatcaaacacaaatgcaaaattagtttttttgttcttttttcggaacgacttaaagttttaaactggaagcagaaaaattgacgttatgcctcacctaagaacaaaacttaggccttagatggaaatctttttaatttggactttaagagttattattcttcgatggtagaagtttttggttgagttatataattaatttctaatattctaatgaagttagtaagctatacttccttatattacttttgtttgaagcaaaaaaaacacaaatttgtttttattattcaactaaaatagacaacgtacgaggaaaatctagttttcaaaatataaagaaacagattttctagattttatgaaactaatttctaaagatgagacacaaattttgaattatttctaactatacagaaggataaatacaacaaaaacacttaccaatcaacgtttaaaattgttatgagtaaatataatttgatggtaaaatagttgcagagaaaaaaggaccaatatacggatgagttgggtatgtcgtgtcaggttataattggataatattgatccgacaaaacaatcgacgagtacaaaacttcaacgaactcactcacactccaatctccacaatccctttttaacagccgcgttttcatctctcgggtcaacccccttctcctactcccacgtacgttttatccccacttttatgacgtcattttacacaactcataattattctttttttccttcctaaataattatttatccgtaattctatttttttttttcatcaaacattagctttgttattgacgagcggtgacatagtcacgatgaagaagatcagtaattacatgtggaacgaaagcataaaaataaaagaggttgttcaaaggaatatgttgttttgctaaagtatctgccaccatattcgagcatctccgtaattctttcaaagttgtggatcataatccattttctttagtttccttttttcattaattgattttgaaattaaaaatctttctagaagaaatttttatttttaaaaagtttgactccagaatttaactttaaatctaaatgaacactttatgaagaagaaaaccaatagtcaactaatgaatatttttattttatttatacttttgtgtgaaaattatcaaaagaaaatttattgtgaaatgaggtgaaatgagggaataatatgcaactatttatttttcatttaaataaaaagaaacatttgcatgggttaaaaatatcatagtttttaccccagtgtagtacaaaaaaggactgtttatttggcatctaatttcaacatcatataatttaccatgggtttaacctatttcttgttttaccacaatcgtgtaatggaacccatctttcactaacgggcaaaaaaaagagtcaaagtgaaaagcagaaagtaaaaaaaaaaagataaaaaagatttaaccatggttaggtttgtatctggtcaagcatggtttctgatttttcgagtaaaaaatcaaaaatttgttggtacatgtcaaattatcgcggctcgtgatacgataaattgctaattttattattattagtgaagcaacaaatgaaacaaacaagttagttgcagttttttttaatcaaacaaaaaaacaaaatttatttatcttgaaaacaatttattatatattatttatattaaaaaaatgaaaaataaaaagagttataaagtttgtgtttgagataatctctctggtttgtttggttcttgtttctgtatacatcattactaaagagaaaaacaagatgtttatttattacgatggtcttgtccgtacctgattatagcatctctctctatctctctcttcttcttctacgatctgatcagccattaaagctttttcccccttcactattatacctcttttgaagtgaaacaaaatcataaaagtcgaaactttactgtttcctctgcaaatttaaactctaatctctctctctctctctatctctttcacttcgctttctctatttcccctgaaaccgttcttgtctctctctctctctctctctctcttcttctctgctcaagacaagaacttgatgttcatgtcttgaaacttaacaaagtattgatctttccttttaagtaaagaatttgggggttacacaacttcgtctag

SEQ ID NO: 13206 - DNA, 3000 bp, Unknown
  misc_feature (1)..( 3000): cDNA_ID_2713268_gDNA_ID_2214605_Annot_ID_135644 3000 nt of promoter + ATG
acaaagattcattcatctggactctagaaaatttgcaacaggagacctacatacaaagtacaccagtgcctgtcactaaggcaaacttacctaagtaaccactaccagacaccatgatgcaaagcatgattaataaccaaattaaacaacagtgaccaaatgaaaaacatgatatgatagccattttatcaacattaacttctcgaagaaagctcatctagttaaaatgatctttatgaccatgatatatcccggattagcagctacatcatattactgggcaccagtaataaaatcccctatacacagctgttaactagcttctaataagccttaaagatactaatagactagcaagcctcataacttatcatattaagccacaaacccgatgcttattttgtattgcactttcggaaatggaaacaacaaaaagcagattccagttcatagtgtatagcatattggaagaaagatagggtgctatcacatccgattctgataaatacagattctcacagaagtttatagtaaagcatatattcgatttctaatagaccaaagtcttaccagaaggcggtaacggaaggaaaatcactagtagaagccatgacacaaagagcagcagcagcaaacaagaactgaaaaaaacgcaatgcaagaccaagcaatgttccaggcattccttccatatcatccatcctcacccgaggcggattctctacttccgtcgcagctgcaggaggatcttccactggatgtaccgatgcatggctcacattcatttcttcttcttctttcctccaccaaactcaaccaattcaacacatctctctctcccttcctcttcaccaatagctgaattacaaatctaacaatctactactactcaaatctcccctacctgtattcaccaaattaaaccacaatttatacaatctaatgataactcagtacaaagttcaaggaggactaaatcaaacatagaatcaaatctccgcgatagctaaactaaatccaaggttacgaaattgaactagatttggctccggagaagtaaagagaaaacgagatccaatcaattgagcacgtagatcgagtaagggattggtgtttacctgagagaattaagaagagaggaagaaattgaaagcagccatggagcttgggtagaggaaattaagaaaatcctaagctatatttgagggaagaagaagaagaagatcgtggaaatggtttttaaggtttatgcgaagaagaagaagaggtgtgggtgttttgatcaaaaggaagaatatagcttgacgaaaagagattaaccattaaaccaaatttagaggtcaattaaacttcttaaggggaaatataaccaccaatctatattttcttttgttcacattttttttggtttcctaaattatactttaaaatatatctttttttaagaaacaataccacatatattttttattttttccctttttacattaatatgggtactaattttatttcaaatattatcagtttatcactaactatgatttatattgtagcaatttagcatgcttttttttgttaaactccaaaatgtgatataatttgtgatgaaaaaatttctgtaccaaccaaacgacaatattgcattttatttttttgtcaaatcagtcatatctgctatagattttttaattataatcaaatttaaattaataatataagatgtctatttaagtataatcaaatttaaattaatactgtgtaacaaattttcaaggttaatatagtactttttatgttttatttactaatttcttattatggttctaaactggccaatatttcgcggctttacattctttttggcaaatttctggttggtaaaaaaaaaatttgtaagtttttagttcgcataactcgggtgtcggccttctaggatcatatattaaaagtatgaattcttcaagcatttaaggcttctaagtaaggtatgttcttcgatcagcgacgattaagacaagtagaccatggcggcatgttctcatacaagcattaatttgacagaatatttttctatcgacagtcttggtaacaccaagtagtaaagctagaaaaacagaaacaagtctgattaaaaaaatgatttaaaaagaaaaatggtatactgcaaaatcaaccaaacctaagcccaactagtaatgaatccctgtgaatctgatcatttggacaatgcgatcaaccacaatgttttcattcgcaacaattaactcaattattagcagagttccgctaataattgcaggattttacaagcaaatggatatgcattttggttttaatgtgaagatttcattcaaaaataaaagtataagctaagctattgttacaagagttatcttttaacacatgatcaaaagacagaataataaatttacgacggaaaagaaaaacaaaagagatatataaatatgtaatatgtaactatgttttttaatattttaaatgcttttatcaatattgttaatgattttagtaaaatttatacattgctctctttgattattagatgatgcactttttgtaacaaagttttttttggaataaattttacattttattcaaaacaaaataaggaaaaatattagtattaatcagactagagtattatttataatattaattaaaaaaaattaactgtagaattctaattttatttctagtgtttgcttggaaactacatagtatacaaaaattagaggtatttaaaaacttttgtccttatttatgcaaaatttgcaatttctgcctcgatttttcaaaaatatctgagaactccgatctcattctctctctctttggatctccatcaccattgactgatttgatcgatttcacagctcgaaccccaaaactcgccactgctccgctgctaaggttcttctacttcttcgactacgggcaaaagctctcagtctccttgtctccttcatcgccaccaccatg

SEQ ID NO: 13207 - DNA, 3000 bp, Unknown
  misc_feature (1)..( 3000): cDNA_ID_2994248_gDNA_ID_2214605_Annot_ID_135645 3000 nt of promoter + ATG
aaacaaggaatgaaaaaataccttctcatcctccaccaaagtcttaagaataacatcaatctcacatgtgaatatctcgcaagagatgaatggaaacctacgagaagaagaatccatcactagccagaaataaagcattgccagaaacattcaacaaataaaagcatggaaaactgaaaatccagtcattataaaagaagcaaacattacttgaaagcacgtttgctatcagcatcgtcctcaggctcttcaacaacataccgcaatagtttctccacttgagttttttcccttagactgcaaataccaatacaccatcagaaacttttccaagaaatgttttatacagtatgtctggatatgtgaaacaaagtagtacaaggcaaatccctcacaaattaatgagtcggctattcaaagctttgcattcttgaataatctcttcctcgtcaagaagctcttccaatgtgaaactgtctttgtctagtatcgactccacctatatccataacaaatggaaagaacatcaactcaggaataaattccaaattgacctgaattgcaatatcatcacaacaatgaatcaacaaccaatctccgtgtaaagctagaggtaaatcaatttcactaggaaaatgaatgaaaaatgcaaacgaagaaccattccaacttcctaaaaccagatcaccaaggaagacgctgagcagctataagaaaggagaagaaatgaatctatcgttgaaactcacaggagacgatgcagagagagaggctagcttccagaacatggtggtggcgatgaaggagacaaggagactgagagcttttgcccgtagtcgaagaagtagaagaaccttagcagcggagcagtggcgagttttggggttcgagctgtgaaatcgatcaaatcagtcaatggtgatggagatccaaagagagagagaatgagatcggagttctcagatatttttgaaaaatcgaggcagaaattgcaaattttgcataaataaggacaaaagtttttaaatacctctaatttttgtatactatgtagtttccaagcaaacactagaaataaaattagaattctacagttaattttttttaattaatattataaataatactctagtctgattaatactaatatttttccttattttgttttgaataaaatgtaaaatttattccaaaaaaaactttgttacaaaaagtgcatcatctaataatcaaagagagcaatgtataaattttactaaaatcattaacaatattgataaaagcatttaaaatattaaaaaacatagttacatattacatatttatatatctcttttgtttttcttttccgtcgtaaatttattattctgtcttttgatcatgtgttaaaagataactcttgtaacaatagcttagcttatacttttatttttgaatgaaatcttcacattaaaaccaaaatgcatatccatttgcttgtaaaatcctgcaattattagcggaactctgctaataattgagttaattgttgcgaatgaaaacattgtggttgatcgcattgtccaaatgatcagattcacagggattcattactagttgggcttaggtttggttgattttgcagtataccatttttctttttaaatcatttttttaatcagacttgtttctgtttttctagctttactacttggtgttaccaagactgtcgatagaaaaatattctgtcaaattaatgcttgtatgagaacatgccgccatggtctacttgtcttaatcgtcgctgatcgaagaacataccttacttagaagccttaaatgcttgaagaattcatacttttaatatatgatcctagaaggccgacacccgagttatgcgaactaaaaacttacaaattttttttttaccaaccagaaatttgccaaaaagaatgtaaagccgcgaaatattggccagtttagaaccataataagaaattagtaaataaaacataaaaagtactatattaaccttgaaaatttgttacacagtattaatttaaatttgattatacttaaatagacatcttatattattaatttaaatttgattataattaaaaaatctatagcagatatgactgatttgacaaaaaaataaaatgcaatattgtcgtttggttggtacagaaattttttcatcacaaattatatcacattttggagtttaacaaaaaaaagcatgctaaattgctacaatataaatcatagttagtgataaactgataatatttgaaataaaattagtacccatattaatgtaaaaagggaaaaaataaaaaatatatgtggtattgtttcttaaaaaaagatatattttaaagtataatttaggaaaccaaaaaaaatgtgaacaaaagaaaatatagattggtggttatatttccccttaagaagtttaattgacctctaaatttggtttaatggttaatctcttttcgtcaagctatattcttccttttgatcaaaacacccacacctcttcttcttcttcgcataaaccttaaaaaccatttccacgatcttcttcttcttcttccctcaaatatagcttaggattttcttaatttcctctacccaagctccatggctgctttcaatttcttcctctcttcttaattctctcaggtaaacaccaatcccttactcgatctacgtgctcaattgattggatctcgttttctctttacttctccggagccaaatctagttcaatttcgtaaccttggatttagtttagctatcgcggagatttgattctatgtttgatttagtcctccttgaactttgtactgagttatcattagattgtataaattgtggtttaatttggtgaatacaggtaggggagatttgagtagtagtagattgttagatttgtaattcagctattggtgaagaggaagggagagagagatgtgttgaattggttgagtttggtggaggaaagaagaagaagaa

SEQ ID NO: 13208 - DNA, 3000 bp, Unknown
  misc_feature (1)..( 3000): cDNA_ID_2713264_gDNA_ID_2214605_Annot_ID_135646 3000 nt of promoter + ATG
taactacacctaattgaaccaataagaaaataggatgtaaaatagaattgaccaaaaattattaaatatatttacttttgcatagaaaaataaaaagaacacttattttgaaagaaaaaaaagttccttaaactacaaatataataaaacagagggagtataattagtttttaacttttaagttttacagagtgatgtattttcatggttactaaactcactggcctatgcagtcagtggttagttcattaccatatttgacaagttctttaatggtatgctattattgttttagatatcttatgacttaaactcttaagcgaatccaagaaatccagattaataatgcctcttcagacaaaatctgaatttgttttatcttctcaagacattacggatgaacaagggattaatacaatgcttctaattaaatgctctgcttaaatgcacctgcttaaaatattatgaccccgaagtaaatgtatttaattacgaagtttatagttacacattaattactttgtaaattaattcgtcattaaataggtaaggaaatggtgaccaagggagagtattcctctcgttttcttccatctttatgtccttaaaatcgttggggttcgcattggacattcatttggatatttatttcttcctattattcctttttattatccgtttgttgtcacatttgcatcttaaaacgtaatggcaatagtaaatattacacatattattaacaacattgttctttataatctaactactcacaatttgtagtttaatgatatctattattactatcgaatacgatataatatactaagtttcagtacaaacaatttattctagctttctgttagtacaaacaatattatgtgcatataatgaaacttttcatgtggttaaatgagttaatataagtcgcaagaaaaaagaaaactagttagtacaaatttatgtggttatgtgatggatcagtcaaacttcatcaacttcgggagattgaaatagaaaaacgaaaacaaatataaaagtaaatgttggccactaagcttaactatgattatgaattccaccttttactactgcaaatcactcacagcgtttattacgataatgccccttatctctctctaaacgtaataagcattttggtaatttcatgatttcacatttgttcctcctctctctctctacccattgacttgtgtggacatggtttcaaaattcatcaaaagctaaattattctttagagatgtgtgaacattaagttttaatatatgaaaataaagtacgcactaacttcttaggtttcaagctgttttctagtattttgttttttcttttctttccattttcatattcctttttattagaatacgacttcagacttcccactaattctatgattaagttaaaattatacatcagtcgaacatatttttatttgttttgatgaaatattttatttaacttctactattgaagaaaagcatatagatcacactattgatatataagaaaaattatactagaaacacatctatgaaattttgttaattttttttagagaaacttactattattttctttaaccaattattttttataaaactaaaatgaatcaatgtggtagatcaaaattggagaccgcacaaataaacaaaagattcaacatagaaacaagttaaacccaactttatagtgaaaaaaggaggaacagccatgagattgaagtttcatggaaccaaggttgtagcctatcaaaaacgtatgtgggttggatagatcaaaattagaaacttttgtttcaaatggtaaaagcagttatttcacaattcatagatagttgaatgctaaaaaaaaaatagagaagatttggtaagtattaaaaatataaaaattgatcggagtagatgtgaatcatgtgatgaccaaaaaagatttgacaaccaaaattgtctttttttttggtgttttatgtattcagccgtttcctaagtgttattatagactttacggtttcgttttctccaaaaaaagtttatgattttttttcacaaattcaaaatgtatctattatacatagttgatgatggaacttgtgcggatttttcaattttttgtttcttttgaccgagatttcaaattacgagttaacgttaaactgagaagtcgcatggattacacattgtttaactagctacacatgattagaacaagttaaaaatactaaacatattgtttttttcgccaaaaacaagaaagttaaaccgttttgacgagtgttgttataacttcgaccgtttcgatgagtgttgttatagattctgccgtttcgttctttccataattctcttttaacttcttctctgttattacaaacgttaacaaaacttaataaactagaattaacctgtttattcaaatagacttatttttttcataccttacaattatacaaattgttcaatatatatttaatcttatgttttatgaaaattcaaattataaagcttacaatagtggtggattatagttaaatgtttttttttgttttttaaatccataaattaagatacatacaaaattagtatagtataaaaaggaaatataaaaatatcacatccatgcaggctaacgttcagttgactagcagcgataaaagcagataattaattctcacatttaattttattttattttttccattaaagcaaaaaccccacactctctctctctcttgctcctccctctcttcctctctctatctctctctgcaaaaaccctaaatttcctccgatttcaccatcttcaatctccttcacaccccaacttagcctcttaatcactccccaagctaaaccctccaacgattttccatgattcgaagatacagagccttagcgatgaagaaaaagccctaaaaaccaaagctttgatctctccgaaatcggagtttctttctttgtttggtaaatttggttttcgaaatg

SEQ ID NO: 13209 - DNA, 614 bp, Unknown
  misc_feature (1)..( 614): cDNA_ID_2713251_gDNA_ID_2214605_Annot_ID_135653 3000 nt of promoter + ATG
aacaacaatgttctatacaattagtacagacaatcgttagacaatcttaagcttacaggctgtccaaatttaaagtcaacgagatcagatcagacttcttaatctattccaattttaggaatcttccttaactctaaaaataatgaaaacaaaaaacatagaaactcgtattccatgcaattttaggaatcttcatagccggaaaccgtaccctaattttttttggtgtacactgttgtttaagctctttggtaattagacttgcatgtggtacgacgacttccggcaaaatagagtaaaattgaaaactcttaaccactttattaacaaaccggaaattaaaattggttacaaagttaaaaactaaaccgaaactaataaactaatcagacaattggaccgaagtaaaatcatctaaccgggtagggtttaaggtctgatgaatcttattcaattttgaaactccttcacttccaataacacttctcgaccatctgccgccacttccgataccgtcatcactaatcgacgagcttccttccgccgccgccggaaacctaacctcccagcgtctgacctatattaatctcactcccattgagccacttccaatg

SEQ ID NO: 13210 - DNA, 614 bp, Unknown; identical to SEQ ID NO: 13209
  misc_feature (1)..( 614): cDNA_ID_3028580_gDNA_ID_2214605_Annot_ID_187211 3000 nt of promoter + ATG

SEQ ID NO: 13211 - DNA, 3000 bp, Unknown
  misc_feature (1)..( 3000): cDNA_ID_3028587_gDNA_ID_2214605_Annot_ID_187208 3000 nt of promoter + ATG
ctagaaactccattgaagtattacattactttattgcatggttcttatatatcatatgaatgatttgagatttattgtaagtaaaaaaataattaacaatgataaatgcatctacaccgattaggcgctggagctgatggaactgattttatgcacataccagccgcttgcttaaacctccttacacacatctttttgcactcaccggtaacacaaaggtttacatctatagtcttataacactgttgtttatatccttggtccacgtctcccaccgctcctattaaaacaatgattcaaacttattatcttaatttcaatatttaaaaagtaaaaaaatatatactattttatccatttttcgagaagatatatatctcgaagagtttcatgtctattaacaaaaaataatctgtaacataaattatgtattttcttattcactaattcttcttgaaaaagtgtcataggatggtaacaataatcctcaataatatgataagaccatatcctctatatattagcagggaatttgaaaataaaatatttagggatcagtgtgctagggtatgcattcggcctaagaggagacacaactttacattatggaattatatactgtattgaacaaaaaaagatttgacacatattaataattaaaacataggtgaattgatatttagaagaatgatgctaagtggtgcacaaaaaaagaagaagagaaaaggtaactaaaacttttactagtcaaccagattttaactaaattgatttttctaaaacgaatatatgtaatatattaaaattttataaagataaatacaaacctaacacaaaaatggtgaacataatcagaatagcaaacgagagttgaatatgtttgcccatcatagatgatatacatgatttgtttttttttttctaaattgaaaaagtaagaacaaattgtagttatatacatgttagatgtctaggtactattcaaacatatctaatttaagctatctcccacctaagattccgaatgaaaaggatctatagtttgacccaagttctcgaccatttgtttattttatatgtaaaacgctttagactcggttatttttttcttctttacaatctacatttgacattgctaatttaaccaaaccatcgtcttcaaaaccacatcgctaaaaataaatgacctataattctattcaagtttaacaaaaaaaaaaaaaacaattctgttcaagtatcttttttggttaaagttctatttaagtatttattaacaaatttctgcagttgttttgatttaaatgaacatagtaaatctacaaaaatcacgtgagttcacttataattgttttgggctgaaatggaattcggatcccacatgagtaatgagtaacttgaaaattcgatcttaggtgacttttaacagaaaggatagcaaatcctgtgaagtgtgtgaacagtgaaagccaaagaaagagtcacgttataatacatgtgaaaccaattaaaaccaattacgtaccaaccgtcaaatatatcttttgacacatgaaacaattaatcaagaatacaagaggtaattaataaatcaaaaaacaacgtaaaacaaatcattattacggttttgtttagagaaaaatatatgaaattgaatggctaatgcaaccggaagccattaggtgattatttcacatgataattttttaggtgattatttcataaaaacgcagcactaaaaaccaatattcttaacataacataccaaatgaagttaatcataaaaataacgtaagatacaagactcaatctcacaacataaatggaaggcgtgaagggaagagatgcatgcttgacccctcttgtgccattatagattagagatcgatcgatgttgtgttccaaggcaggtgtgttattattacactcactcacataactctgtttgtaatatattaaagaaaatatatattgttgctgatccttcaagggaagaagaacttgaatttaattatagattgccaaagtgtaatgattgttcctacttcctacttgtgattctactacttcctaataatgccttaattaaaaaagtataggatgctaacaactaaaggtatgtgattaagtatcttatggaaccagatctagctactcaaattttctaattcgtaattaggcaaagtataaactcacactacaaaaaaatctaagtctagcatcaattttttaaaaaagttagtgttgcttttaaagtgacactagaattatatagtcattttgaaaagcgatgctaaattcagtgaagctaaaaatatttagtatcattttttaaatgacgttataattcatggttaacatcgttattttttggatcttgaaactaagcacaaaatataaacgaattttatttctgtttgattttgcataaaacattttagtaaaacaatcaattaatattatagatgctcaaatacttcaatatatttttgttattaaaatcatttattggatttagcttaattcggttagtttgattctgttagactaaatttatttagatttatacttggtatataaatttttacacggtttaatttgattggagttcgaattgatgaattttggtttgattcggattgattttttttggtccatccctagtttttatggtcaaaaacaagatcggtttagcaaaatctgaagactatttgggttttcattgaaccaaaagatttcaggaccatggaaacagagaaaaagtaaaaattatgttgggaaaaggtagagaaatcatgagaaatcatattgttcccttatgtaaatgtcttatctttttcacccaccagattattattatcaatcccaagcaacaaccactttatttcacatcaccttataaataccaactttcttcatagtctcaacaaatacactacactactcaacttataacctttctacactttcaagaaaccaaacagaagctgagttagagaa

SEQ ID NO: 13212 - DNA, 3000 bp, Unknown
  misc_feature (1)..( 3000): cDNA_ID_3028591_gDNA_ID_2214605_Annot_ID_187205 3000 nt of promoter + ATG
gatctaactagataagagtatgcaaaggtttaagtagattttattgaggcgattaaaaagatgtctatagattttacctcaacgggattcaaatattagattagtaatttataggattgattgataacatacttgtcattttttccgcataatttatggaattaagggattcaccaaactagtttttctaaagaattcaccacaactagctagtaccatcttgaaaaagatgcatgctggattcctaatttccatttggaaaaagtcatatgcatttttcttatggttatttacctttaaacaacaagaggaagaggatttgaataacttttgttttgacaatggattttaaatttcatctcattagtttgtttccttttatcgaaacacgttattaacttcttttctttttggcgaatgaatcataaacagttaaataagtttgcgtatagccgaccgtaaaaaggaaaccaaaccgcatccgcgtggatattttagtttggtaatggcaatggcaatgtcaatttttagacgtaacttagccagtggcagagtggtaatttctggtaaaagtacctatcaagtgagcccaaactgatgccgtgatccttaagagtatttcccaacgtaaagtgatgactgcacaagtcgagtcgttcggcgttttatgtgcgctggtcttgtcgttttgcattctttgtctttttcctcgttattttttttcttttagtttttagtttttaccaaagcgacgaatcgaatataaatgggtataatatcggtaccttccaaattaaacgtcaaatttcttttcactattctttccttgttcttttgatataaaccaaaaaattcatcggctgttatgacacttcaggtacgtctctttcacgtgtttggttataatataactaatgaattcacatgtccaagaaattgactatagaaacaattacgataaaaaagcttttggttgttggcgaaaacaaatagaaaataagtttttggtcaaatgtaagcaaccatagagaactatgaaagtcattgttaggaagcaaaaatttcatatggagaatgtgaagttcgttcatctgtaagaatttagttgatagaatggatgaaagatgagatttcgagctcaatcgttgttgcaatatttgagtgttatgttgcgattgcgaatggtgaaaaagaaccgcatttgtgacaatagttatattactcaccatatgatcgatcatattgctagtgtaacacaagtcacaaagccgattattcaagctcatcaacaagaacgtaaagaaccgactcagctcaatacatgacacggactacgatgatggattggtgagtggctcactcggccaaaaatccgtaacgtagtcatcaagtttctcaattccaaatcttttcaattacgtaatccaaaaacatatacattcattgtaaaaaccggttttttggttgaatacaatttacattcaattcaaagaaaaaaaacacaagtcacaaacttttttcgatagacttaattaacacagatccataaacataaatcttgattacggattagtgttatttcaaatttctaataactagatgaattcccacgcagcgcgtgggtttgttttgaaaattgtttagataaaaagatgttaattattttatcgctaatttatgtttattatttgtttgttattttatacttagtaaaattagactcatcttatgcacttacatttttattgttagattcatttttgactctaaatatcaatttctatatatttcatgtataatctgattatttttatatccaagattctaaaatttgttcattatcatgaacacaacagaatgtaagatatttggattttaagagttttcatatgaaaagaaaaaaaaagaagcaaaaattaaagagttatttttgtaacactttttagattttatgctattgcatatagccatataagacaaatggatttgttttgaatttcgtggtatgtctaatgtctcaaaagtctattacttgtaaatgttgaatgtcaatgttacgaacttacttaaagatacaaaaatgaaaagacagaatttcatatgataagatatgaagcataacgtaataataattaaaaaatcaaggtaaaataactaaactaatattaggtagcaaacaactaaactacaacacaaataactatttagtcattatagagtgatgaccattgaccattaaattttttaaaaaatagaaaataataaaagtaaaataaaagtagtaattgatttatttaaataaataattttataattttatttttattttgaaaaaaatcatgtaagaaattaattaatggaggatttaacacaatatgagacttttgattttctctcaattaattttgctgattttaatttaatcaatgttaaataatacatgtcattttcttgtgtgatgaaataattttataattttatttttattttgaaaaaattatttaagaaatgaattaatggaagatttaacacaatttgagacttttgattttctctcaattaattttgctgatttttaatttaattaatgttaaatgacacatgttatttttttgtgtgctgatgtgtcacttatatgtagagagtttgtcaactttgatatatatgattacaaatgtactcattggcatgatgaactatgaactatccatcggcttccactattcggcagaaaataagcccaagccccatattaagtagcccctctctcttttcaattatatcctattgggggaaaagcccaacaatatgggtcgcaaagcgggtcaaatatatccgactgaaatctggatccgttggtgaatcgtgaatcatcctcttcctcaatgcgagtggacaaagtgatctagcagagagaatcaatgaacacgtcttgccattagaggagaccaaccatttctctcctctctcttgaaaaatctataaccgatttctgcaatg

SEQ ID NO: 13213 - DNA, 3000 bp, Unknown; identical to SEQ ID NO: 13208
  misc_feature (1)..( 3000): cDNA_ID_2713264_gDNA_ID_2214605_Annot_ID_187204 3000 nt of promoter + ATG

SEQ ID NO: 13214 - DNA, 3000 bp, Unknown; identical to SEQ ID NO: 13207
  misc_feature (1)..( 3000): cDNA_ID_2994248_gDNA_ID_2214605_Annot_ID_187203 3000 nt of promoter + ATG

SEQ ID NO: 13215 - DNA, 3000 bp, Unknown
  misc_feature (1)..( 3000): cDNA_ID_2713272_gDNA_ID_2214605_Annot_ID_187199 3000 nt of promoter + ATG
tttctagaagaaatttttatttttaaaaagtttgactccagaatttaactttaaatctaaatgaacactttatgaagaagaaaaccaatagtcaactaatgaatatttttattttatttatacttttgtgtgaaaattatcaaaagaaaatttattgtgaaatgaggtgaaatgagggaataatatgcaactatttatttttcatttaaataaaaagaaacatttgcatgggttaaaaatatcatagtttttaccccagtgtagtacaaaaaaggactgtttatttggcatctaatttcaacatcatataatttaccatgggtttaacctatttcttgttttaccacaatcgtgtaatggaacccatctttcactaacgggcaaaaaaaagagtcaaagtgaaaagcagaaagtaaaaaaaaaaagataaaaaagatttaaccatggttaggtttgtatctggtcaagcatggtttctgatttttcgagtaaaaaatcaaaaatttgttggtacatgtcaaattatcgcggctcgtgatacgataaattgctaattttattattattagtgaagcaacaaatgaaacaaacaagttagttgcagttttttttaatcaaacaaaaaaacaaaatttatttatcttgaaaacaatttattatatattatttatattaaaaaaatgaaaaataaaaagagttataaagtttgtgtttgagataatctctctggtttgtttggttcttgtttctgtatacatcattactaaagagaaaaacaagatgtttatttattacgatggtcttgtccgtacctgattatagcatctctctctatctctctcttcttcttctacgatctgatcagccattaaagctttttcccccttcactattatacctcttttgaagtgaaacaaaatcataaaagtcgaaactttactgtttcctctgcaaatttaaactctaatctctctctctctctctatctctttcacttcgctttctctatttcccctgaaaccgttcttgtctctctctctctctctctctctcttcttctctgctcaagacaagaacttgatgttcatgtcttgaaacttaacaaagtattgatctttccttttaagtaaagaatttgggggttacacaacttcgtctagatggagcaagagaaaagcttggatccacaactatggcatgcttgtgcaggatcaatggttcaaatcccttcactgaattcaacggttttttacttcgctcaaggccacacagagcacgctcacgcgcctcctgattttcacgcgccgcgcgttccacctcttatcctctgtcgtgtcgtctccgtgaagttcctcgccgacgctgaaacagacgaagtttttgctaaaattacgcttttgccacttccgggaaacgacttggatctagaaaacgacgccgttttgggtctaactcctccttcttctgacggtaacggtaacggtaaagagaaaccggcgtctttcgctaaaacgttaacgcagtctgacgctaataacggcggtggtttctccgttccacgttattgcgccgagacgattttcccgcggcttgattactcggcggagccaccggttcaaaccgtgattgctaaagacatccacggcgagacttggaaattccggcatatttacagaggaacacctcgccgtcatctcctaaccaccggttggagcactttcgttaaccagaagaaactaatcgccggagactcaatcgtcttcctccgttctgaatccggtgacctctgcgtcggaatccgccgcgctaaacgcggcggtctcggatctaacgcaggatccgacaatccttaccctggattctccggtttcctccgtgacgacgagtcaacaacaacaacatcgaagctaatgatgatgaaacgcaacggaaacaacgacggaaacgccgcggctacagggagggttagagtagaagcagtagcggaagcggtggcgcgtgcagcgtgtggacaagcgtttgaggttgtttattatccacgcgctagtacaccggagttttgcgtaaaagcagctgatgttagatcagcaatgaggataagatggtgtagtggtatgcgttttaaaatggcgtttgaaacagaggattcttctagaatcagttggtttatgggtactgtctccgccgttcaagtcgctgatccaattcgttggcctaattcaccatggcgtctccttcaggttagttagttactcaaagtctcttccttttaacagaatccatgtttgtttgttaatgttacggttatattggttgttataggtagcttgggacgaaccggatttgttacaaaacgttaagcgggttagtccgtggttagtcgaattggtatcgaacatgcctacaatacatttatctccattctctccgaggaagaagattaggattccgcagccatttgagtttccattccacggtactaaattcccgattttctccccgggattcgccaacaatggcggtggcgagtccatgtgttatctgtcaaacgacaacaataatgctcctgcaggaatacagggagccaggcaagctcaacaactcttcggatcaccatctccgtctttgttgtctgatctcaatcttagtagttacaccggtaacaacaagttacattctccggcgatgtttctatcgagtttcaacccgaggcatcatcattatcaggctagggatagtgagaatagtaataacatttcgtgttctttaactatggggaatcctgctatggttcaggataagaagaagtctgttggttcggttaagactcatcagttcgtgttgttcggtcaaccgattttaaccgaacagcaagttatgaaccgaaaacggtttttggaagaagaggcggaagcggaggaggagaaaggtttagtggctcgtgggttaacatggaattatagtttgcaaggacttgagacgggtcattgtaaagttttc

SEQ ID NO: 13216 - DNA, 3000 bp, Unknown
  misc_feature (1)..( 3000): cDNA_ID_3028610_gDNA_ID_2214605_Annot_ID_187194 3000 nt of promoter + ATG
attactctagtatagttactttaatacttcaatgttgtatatgatcaatgtaccacgctaaatctattaaatatgtgatttatacaaaaatttacatgtgaactattttttaaaaaactttatctacccagagattagttttgaactcctccacaggtggtgaggatttatcttcaattaacaggaaaaaaaaagtttatcatcattcactctaataaatttatttctccagttttccatcttcattttttgaaagtaatatatattaaaacttgtaaattttaattttataaaatatttatattttacagtttataattgttattaagtaacgctataccacgaatccatgagacaattgttaaaatttttaagttttaacccctattaaaacagcatattaaacatatttcaaaattttataaatattgattcaaatacatctaccatataacccaattccaaaataaaacccgttctgtaatttctttacccgtcccgtggtttttttaaaaatagtaatttttaaaatttaagaattattttttatatataaaagttttgcaaattgtatcattctctaatacatttatattttatagtttaattttatatataataacattatacataccacataacatttttggttttatataaccttttctaaattaggatgatttgatatgtttaatattagtggtcttaaaatataataaattaaagatttaatccgtattgaaattgtggattaattatattttacttttttattaatgttgattcaaaaacccgtccctccaaatccgtcttgccaaaaagccatttattttattaatattaattttattaatgacatgactctgaattataatctaaacattttatctaataacaaatgagtgcaccatatttatttaataggagactgtaccatatgacccgaatgcacttttatccaaatccaccaaaaaagtcttgcaaaaatactatagagataagaaacgatagtcggttttgataggtataagattagcaactatataagttagcttaaattagttaaagaatacaaattgaaaagatatattacactttattcgaatatagtatcaaaacttatataacacagagatttgataattttttaattattgaatacattttttgtgctaatttttatgtgattaagatttaattgatttcgtatataaaatattaaattgttttacgaacttatttgtttataatttggtaacagatagatatttgaatattcagatctttgatgacccgtctttagatccaataaaccctataatctagttattaacctgcagtataccgcaggtaggcttatactttagttaaactaaaaacttttattgtaaagatgatttaaatatatatgatattattttatttgattttaaatgtatagtaaactgtgagttgtatatgttttgttgatattatctatattgtttagtgtttaagattatacacttgtagtttggttgttaatttaagagtttcacctgtagtatatcatcttgtattaatatcgatctaaatccgtccattttacgattttccagcttgtattaaaaattgaatcacatctaatatgttattaattactgtagtatataagattataaattttcaatataatatgtgtgaaattgaatagaactatttcaaattatgattcgttactcagtagaaagttttcttaaatctatttttctcccgttataatattttttcatgtattgaacagtttatattcgtttttaaaaatttaaattatggcatatgcgaaaaaaactctaattatttgtttataatgatgatattatttttcggcaaaaatagaatcatataaagatgagaagtgaactataataattaataaaaaattaatatgataatttagatattaaatctaatttgttgattttaattggttacttttttggaaattaataatgtatttcgtttttctaattaaattaaattaattaaaatttagatatcaaatcttatatgttaattttgattggttattatttttggaaattaataatatatttcgttttttaattaaatttaattaattaaattagtatttgactttttaatctttaaagagataaattaatttactctttaaaattttatttctaatggtatacccatgtaattacttacaaaaattaaggttacattttaaaatgtacttcccaaataatatagtaggattttattaatttttatttgtctttaaacaataaagcttaaagcaaaagtgaaaccaattacaaatttacaacagttgcgatgtgtctagaaaagcgaaaaccgattttaaccctataaggccagaccaggccaaggcctatcatatcaaaaagggcaaaaacgagtgaatttggacaaaatcgaaaccaccaatcagaaaatatatgtggttaaaactttgaacacatcaataaacacgaaaagggtaataacgtcatttccataaattcgtaatcattcgtcctcaaatctttattgtcacttttacaaaaaatactcccaatttcagagaaacctgttgaaaaaaaattcagggaaaattggaaaaagtgatgatgatgacgagagatcaattcaaatcttaagtcctccaaattttaaaaatttcgatctccactaccttcgtcatcttcctctacttctgattctcttttctgggtttgtcgtttaatgggttgattttgtatcgtcaaaacggagaaaacaagaagacttcttttggttttcttattgcgaagaagatatttctagggtttcgagattttctgggttttctgggtttttgtgtgttctttgattggatttgattattgggcaatttccttggaattcaagaaacttctaaggttcttaaagtgtaaagctttgtgattttctcttattcatacattctaggactttggttttggagttgta

SEQ ID NO: 13217 - DNA, 3000 bp, Unknown
  misc_feature (1)..( 3000): cDNA_ID_3028614_gDNA_ID_2214605_Annot_ID_187193 3000 nt of promoter + ATG
gaacgaatgaaaatgcaaaggttattattactactattttggggatagtgtttgggacttttattggtatcacattaccttcactttcgtttaaggtatgagttttgtttttcataggtccttttatgtgtccctttcatttttgcacctgttgaattttgtttcgtattcctgcagattaacttaccctcgcgccttatatcatctcttgatgtagccatatctggtgacaaatcccctgaagatttcggttcaagaaagtttcctgaggtatataataaacttcttgttcggttccctttcgttagcttttcgattatgttctagaatagtgcctcatttcagatgaaatgtatcgtttctgtatgtttgattgcagatatatgttccaactaacccgcgtggtgcagaactactacctccaggaatcgttgtggcgaaaactgatttttacttgcgtagattatggggagaacctaatgaagtattgacttctcattctatatttactttctcaatatatatggttttatctctgaaggccattagaatagttaatgtcaaaacaataacctttgcaggatttgaagaagaagccaaaatatcttgtgacatttacagttggatttgagcagaggaaccatattaatggagttgttaagaaggttctgcaatatcagcatgtgttttagcaagtattgttttatatattctttgtggatacactcagattttttgttttcttgtcatatcttcagttttctgaagatttccaaattttgctcttccattatgatggccggacaactgaatgggaccaatttgagtggtcgaagagcgcgattcatattagtacaagaaagcaaacaaaatggttagtcatctggtcatttaccggttattaagtatgtttgtcgagtatgtttttatcgaaattctctactggttttggcaggtggtacgcgaagaggtttttgcatcctgatgttgtgtcagcttatgagtacatatttatatgggatgaagatcttggagtggagcatttcaatgcggataagtaagttattacttgtctgaagtagcagaacaatcttatattttacattttgtgatggaattctattaaaacttcaggtacattgagttagttaagaagcatggtttagagatttctcaaccaggcttagagcctaacaatggactcacatgggaaatgacaaagaggagaggtgaccgggaagtccataagtaagatctccttctctaaccattcttctttgcctttctttcaaatttggttctgaattaagaaatgtgttgttacttactgttgaacagagatacaaaagagaaaccaggatggtgtaaagacccacatttacctccatgtgccgcgtaagtctctctttgaaacgttctctttagagcaactcaagagtgtttagtcattgtcagtactgagttttctgaaaaaaattccctctcacaggtttgttgaaataatggcgcctgtattttctcgagaagcatggcgatgtgtgtggcatatgattcaggttcgtcgatctgtagatacatagtcctagtcttagtccatcaaaataatgcttgttgttttgatcagtttgtttatgtttctgatgcagaatgatctggttcatggatggggtctcgactttgcgcttagaagatgcgttgaagtaagttgtttttgccccccccttgcttaccttaataacacaatattctcttgactgatgatgaaaatttgtgtgttttgcttttgcagcctgctcatgagaagattggtgttgtggattcgcaatggataatacataaagtgataccttcacttggaagtcaaggaaagtcagagaatgggaaagctccatggcaaggagtgagagatagatgcaaaatggaatggacaatgtttcagaaccgattggctgatgctgataaagagtatcttgggaagatggtgaaagattagatttgtttttcttttttctttctatataattaatatattaaaaaaacttttacttttgtatatcaaatattttacactaaattaggttttcataggacatgtgtgaagccctttttattgatattgtgtaagatttatacattttgattgagctttattatgttgtttgttactttctccatttcaaattcttagatgtttttaaaaagaaattgctttcactaaacaagagagaagtgaaacatgtaaaaaaaaaaaactttagaaaacaaaggtgtaatagaagtggttgttattacataatctttttgacttctgaaaagacaataagaaaacaagacttataaccagtttcatgatttatctatttcacccaatttcataaattggctattttatatttgctctcaataggtaacgtaaatggtagagaaattaaggagaagagaagggtattggtatggactttggagtgagtgtgaagctttacaccaaatccaaataatttcaattttcattttagtttctattttacaatattttgcccaatagaaaaagtatgagaaattcagtttcaccttcctttttgcttttagttcaagtcaattgtttgtccatagaaaaccatacaatgtctccctccattggctgtttcatttcagagtcttttttatggttaagaatttgctatcatatcattagtagaagtctcttatgaggaaaaacaaatattaagcaacatcattatagtttttctcatgtatcttgtgcgtaattatgtaaatgtcataattattaaaacatgaaattaggaagaacagaagtttggtgttagacaccaaccatttttatacaaacaaataataaaaatctcattatatcacctttgcatttcatcactcatcacattcacaatccttctctttttctcacatcaatatatatctctctttctctctcttcatttgatagatttgaagatttgagaggagagagaggaagaaaaa

SEQ ID NO: 13218 - DNA, 3000 bp, Unknown
  misc_feature (1)..( 3000): cDNA_ID_2702326_gDNA_ID_2214606_Annot_ID_135656 3000 nt of promoter + ATG
gaagcctctctcttttaccggttggagattgttttgttcaattgaattgtctttggtataaacccaaagaagacacgagcgtgacgggaaggaagatggcctcaagtgaccgtgatagtgatgttctctctttctctgggttggaaaatttaactgcaatgaaaggagaaatcaagatcacaaataggcaacgatgcgttaggtgtttccagcatatcatatggagtttcaaaagacaagaagcagaatcatatcaagcaacaattcaggtttttcttttaactaaagtaatgcgaaaagtattttggagtttcatctatatggtgatagccaattacgagtatgtaaaggagggacgtaacagatttatctgttagcctgtaaggcttccgatcggcaagcatggtcaattccacttctttatcgaaattgttttcaatttcttttatttgtgtcaatggttgtatatgagtggtttatatatcttgtaaaactttttatgatgtaatagatttgattgccggaaaaaaaaaaaaaaaaaagcttaacttttattcattatgagacatgaactagagtatatggctgttgttcctggagcatatcaaggaaacttaaaagacagataactaccaacccaaaactcaaacacgaaattgagagacaccaaaaatcatcacaagaatttgctttctctttgccttaaataaaatatgaaatcagttgtatacccaaagctatatatatagctctctaatggtcttatgatcagcaaatgagtatgtgtgtgcatgtctactacttagatgagtttctttttctcaaagaaagttttcaagtgccagaattgtagaccagccaccgataaacaaaccacaagcgacccgaaactcaaccacgccatcttcgagtttgtggatctattcagttcttgcatttcctcttccctactcccacaaaaccaaaacacaataacaagtattaattaacctcatcatatatctctctctcttccgaccaaacaaaaactaaggcttaaaaggtttgttctttgtctgttacctttcacgaagataatacatctcctcatgtatggaaataacagtatccatcaaggtcttaacctgatactccatcatctacaaaaacaacatcaaagatccaacaacaactaggtttagtaaataaacttttaaaatccacaaactctctacactatcttctctcattttcacattcaaaaccagacaaaaccctagctcctagcttacatgctcaaatttcatcaaaccaaacacaaactaaaaaaaccacttacatcaacttgactcttcttagccacattggtccactccttagagtgaacaccagtcttccaatcaaaatcaatagtcaacgtggtctccggcttataatcaatggcagtgatgcacgctacgtaactcccattttcataagcagtaaacgagaactgaccagcctctaccttatcggcttcgtgcaaattcttcccttgtggtggcatcacctacaataaccacaagataacaaataatgttttaaaaaaaaatctatcaattgtgagatttgcgatgaaatctataccttgacgatgatcttgtgagaatcaggaagaggatgattatcttcgttagggtttacgatgaagtatttaccaatggacatggcgttttcgtgaatctcctctccgatacatttcgttttcgaagactttagttcgtaacgcattgatagtgtcctaggagataacaacgcaatgatcaaaagcaaaatcgagcttcgacaaagatccatggcgtcaccagaaaagagaagagagagagagaaagagataaaatcttgcagtagtcaatgtttttttgccgtttagggtaagacaaaagagagtcaaagacgttctttgcacacgtgtaattatttaattggtgaagacacgttgacaagtcttctttgtcatgagcatattatgggctttgtatatggaactgggcttagttttgtaatgaactttcacttggcacaatatttgggcttacatagattaatatatccgaaatttaaattttaaattttcaatataggtccgaacattcatatttcatatcggattaggttagaatttttttgtatttggataattcggatgaaaaagtttattaaccattcggattatatgactattcggatttgtatggatttcaaatcagtttttgagaaaaaaaaactaaaaaattgtttaattttaatcaaaaatcgtttaattttactaaaatttggtttaattttgcaaaacaaagtaaaattataacaaatagaactaaaagaaatttggatattaaggttatagcgaatatttttgttatttagtattttttgggtataaattataactaaatatcactaatattttaagatatataattttatttcggattacagatatccattcggttttcggttcggattgaattcagttcggggaatttgggtagaagaattcatcatctgtttgggttttgtgactattcggttcggtttcggaaccggattttttggatcggtttttagatttcggattttatgcccagccatatatatatttttttataagctacagagatgatgatgatgatgatccaaaagagagataaagatgagatcaatctgttgggattttcaagtttttctaattttgaaaaataccatctttgcaaaaatttcgattgttttcgaataatcttatataaaagtaggtgtatttcttaagaaaaattcaattttctcacgggaaaagaaacataaacatatagaaaaaaaacaaaacttcgtacggtcgtatctgtattttttgtccgcacttgtttcggtcactaatttcataatttcggagaaaaaaatccacaaaagtttcaaacttttggcaaattaagcggtttttgttaggttttaattattttttccgatgatgaagcggcgatg

SEQ ID NO: 13219 - DNA, 3000 bp, Unknown
  misc_feature (1)..( 3000): cDNA_ID_2702339_gDNA_ID_2214606_Annot_ID_135661 3000 nt of promoter + ATG
catgtttttgttgttttctaacattttgcatcatccaaagtgaagtcttgctttctttgttttcacatactttaacgtaatgtatggcgaaacttccttaagaggataggctgcaagattgaatgaaactacacacttagaatttttgttttccttcctaagaatgtaagtattcataaaatgaaaatgtttatgttttacacgcgatacctaaggatttggtcccatgaccaaaaaaaaaaaaaattagaaatatgctggtcacaactctctttagtggcatttgctaaattgcattgtcatatcacggtgcaaagtagagatctccaaatctataactaattaataacctctggttttttaggccaaaaggatcgtctcctaaacaacaacttgtgaatccaagctacccaaagagcatatgcatatcagcatataaagaccgcattccttcttgcggtgcctcttagacccaatactcctttttctgcctcccctctgacaatcaactttaatcttgcatgcgactattggaaatgactctactttaaaggtaacagaagcttcaaggtctctcagagagcgtttaggtagtgtcaaaacagaacatcataacttaatggtgttgtgtatgaccaaaaaatcatttttaatctcccttcaaaagataatgtcttattgccaaatgcaatatcttatgcattttgacactcaaaaaaccttcatgtatttctccatcgactcggaattcgagcttgtgacctgattgttccaaatgcaatatcttatgcattttgacactcaaaaaacttcataacattttagtttttttaatcaaacatgaagcaacatatataaaacagaacaatacatcaagcataaactgtatcccactctatttctctttgatatttgtatatcttcttacatacacgtgaaactatatatgtctgtataataatcacacaacacatagcaaatgctcttctaatacatacatatatacactcgtctcgttacacgattcgaaccactcgaactctgcgtcgtgatgataacaactcgttcaatctcccaatttcaaccataagttcctttattctctacaaaatcacataatttccaataaaaaaaactttcttaagattactatagctctataagctcagaattagttaacacaaacctgatctttctctctgaggagaagaagcagaaatctcagtttctcttcatgtagccgtctccaccatctcacgagcttcacataaacaaggctcaagaccaacgagaagcctccaatgattgttaatgaccaaaatacccttttacgagttaggtaactacaacgcaccctttcgacggcctgaaagatgcacactgagttcttgattaatcgcttcttggtagtctcaatcactcgccacggaagccaaagattcacggtggaggggacaacagaatcttcatcatcgtcgttgatcgttggattttcacggcggtggcttggttgtaatatcggtgagtttggaggggtagatgcgtcagtacgtggggatttgggtgaggtttgtataacaactacccattcactgaattcttcttcttgctctgcctctgctctgttcataatttggataatgttctgttttttttttgttgttgttgtgttcaaaatattttcatttgctagttgagaacaaaatatctaatagaatgataatgacactattggtttctacactctcgtatttttatattcaaaattaatgattttcttatttataaattttaaaataaatctataaatattttagtagtaatataaacttcaaagtactttcagctgatatatatatatatatatatatattcatatttaataaacagattaattgtaaatgaaattttaaacaatcaacatgttaattaatttaattaaaattaatacttatacgcatgtttattatttcgtgctgtgcatgggtatgatcagaattaaattccatgcatgattatattattatatcattaacttatgttccaaacttttcttatacaacgtcttctctacattcataatttagataaaaacttaaaggtgaaaatggttccaagaatattgcatgaatggttaacatatatcggtaccttctctttgtgttttattttattatatatcacattacatatatataatcctttgtatagttctgctcttaatttatcttttatccttttcagcttcaaaagtttctgaaaaacttagcttccgaaaagcagcagaggaaccaaaccttcctattgctgctgctactactctgatatcacctcaaggtcgagtagactttgtctttatggacaatgaagcacaagagataagaaatgtttcgccgacatcacaagaacttccatcttcttctactacttctatttcacatagtaatgaacgatctaattctctacgatctatcgttattcagtaaatgtatatagattttctatcttatactacaatatttaaaattacaagataatatataaaaaagggtgatccttaaaacaatattttgtttgaactcaacggattttcctacatttttactcaatcatatacgtggaaatgatgataaaattatatcatatgataataaaattgatgggcttaaatatattatttggactttatattcaggacattgttttgcgtggtaaaaaggtgtgacccttgcaggatttagggtttgtaattcgtagtttgacagagacaaatccatcatatatattgagatgatactcatcaataacattgtgttagaagaaataatggtgagacttcccgtgaaaaccctaattggatttcaaagcgtgtctaaacactggaggtgtacgatagagtcgaagtctttcaaggagagattttgactttattaggaaacccaagaacccaaatttctcttaatctatgaaagcgagtgtgagagtcttgatatgaagact

SEQ ID NO: 13220 - DNA, 3000 bp, Unknown
  misc_feature (1)..( 3000): cDNA_ID_2702343_gDNA_ID_2214606_Annot_ID_135662 3000 nt of promoter + ATG
aaagggattttgcttagagggaagctgatgggtgtggaaggaatgaagacaaaagtgttggtgtgggttaaagtcacaacaatctcagtcgagagctccaagtctgacaagctctggttcactgctggtgtcaagaaatctcgatctaaggatgtttatgacacacctcatgatgctatcaaagtcattggagagttctaaggatttttttcacaattggttattatcatatttgattcatgaatttatttggggttatttgcattttgggaagaggtatacttaaaggaaatgtgtttatataactctcattttcctcctttatatgcaagaaatcacaaatctttatcaagccatagtaccgctaaatattactttgataatgatttttaatcggtagtaccataacaacaatatcaaaccattgtatagagtattgtttggtttcttgaattggtggtaataaggttccacatgttaaccgtaaaagatattgtttgtaccaacaatgggtctcaagatgccatcaccatggcctaggtaaattgtgataaacgtggaggtgacaattttatcaacctttaagtacataattttatgtgatgatcttcttcttctttttattttagctccccctagattgagctggcccaaacggccagacctaaacaatatttgtggctcatttttactcaagatttttgttaaccgaaaaaagaaaagctttaaatcataagattcttttttgtgcacccaattcataagatttaaaccactgattttcaaataaatatttggaaacttaaaaacaatatcttttaagtgatcttaccgagctcaaacttcacttttgctgatggtttagcaaactaagcgttttctttatcgcttaattttcattcgtttgttgtttaccgtatattgttaagccggttttgttggaggatactaatgggcacacaaactccagaaatgtccgattgtaattttctacattttttatttgaataaaacatagggggcaactgccttctatcattcaccaaaaaaaaattcactcttgctttgctttatgttcggctaaatatgaaactcacacaaaatctatcagtcctttttattgtcgtcatactcctttctttttttctataattgtttttaatagaaatgtgctgggccggccctgcaggctagattttaaaacatgaagctttgtactaagaatctgattttgcactattacacgatttactcctttcgtatattctctctatttttttacatattcgatttacacctttgtttccgtttctatgttttatagtgattttttttttttttttttcacatgttttatagtgattttttataaaatatttgcttggctttctcgatgtgataagtgaaagacgcgattcgttgtggcaatgaatgaaaagggccccatttgggtcctacagatattaaggatgtattgtctctttggcccgttttcaaagttacttgggccctccataaagtcaagttgtgttttcattttttgtttactccatcttctcacgtttcctctttcaccattttaccaaaaaaagttacttattatttaccaaatcaataaactccataaaatcatgacgagaaaaaaatataatccataaattgtttcatttaggacataaaacagctcttgtgagttacgattaggcttaaatcgaccataacttccgattcattttatgtatacgtggcgaaatgcaatttgtagaacgtggtgaagacaaattggttataacccgtcgagtcgtgcttagagctgctggttgacttgcgaggcacaaaccatcgttgtctcaagggacataattgtaatataacacattaaaccgacgctttttataaactactttcccttattagccaatcataactcaacgattactacaaaaatagacgaaataagacataatgaataaataaatatgagaaataaaaaaggaaatctgttagatccttgtcttcaataaaccactatatacttccaaaaaagttattatagcttatgcatttgtttttgggttaattcgctaaaaaaatcaaacatttgaagttttgatgttttttattctgtcttaaatttattatttattataaaatatgagaattgttatatagacgattttattatagacaattccttctgactctctttagatccacgacaaacgttacctttttctcattttctatgattttgatgaacactttcaatgattttccctgcgtaaaatcttgacgaatgactataattgtacatcgttggagatctcctgcatacttgtctctattaatctatcgaagttttgaaattttaaagtttgtgtataaaatgatacggtaaaaaattataactaaaatgaataattgattttgtgcatattttacaaataatatgatatcatgttattgtattttattacatgttattttgcaaagaaatctctatattttaattatcttccaaattaacttaaatgttttatgattttttttttgtttaatttcttatgtaagcaaccaatgcaaatttaaattcatgaaatactttactttcttttgtagcattcattacgatgtgtcattttttttgaaaatcaaaaattaataagaaaaataaaatggataaaatgaaaaagacagagagtttttactctatcatatctgcaccgcagactttatactgtaaacaaaattttattcatatttttcgagatctgcttgaagagacaaacacaagaaaatcacaaaaaaaatctctcccattaaaagactgcacaaagaaatattttatacaaaatgaaagagagaaacacgacacgaattttgtataattaagattacacaaaaaaaagtgttagaaagagaaatatcttcttcttttttctgtgtgagttgggtttgttaaagttttatcctttttgttctcaaaatcaagaatcgatg

SEQ ID NO: 13221 - DNA, 3000 bp, Unknown
  misc_feature (1)..( 3000): cDNA_ID_2702318_gDNA_ID_2214606_Annot_ID_135663 3000 nt of promoter + ATG
tttacttttatattacctaatgttttaacgatcgagtcaacatttttgcaataactcacacatacttggctggatttgaatctaaatgctaacattacgaaaccgcactaattctaaactccggtcaaaagaagcaactaaaagtaaatgataatgattttttagtctaatgaaaatttgtttcttgttagtttataattgcctttttccacgggattttcttgatgagttaaagggttacgtgataatttttttcttcttttaattttttgttaaaaggttacgtgatagactgctatatagttaatccggaatgttctataaatagaataatacaagttaatctattgcatgggaattaaattcctgccaataatttacttataagcatgtgaagtgtttcttcatttaataacttttgtttttcttgaatatttttatagtaaaaaaatttcttgataaaacttttttaatagttacttattgttttcttacaaatatttacgttgcgttttgaccaaaaaattgaaaaaagtttcctctgtaggtacgttacaacaaagatgggaatcaagaagaacaaagcaaaacccaaaagtgatggctgcatcagcaaaaatcacatgtgaccgatcccacactagttacgatctttgctccatcaacggctcatgtattctcaaccctaaaaccggaactctaactcttatggaccgaacacttaccacatcagcaccacttgtcgagaaaatcaggccatacccaagaaaatcagaaaactggatcatgcctaggatcagagagctaaaactaacttcaggcccatcggacctgacacgatcatgtgatataacacatgattcgccggccattgtgttcagtgctggaggttacaccggaagtatttatcacgattttatcgatggtttcatcccactttttatcacggccaactcggtatacccggaccgcgatttcatcctcgtggttgtgaatcctaaggaatggtggatgccaaaatacatcgatattctaggtacgtttagcaaacacaaaaccatattactagacaaagaaaatgcttctattacacattgcttcacttcagccactgtgggcctaatttcacatgggcctatgacaatagacccaacccaaatacccaactccaaatcattagtagacttccataatctcctagacaaagccttgaacccaaacctatctattatcaaaattaacaagcctcgtctcatattggtccgtagatatggtaacattggtcgagtgatattaaacgaggaagagatcagagagatgcttgaagatgttggattcgaggtaatcacatttagaccatcaaaaacaacgagtttgagagaagcgtataaacttataaagtcaagccacgggatgatcggggttcatggtgcagcattaacccagttgttgtttcttcgaccaggttcagtgttggttcaaattgttccggttggactaggttgggtgtctaaaacgtgtttcgaaacgccggctaaagcaatgaagttggattatacggagtatcgagtaaatgtggaagaaagcagtttgatagagaagtatagtagagatgatttggttttgaaagatcctattgcttatagaggaatggattggaatgtgactaaaatgaaagtctatttaaaagatcaagatgtgaggttagatgtgaatcggtttaggaaacatatgaatgaagcatacaagaaagctaagtcgtttatggacttaaacggttgattgatttttgtgttttatcgaaatgatttgtaagttttaagctgtaaaataatatgtttgtttattttttgtgtctatgtcactatgtgggtatgagagcaccattaattattggtagttgcttaggttaattcttagaaaagtttggttataaatttaatgtttttaatcatatatttgttaaaaaagtctcttatataagagacaaattgaagtattcttagttttcgtttcaaaaaattaaaaatcaattcataaaaaattctaagaactaagttaacagtaatctaagacactaacaataatgatgctttgatgttcttataaactgatatgatcttaataaagtgaaccaaaactaagacgaaattttatattttaaatcatttgtgtcatattggtgacctatagattggttcaatgatttttgaataatttttcataattgcgatgtaattagtgttgcttgaaattattgtcagcttcttatatgagttttttaattggaccccaacgcatctattttattatccaagtttatttggcgttgaaactaagcttgcacttttctttatcttctttctaccttccgaccataatttcatttatcagaaaaagacagatgcactttaacaaacaaattttaatgttgccaaattatgcattttttttaccattaaattttcatgttttacttattgttcctgttgattttgcttcgattgtaaaagaatatttgcttagatctacgagactgaaacgagttccgttgtaattcgttttatattttttaataataaattccggtagaactttctccgtctatttttcatttttcttatcaaaaaaaaaaaaaacaaattttaatttttattctatttttcaaataatcaagttttcaaagaaaaatggaaacttgaattttagtaatttcaaaattcattagacggttagagagtcttcatcattgtttaaacatttccttaatttgacatttagccatcaaaacggaaatttagttggaaaataaagtaaatgacgaagttacgtaaatgcccccggttctttcatatttcttcaaaacagtttttggccaatggagaaagaaaaattgagagtcgccacagctatcactctgctctgtcactttgtcttttactcagagaatcagagacagagagagaaagagagagagagagagcgaggggaagggaaatg

SEQ ID NO: 13222 - DNA, 3000 bp, Unknown
  misc_feature (1)..( 3000): cDNA_ID_2702351_gDNA_ID_2214606_Annot_ID_135665 3000 nt of promoter + ATG
cagaactctagcatagctcaaagcatctagcatccaacttagagatgttctgttggttttatacccatgtagatgtagttatcacttagcagttagcacgactgttcttgctatatacactgaaacaagtcaactttattcaagaatgctttgtgtataaatgcttctttgttcatcctaactgacttatccagaaaagccaagacaactaacttactgctattccattgtgctatggcctgcaatcttgctcagacctctttgcttcatcagatttctcacttctttagcctgattccaccgtccatccgatgcatacaaattagagacgagaacataataagaggcatcatcaggatgtaaatcaagcatcttcttaatcacaatctccccaagatcaaatcttgaatgcattccacatccgtgtagaaatgccccgaaacatctcacgtctggttggattggcatcttttcgatgatatctaaggcttgctcaagctcacctgctcgagctaacatatcaaccatacatgtgtagtgttttgttgaaggcgtgaagttataatctttgtacattgagctgaagtacttcttcccttcattaaccatccctgtgtggccacaagctgataaaatagatgtgaaggttgattcgttgggtttttgttgctttttcagcatctcctcaaatagctcaagggaccctattgtatccccttgctttccatagcctccgatcatagcactccatgtgattgtgtttttctcctctatagtatcgaagatgagacgggcagattggggatccccacatttggcatagaagtccaggagtgcagtaccaacatgaacactggatgatgccaggaaacccaatttcacggaataggcatgaagtgatgaacctacagctagagacccaagggaagcacaggctgaaaaaagactcgcaactgttacaccattaggcgtcacagattctgaattcatgcgatggaaaagaaacaaagcttcatggatagagccgttttgtgaaaacccggaaattatagaattccaagcaactatatctttctctgactccatttcaaacacatatttagcatctctattctggtaacacttggcgtacatgtgaaccagagcatttgcaacatttgtatcccaaataccaactttgatggagaggccatgaactgatcttcccagttcaagattctcaatcagaccgcaacccgataagacacttgcaatggtaacacaattaggcttgatttcaacccccttcattttctgaaacaagctcagcgcctcattcacacttccgttatgggtataccccacaatcatagctgtccacatgacaagatccacatgagaatgctcattaaacacccgacgtgcattgcttatgtcaccacacttaacatacatatcgagaagagatgtcaccaaacatgagctgagctctataccactcttaaccaaacaaccatgaaaccactttccttgatgtaaagcactaagctttgtacaagccattattagagtaccgtaagtatattcattacccaaaacattgttttccctcatccgattaaacagaaccaacccttcttcgcacaagtcgttcttaacatacccagcaatcatcgaagtccaacaaaccacattcctcaaagtaatatcgttaaacaccttatgagcactcttgatttctccacacttagcatacatatctagaagacctgtcaacacaacattatcgaaactcggcaccttaacgagctggcaatgtatcttcttcccattgtctaaatcctgaagctcagtacacgctttcaaagctttcgagaaaacaatatcatcatatctgaatccatgcttcatcaataaatcatacaactttacgacttctacactctctttattcaagcaataacatctgagcatgactttccataaataaaaatctggttcaggaatttgatcgaacaccaagcgtgcatctttagtatacccaaagaaaccatatagactaacgagcttggtggcaatcgagatatcacccatgagtccatttcccgttaaaactccgtgagattgccttagagaatcaatgttcgtgcacttacttagaaggagaaagcacgggctcgaagcggcgtaatgcagagaagacccatcattctcttcagtcaaaatcaattctttgatagtcgtaaaagagacgcatctcggtggaaacccgaatcttctagtcggagaaagagtgatagagcgtagcattgatcttcttcgccgttcacaacttaccggcggcgtggctttcccgccaggttgttggtctcagcgttttgtaacgaaaaatctgaatgggccttaaatgggcttataaagatctaaagccgttgatgtgtttcgcaactacatataacaaaaaatcacaaatcgtaatcaagatttcataatttaatcatgttgagctggagaaaaaaatcatggcataaaaacaattgattctataaaaaaaactatatcttttgtttgttttttctagtttttgtctctttcactatttaatatttgataaattataatatggcaaaacaacaaaacaaattgtaaataaatagctgtaaacgcacactccaattgtcaattgaaataaattattaattaaatgttatattttaatattataagacatataattaagaagttacattttttacattataagcgtcgataataagacgtatcattctctttttttatttgctaaaaatgttaatatttggttagaaaatgaaaaagttaagagttacaagaatataaaatttatagtttggtcctatggtaaaaaagaataaaaactatgaaagcaaatatcattcggtccattgacataaaaaaaagtaattaagcttctggaatcaatgaagcggtacaaaaattttgatgaatcgcatataaaacatctcaaagaggaagataatg

SEQ ID NO: 13223 - DNA, 3000 bp, Unknown
  misc_feature (1)..( 3000): cDNA_ID_2994508_gDNA_ID_2214606_Annot_ID_135667 3000 nt of promoter + ATG
tagcaatctcattcataaccaatgctttatcagtttcaaaacctacatcttctttctcaggtttcaaatcagcaaacaaacgaagaatcttggtccgattcgccacgagaatcgccacgatatcctcaggtttgttctcgtttgccacaaagagtttaaagatatgaaatgcttctaactgaatgttcttggttggttctcttaaaagattcatcatgattctcaaattatccaaactgctcacatactttaccatcacacctgaattcgaacgatccatcaacacatctccaagcaatttcgacgcttgtctcttcgtaaaatagcttcctttctccaacaacttggtgttatactctgcgaaaaaccattcgtagttcttcgcaagatactccgctacagtcgatttatgcctcgtcaaaagctctctgaagatcttgctagcatcggtagctacatcgaaatacggaagctgaacataatcgaaaaacttctccaaattcttcgattcgagtatgtactttgcaacaacctgatgccgcacacattctttaagcattcccgtgtaatgcaacgccagctcatggtcgtgatcgataccttcgactaacgaatcgataacatctaagttcgattcaagatattcagaagcaacgagtcgaaattcgacttgttgcttctgaagattcgcgacaatctgtgtcgcgtcttttcttgcttctaggtcaagttttggtatagatttgatcaaaggacgaagcgtgtctgctcggaaaaactcttgagttaacaaaagacaagcttcaggaacaggctcagcttcaccattaccataaagaatcgatttcaaatctctaatgtttcgacacaactccgcacaaatccctaaccttttcgagtttctcgcatcggtttcttcttcttcggattccgctaaagcgatgagatctcgagtctgacgtacgatttcaccaggaagacgtgatttgttcttgaagagacctttcattctcgtgcttcctccatggtttccgaggttcccgcttaaactgctaagcttcccgctaaatgtgatgttgatgatggattcatcatcggtggatccgacgcgtagatggctccgtgtacggcggtgctttgacgacggagctaaatcggagcttccgtgtcgtttagcaccaccgattatggagacacacgcacctatgtttctcctttttgttgacctcaaaacaaagtacaaaaagaaaaacagagcaaaaacaaaatctatgcctttctctatctttttattctagggtttgttcaaaagctttttcaggggtttcgctgtgaaatccaaaaatgttgtttctatgaaatcttcttctttgaagaaaggaagaagaaagagacaacaaaacctaaaaatggagtctttgattggctaattttgccgcgctgaattttcgttgtggttagtttgaagaatctttgatgtcaattagatattaaacaattttttgaagcttattattctacacagtccatatctctagtcaactaattatctaattatgttttctctaaattaataattcttcaaaattttaatattttaaaattgtgtctattcattaaaagtcttttgttttcatactttttcacaaatagttgcattttttcaccacaattgttttgctaattatgtttggagttttttgttatatcttaattctcttttagattattgcatatatcatatgtttatctaatactcatgtttttaaaaaggttttatctatttttctttataattttagacaattaccaaatttttcatgaaatttatttttagaatgtatattcatatatatgtttgatttttaaataactacattccttctatactttcaaaactatttattagcttatatcatattaaatttgaaaaaattcacggactcaacaaattttgcagatagagaatgagatcacgtatgatgcagagtgatctcgactctctatctacgaaaattgatcttagcttgaaagattatggatttctctatataagaagacatgtgacattcagttgagcaccatattgtaggcatgaaccaaaacttaacttacttagcatagattgttgatgtgtgtttggatatgtatttatttttttcgtaatcggcttgtctccttcagccgtatttcttttccaaacattgggcctttatgaggcctaaattgggccttagagcccaaggagagttaaaaacaataaataatctatccagaggcattaagtttcaacgaaaaagaaagaaaaatctgtgaggacgaaaactctccgtcgttccggcgagtttctccagtgatcggcaaagtctttccggcatctattgaatttctctaaaccaattagtaagtctcttgaaatttcaattcaacaaacgttttgctgtctactcgaaggttttgactcgtgtttcgatttcaattttgaatcttagacaagtttgctatctcagacaagttcttgttgagttttgtaggaatattatcggtcttgataaaataaaatggttcaaagtcagtcgttaagcacattaacaatctgtggaagtgtaaaagtttcaagcttgttgaggaatcgtttaaattcagtgaaagcttcaagcttgatcggtgatcgatgtgtttcgtgtcagtttttgcgtaaatcaccgtcctttagaagccattggaagtcattaaagcaaagaaatttgttgagggttgaagctagatggccatttcaaggaggtggtgaacaaggtttagacccgagctctgagagaagcgagagtgctaatgaagatatattgatctttttctttcagctggatttggctactcgtgtacaggttaagactaaatgcagggtttttatctctttcaagatggttgctaatggttttgatgtgttacaatattgaatgatatgtggattggtgtgttttgaaatggcagtatgcaatg

SEQ ID NO: 13224 - DNA, 3000 bp, Unknown
  misc_feature (1)..( 3000): cDNA_ID_2685803_gDNA_ID_2214606_Annot_ID_135670 3000 nt of promoter + ATG
taaataaataaatcatgtatttgaacttatttacaatgtcatgctactgaaattaattatttagaaagaaaaatatttaattaacgatttaaatcttctaaatctttgcttttagagttattatgtcattatctaaaaagcaaaaatattttaaaatatttatatatttaaactttataaaacattattaatatttaaacttataaaaagtttaatatatcaaaaattttaacatcattatataatatatagtttaaaaaaatctcaaaaaaatttccgtcatattttgtgattaaaatttttaaaaatgaacatatattaaccaattggcgaaaaaatgtgtgggttcaacatcccgcatcgactaaaatatttagacaatgattcataaataagatcaacattaataaaataaatggttttttttgcagaacgggttttgcgagacgggtttgggaggacgttacttaataacagttgtaaactataaaataaaatattttatagatagatacaatttacaaatttttatatatactaactttaaaaaataaattgtccccgcggtataccgcgggttaaaatctagtataattatattttctaaaatattaattatttttggatcaaataaaataattaaaaatacctgaaaatagataaagtagtaaaaatactcaaaaataaccgaaaatgtccgaaaatatccaaaaataaccgaatatccgaatatattcaaagcaaaataaccgaatgaatactaaattttgaaaccaaaagaaccaaaaccgatagcgaaacaaaatttcaaaataagcgaatgaatactaaattttagaaaaataaactgaaaaccgaatgaatacgaactgaaagcggatagataaaccaaacgcaagtcctgagattgtgtaaaaggcccataaacgggcccaatatgcgaatccattttgttttcttgttgggaaattaatctttttctgcttattttaggagaaattgttttaattttaatttagggtctcttgtctttgatcttttgtacactttctctggattttctgaattcgaactttggaagaagaagaagctttgatcaatcatggaaattgcaaccgatacagcaaagcagatgagagacgaagagttgttcaaagcagcggaatggggagattcatcgttgttcatgtcattatctgaagaacagctctctaaatctctcaatttcagaaacgaagatggtcgctctctcctccatgtcgctgcttccttcggccattctcaagtttgttcctttctcttttcaatcatattaagaactaatctgtggttagataacctctttgattactatagctgcagtaaataggttgtttaactgatgagaaagccttaagggaagtttttgagtctcgctttgaaaaccacacgaatctgcgttgtttgggttcttgagattagtgtgttttaggaacagtgtcagtatgtgtaaaaatgtttatggatgtgggatttgcagatagtgaagttgttatcaagttcagatgaagcaaagactgtaatcaatagcaaggatgatgaaggatgggctcctttgcattccgctgctagcatcggtaatgctgagctcgttgaggtgcttttgaccagaggtatgttacataatcttatgtgccttattgttgttgaaacggtggtaaaatcttgttttgctatcataaagctgtaatctttatcagtcctgagtagttgatctcttaatatctaatagtcctccattggaattggacatataagttcctactgtgaagtagttcttccagtgtttagctctaacttcaattcattgcatgtatgagaagatggatacatttgatgacattttctttgtgtttaggtgctgatgtcaatgccaaaaataacggtggtcgcactgctcttcactatgctgctagcaaaggccggttggagattgctcagcttttattaacacacggtgcaaagattaacatcacagacaaggttttgtagcttcttaatgtcttgttgcttgtgatcatcaacacacaaacaaacttttttttgtgtggcttttaggttggttgcactccgcttcacagggcagcaagcgtgggaaagttagaagtttgtgaatttcttattgaagaaggagcagagatcgatgctacggataaaatgggtcaaactgcactcatgcattcagttatctgcgatgacaaacaggtaaaattttcaatctaatcaaccttaaaagcaacatttctttaaagttaaaagtttccatggatcaggttgcgttcctgcttataagacatggtgcagatgtggatgtagaagacaaggaaggctacactgttctaggccgagctaccaatgaattccgacctgcacttatcgatgctgctaaggccatgcttgaaggataaaatgactctggattactttaaaacttactaactctgagagttgtttagttacttaaaaggatttttctttactgtatcatgtttgcaaaatgtttctgccttatcaattcatgttctgtctttagaaattttctcaaaagcaattttggaaacaagtgagaaaaaagtttttttttttgtttggttaaaaattatatatatccttcttatctcctaagagtcacttaccctcctcacaaaaatctaaaggcaaaatgatgcaaacaaaaatctcttctttctctcgaccaagctttagtctctatgaaccaagagtaattcatcatcctcgtatctccatggctctatcatcatcagcaccatccccgtttcaccatcttctctgcaagtccaccttccctctcgctgcctcactcacccttctcctctctccttgtaccggtaactacactactactcaatacttttcctgtgattcaatgtatatgcgtgtcatcatcatcagcatcatatgtatatgtatggatggtcctcagctgaagcaggcttaatg

SEQ ID NO: 13225 - DNA, 3000 bp, Unknown
  misc_feature (1)..( 3000): cDNA_ID_3028664_gDNA_ID_2214606_Annot_ID_187239 3000 nt of promoter + ATG
ctcaatgccattagcattaattttttttttccgaaataattaattttactttaaattcttaatttaaattgtcaaccacattatcaatcaaatttaatccaaacaaacttcacatcaatcccttaaaattagcataaacgtatttgttaacaatattttaaaacaaagttttttgtttaaataaatattattcttactaaacgttttttgtttaaataaataaatcatgtatttgaacttatttacaatgtcatgctactgaaattaattatttagaaagaaaaatatttaattaacgatttaaatcttctaaatctttgcttttagagttattatgtcattatctaaaaagcaaaaatattttaaaatatttatatatttaaactttataaaacattattaatatttaaacttataaaaagtttaatatatcaaaaattttaacatcattatataatatatagtttaaaaaaatctcaaaaaaatttccgtcatattttgtgattaaaatttttaaaaatgaacatatattaaccaattggcgaaaaaatgtgtgggttcaacatcccgcatcgactaaaatatttagacaatgattcataaataagatcaacattaataaaataaatggttttttttgcagaacgggttttgcgagacgggtttgggaggacgttacttaataacagttgtaaactataaaataaaatattttatagatagatacaatttacaaatttttatatatactaactttaaaaaataaattgtccccgcggtataccgcgggttaaaatctagtataattatattttctaaaatattaattatttttggatcaaataaaataattaaaaatacctgaaaatagataaagtagtaaaaatactcaaaaataaccgaaaatgtccgaaaatatccaaaaataaccgaatatccgaatatattcaaagcaaaataaccgaatgaatactaaattttgaaaccaaaagaaccaaaaccgatagcgaaacaaaatttcaaaataagcgaatgaatactaaattttagaaaaataaactgaaaaccgaatgaatacgaactgaaagcggatagataaaccaaacgcaagtcctgagattgtgtaaaaggcccataaacgggcccaatatgcgaatccattttgttttcttgttgggaaattaatctttttctgcttattttaggagaaattgttttaattttaatttagggtctcttgtctttgatcttttgtacactttctctggattttctgaattcgaactttggaagaagaagaagctttgatcaatcatggaaattgcaaccgatacagcaaagcagatgagagacgaagagttgttcaaagcagcggaatggggagattcatcgttgttcatgtcattatctgaagaacagctctctaaatctctcaatttcagaaacgaagatggtcgctctctcctccatgtcgctgcttccttcggccattctcaagtttgttcctttctcttttcaatcatattaagaactaatctgtggttagataacctctttgattactatagctgcagtaaataggttgtttaactgatgagaaagccttaagggaagtttttgagtctcgctttgaaaaccacacgaatctgcgttgtttgggttcttgagattagtgtgttttaggaacagtgtcagtatgtgtaaaaatgtttatggatgtgggatttgcagatagtgaagttgttatcaagttcagatgaagcaaagactgtaatcaatagcaaggatgatgaaggatgggctcctttgcattccgctgctagcatcggtaatgctgagctcgttgaggtgcttttgaccagaggtatgttacataatcttatgtgccttattgttgttgaaacggtggtaaaatcttgttttgctatcataaagctgtaatctttatcagtcctgagtagttgatctcttaatatctaatagtcctccattggaattggacatataagttcctactgtgaagtagttcttccagtgtttagctctaacttcaattcattgcatgtatgagaagatggatacatttgatgacattttctttgtgtttaggtgctgatgtcaatgccaaaaataacggtggtcgcactgctcttcactatgctgctagcaaaggccggttggagattgctcagcttttattaacacacggtgcaaagattaacatcacagacaaggttttgtagcttcttaatgtcttgttgcttgtgatcatcaacacacaaacaaacttttttttgtgtggcttttaggttggttgcactccgcttcacagggcagcaagcgtgggaaagttagaagtttgtgaatttcttattgaagaaggagcagagatcgatgctacggataaaatgggtcaaactgcactcatgcattcagttatctgcgatgacaaacaggtaaaattttcaatctaatcaaccttaaaagcaacatttctttaaagttaaaagtttccatggatcaggttgcgttcctgcttataagacatggtgcagatgtggatgtagaagacaaggaaggctacactgttctaggccgagctaccaatgaattccgacctgcacttatcgatgctgctaaggccatgcttgaaggataaaatgactctggattactttaaaacttactaactctgagagttgtttagttacttaaaaggatttttctttactgtatcatgtttgcaaaatgtttctgccttatcaattcatgttctgtctttagaaattttctcaaaagcaattttggaaacaagtgagaaaaaagtttttttttttgtttggttaaaaattatatatatccttcttatctcctaagagtcacttaccctcctcacaaaaatctaaaggcaaaatgatgcaaacaaaaatctcttctttctctcgaccaagctttagtctctatgaaccaagagtaattcatcatcctcgtatctccatg

SEQ ID NO: 13226 - DNA, 3000 bp, Unknown
  misc_feature (1)..( 3000): cDNA_ID_2994508_gDNA_ID_2214606_Annot_ID_187237 3000 nt of promoter + ATG
atgtaacagagccaacaatgtgcaaatcttgaaactttacatatacccttttggtcttataagatgtaacattgtaacatgtaacattggttttggtgttctgttttggttaggaatgaaagagagattcaagacaaatattgtctgagaggagcagaatggggagtaggagattgctcaaccacaggaatgacagatgaagaaaaggagaaattcatcacaatgttgaaaaagaagactggtgttgaataaaacacacatcattgtatttttttgtttgcaagaatggctttagagagaatcatctatgctaattgtttaagtcacaatccaaatccaaatggttacaaaacaaaaatacatgtaggcatcgtgtacaaacaggttttttctttttcttatcgatctgcggttttgatatcgagaagagaaagtgtagcaatctcattcataaccaatgctttatcagtttcaaaacctacatcttctttctcaggtttcaaatcagcaaacaaacgaagaatcttggtccgattcgccacgagaatcgccacgatatcctcaggtttgttctcgtttgccacaaagagtttaaagatatgaaatgcttctaactgaatgttcttggttggttctcttaaaagattcatcatgattctcaaattatccaaactgctcacatactttaccatcacacctgaattcgaacgatccatcaacacatctccaagcaatttcgacgcttgtctcttcgtaaaatagcttcctttctccaacaacttggtgttatactctgcgaaaaaccattcgtagttcttcgcaagatactccgctacagtcgatttatgcctcgtcaaaagctctctgaagatcttgctagcatcggtagctacatcgaaatacggaagctgaacataatcgaaaaacttctccaaattcttcgattcgagtatgtactttgcaacaacctgatgccgcacacattctttaagcattcccgtgtaatgcaacgccagctcatggtcgtgatcgataccttcgactaacgaatcgataacatctaagttcgattcaagatattcagaagcaacgagtcgaaattcgacttgttgcttctgaagattcgcgacaatctgtgtcgcgtcttttcttgcttctaggtcaagttttggtatagatttgatcaaaggacgaagcgtgtctgctcggaaaaactcttgagttaacaaaagacaagcttcaggaacaggctcagcttcaccattaccataaagaatcgatttcaaatctctaatgtttcgacacaactccgcacaaatccctaaccttttcgagtttctcgcatcggtttcttcttcttcggattccgctaaagcgatgagatctcgagtctgacgtacgatttcaccaggaagacgtgatttgttcttgaagagacctttcattctcgtgcttcctccatggtttccgaggttcccgcttaaactgctaagcttcccgctaaatgtgatgttgatgatggattcatcatcggtggatccgacgcgtagatggctccgtgtacggcggtgctttgacgacggagctaaatcggagcttccgtgtcgtttagcaccaccgattatggagacacacgcacctatgtttctcctttttgttgacctcaaaacaaagtacaaaaagaaaaacagagcaaaaacaaaatctatgcctttctctatctttttattctagggtttgttcaaaagctttttcaggggtttcgctgtgaaatccaaaaatgttgtttctatgaaatcttcttctttgaagaaaggaagaagaaagagacaacaaaacctaaaaatggagtctttgattggctaattttgccgcgctgaattttcgttgtggttagtttgaagaatctttgatgtcaattagatattaaacaattttttgaagcttattattctacacagtccatatctctagtcaactaattatctaattatgttttctctaaattaataattcttcaaaattttaatattttaaaattgtgtctattcattaaaagtcttttgttttcatactttttcacaaatagttgcattttttcaccacaattgttttgctaattatgtttggagttttttgttatatcttaattctcttttagattattgcatatatcatatgtttatctaatactcatgtttttaaaaaggttttatctatttttctttataattttagacaattaccaaatttttcatgaaatttatttttagaatgtatattcatatatatgtttgatttttaaataactacattccttctatactttcaaaactatttattagcttatatcatattaaatttgaaaaaattcacggactcaacaaattttgcagatagagaatgagatcacgtatgatgcagagtgatctcgactctctatctacgaaaattgatcttagcttgaaagattatggatttctctatataagaagacatgtgacattcagttgagcaccatattgtaggcatgaaccaaaacttaacttacttagcatagattgttgatgtgtgtttggatatgtatttatttttttcgtaatcggcttgtctccttcagccgtatttcttttccaaacattgggcctttatgaggcctaaattgggccttagagcccaaggagagttaaaaacaataaataatctatccagaggcattaagtttcaacgaaaaagaaagaaaaatctgtgaggacgaaaactctccgtcgttccggcgagtttctccagtgatcggcaaagtctttccggcatctattgaatttctctaaaccaattagtaagtctcttgaaatttcaattcaacaaacgttttgctgtctactcgaaggttttgactcgtgtttcgatttcaattttgaatcttagacaagtttgctatctcagacaagttcttgttgagttttgtaggaatattatcggtcttgataaaataaaatg

SEQ ID NO: 13227 - DNA, 3000 bp, Unknown; identical to SEQ ID NO: 13221
  misc_feature (1)..( 3000): cDNA_ID_2702318_gDNA_ID_2214606_Annot_ID_187233 3000 nt of promoter + ATG

SEQ ID NO: 13228 - DNA, 3000 bp, Unknown; identical to SEQ ID NO: 13220
  misc_feature (1)..( 3000): cDNA_ID_2702343_gDNA_ID_2214606_Annot_ID_187232 3000 nt of promoter + ATG

SEQ ID NO: 13229 - DNA, 3000 bp, Unknown
  misc_feature (1)..( 3000): cDNA_ID_3028674_gDNA_ID_2214606_Annot_ID_187231 3000 nt of promoter + ATG
tggtcattgcaatatatctgatgtttatagtttcttgtatctttagcagatctttagcagtagttaattattacgtttagaactcttcacatgaaacaataccaaaatcttttgatataattaaaaaattagtgatgaagtcaagtcactataatcatatttcactaaattgtcttaattatatttttttaaacatatgtttataaaagttttatcgtatctacaactcttcatgatatttttggatacagttttaagaaaaaacaaacaacataatgatatcatagttcactaaattgtctaaattatgtatatatttgtttttggtcaaatgtctcaattatattttgtatatttttttttttgctcaaatgcctgatgatataaagcaaataaatattctcagcattgaacatataaattccgataaatatcacaaaaataaaaataatcaaatatcttatatcggataagaaaatacaaaatcagtcagtacaagaaaaaaaattaggtccaaaaagtttttatagaacacaaaaaaaattattataggtttgatccgatccgatttgacccgactcaaccttacccgaaatacaatatcttgaagcatgttttaaatgattaaaataaaaaagaataataaaaactaaagagagtaaaactcaaaacaaaagtttttttattgctttctatttctcttctcttttctttgtaacttataaacgaatgaatgaataaaatgaactatatataatagagtttacttagttagaaaataaattaattagcgaaaaaataataaataaatatcatccatattttagtgaagaagtaataaataaacatcatacatatttgaaataattactagaatagaacacaattgtatgtttattcctataatagaacacatcttttttttttattcgtatgttttcagtacttgtgtaattacacttaatacccttgattagttttaattaaatattattattaaattcgtttctaattaaaaaataaataaaaaaacagtgattatccatgtcatcagttcatgtcatttaccctaatccacgtcatccgaaaccaaaaattcccttaaaactttcagtttctcattttttcagcacatcttactgttcatccgcgcaaaaaaaaaaaaaaaaaaaaaaaaaaaaaaaaactgtcgctctcttctctcgttcagtcgacggaaccctaatttcatcgccgttctctacttatctcgtctctttcggccgaaactctttcggtggtgtcgaatttcaagtcatcaaaaatcgaaacccaaatcaaagagatctatggaattttatgtgatttgttacaggttttagttgaatcaagaataactactcttttactttgattttatatgtctatcgtttagttttcctctcaatcgatctatttagaaatatttctacttctatcaatgttttgattcatatggtttcgtcttcctcctatgtatccctcaaacagattattacgtttcttaatttgattgttgttatttggccaataaatttcatattgtcttccccagaaaaatgttgctttccgatctgtattataaatcagccgtaaagtgatgtaactcagccgtaacgtgatgtaactcagccgtaacatataatttacacaaccattcgtctttcctaaatgataactcagccgtgacatgtaatttaccgaacctttcgtcttccctgaagcatataactcagccgtaacatataatttacactcatctttcgtttgcccttgaacatataactcagccgtgacatgtaaatttatagatgtcttcccttaaacatataactcagtcgtaatgtaattttaccgaacctttcgtcttccctggaacatataactcagccgcgacatgtaaattgactgaacgtttcgttcttccttaagcatataactcaactgtaatgtaattttatcgaacctttcgtctttcttggaacgtataactcagtcgtgacatgtaaattgactaaacctttcgtcttcccttaagcatataactcagccgtgacatgtaaatttgtcgtgaaacaataagagatacaacattttgtctaactttatcatcgagcaccaacttcacaaatttgtcgtgcgttgttttcgcatctatctgcacaagtttacaccctctttcattagtgttaaatatgtatttttgtttctatacccaattcctggaaacaacaattaccaaaactagatcaaccatatcgggagaaagatgaaagaaattgaagaaaaatgaggaaaacgatgaggaattagaagttccggtgatgtgaaaaactcaagtgaagaagacgagttgaaaaaattttaccctatttttttatcctttgatgatgcacatggaatgatgacatggaatattacagccgacgtcgttttgaattgatgaggtggcaactaagccaccaaacgaacatttgataactcagccatcaagcaaatctatacgtcagtcgcaacatgaatactattacagtaattaaaaaaggaaaaaaaataaagttaagtcagccgtgtaatgtcgtaactcaactaactcaaccgtaacgttcaacaactcggccataactgcatgatattatagtaattaatcttttaaaaataagtcagccataacatggctgagttatatcgtaatccagctattggcggctgatttatatcactcgaccataactcagctgtcacatctttccataactaagccaatcaaaactataactcggccgcgtcgaggaaataagtcagcctttttctcataactcagccatattgttggctgggttatcgtataacttcttataactcggccgaacatccttaactcaaccataccgttgtctgagttatactataactcaggcaacatttttcaactcagccgtaacgtctggctgagttatacttatacttcgccgttttgtt

SEQ ID NO: 13230 - DNA, 3000 bp, Unknown
  misc_feature (1)..( 3000): cDNA_ID_3028680_gDNA_ID_2214606_Annot_ID_187228 3000 nt of promoter + ATG
gagacatttgaccaaaaacaaatatatacataatttagacaatttagtgaactatgatatcattatgttgtttgttttttcttaaaactgtatccaaaaatatcatgaagagttgtagatacgataaaacttttataaacatatgtttaaaaaaatataattaagacaatttagtgaaatatgattatagtgacttgacttcatcactaattttttaattatatcaaaagattttggtattgtttcatgtgaagagttctaaacgtaataattaactactgctaaagatctgctaaagatacaagaaactataaacatcagatatattgcaatgaccaagcttaacatcaaattcgtgagtttgtgtgatgtttctttaaaatgattgtggcgtacgtatcgagttgccattttttacatgagacgtatagtctcaatatagattgatccaaaatttactattttttagtcttaattaacttagataagatattttaatggttatatgtcctctgttctaaacacaatctactaggcatcaatcaacattgttgtataagctacgtgtcttcaaggttgagtcagtgaggaatattttggctgaaaccaaatctggtttattgttatatttgacatgattttgaagtgttgtgtaataattttagtattgctctccgtaatctccaaatacatagtgtgatcatgtttactcactctagttctttgccattctcatgacctaattttttttattaccaatgactaacttagtgtgatcatgtttttactcactctatttctttttttgttaaaggggtttcttgcattagaattaaaagaaatcaaagtttacataggagccttaaaccatagacttaaaacagaacataagaagggaggaggcaagcacaaatgctagataaggagagaagaaattaagaattgccgagagaacgtatgcatccggttcccattccagttccaatgcgtttttgatcctccaaaagtgttgtttgccattatctcctttcatatttgtaatccacagatagtcatttccattgatcatactaatatcttcaagacatgacgcctgagaaagaatactaagtttgatgactcgaaacatctctgtgtgaagattataggcaagaaccatcttattttgagtgcgacaataaacccatccctttgcacatattgttccttcttcatctatgtgtaaatcatgatcataaggcgtataatctatcacctacctccatttcttgacctcaaagtcgaaaacctcgcatgatgagatgttgttacttttgtcatcatgtaaccaaactagtttgtacgttcctgtaacattgtctttaccaaatcctaggaaagggaacacctttggaagtggcatcttattgtccaaatactttagctgagtcatggaaagagggaggttttgagaccgtcgcatagatgggtttgtcacaataattggacttatcaaaatgtcgtggtccaagatgcagacaagcccgtcgcaactacccataactctgacacgttccttgaatcgatgttggatgtgatgaaccgggccttcttcgacagctctagtagaagaccactcaaacctcatagtcttcatatcaagactctcacactcgctttcatagattaagagaaatttgggttcttgggtttcctaataaagtcaaaatctctccttgaaagacttcgactctatcgtacacctccagtgtttagacacgctttgaaatccaattagggttttcacgggaagtctcaccattatttcttctaacacaatgttattgatgagtatcatctcaatatatatgatggatttgtctctgtcaaactacgaattacaaaccctaaatcctgcaagggtcacacctttttaccacgcaaaacaatgtcctgaatataaagtccaaataatatatttaagcccatcaattttattatcatatgatataattttatcatcatttccacgtatatgattgagtaaaaatgtaggaaaatccgttgagttcaaacaaaatattgttttaaggatcacccttttttatatattatcttgtaattttaaatattgtagtataagatagaaaatctatatacatttactgaataacgatagatcgtagagaattagatcgttcattactatgtgaaatagaagtagtagaagaagatggaagttcttgtgatgtcggcgaaacatttcttatctcttgtgcttcattgtccataaagacaaagtctactcgaccttgaggtgatatcagagtagtagcagcagcaataggaaggtttggttcctctgctgcttttcggaagctaagtttttcagaaacttttgaagctgaaaaggataaaagataaattaagagcagaactatacaaaggattatatatatgtaatgtgatatataataaaataaaacacaaagagaaggtaccgatatatgttaaccattcatgcaatattcttggaaccattttcacctttaagtttttatctaaattatgaatgtagagaagacgttgtataagaaaagtttggaacataagttaatgatataataatataatcatgcatggaatttaattctgatcatacccatgcacagcacgaaataataaacatgcgtataagtattaattttaattaaattaattaacatgttgattgtttaaaatttcatttacaattaatctgtttattaaatatgaatatatatatatatatatatatatcagctgaaagtactttgaagtttatattactactaaaatatttatagatttattttaaaatttataaataagaaaatcattaattttgaatataaaaatacgagagtgtagaaaccaatagtgtcattatcattctattagatattttgttctcaactagcaaatgaaaatattttgaacacaacaacaacaaaaaaaaaacagaacattatccaaattatg

SEQ ID NO: 13231 - DNA, 3000 bp, Unknown; identical to SEQ ID NO: 13218
  misc_feature (1)..( 3000): cDNA_ID_2702326_gDNA_ID_2214606_Annot_ID_187225 3000 nt of promoter + ATG

SEQ ID NO: 13232 - DNA, 3000 bp, Unknown
  misc_feature (1)..( 3000): cDNA_ID_3028686_gDNA_ID_2214606_Annot_ID_187223 3000 nt of promoter + ATG
agtcgttcaaagagtgttctccctaatcctttcctttcagcttcagcactttggattgtaggtgggagttggagatggtctcctgcaagtatacatcttgaaccctttagcaaagctatccaacatgctacctcaagagcctgtgctccttcatcaatgatcaccaagtcaaaagttctattatcgagctttcgtgttaatgcaccagtcaaagttgtgagaattacatcagcattcttgatcacgtctgatacagctaattgctgccttttacgctcttccttgcccagagttcgaagctccttctggattagtctccttgtgtttttatctttcgctttcaacaacttcccgtttaaggccttcatttcctttctaatatcattcgctagaccgctgttatctccctttaggacctgagcatctagagcactatccagcacttgaggtaaaagccgtgcaggatgtcccaccctcaccagcttaactttatgtggaacaagtctctcaacaatattatcaactgcaatattcgaagctgcacaagcaagaatctttgaaccacgtttaacttcttgcaagactatttccaccaccgttgttgtcttcccagtaccaggaggaccatgtagcaaaaacacatcctttgaggataaagcctttgtaatcgcatctttctgcgattgatcaaggttcttgttaaaaggcgtaaaggacttaacatccttcttagacactgatggttgtctctcaccaaacaagacaggcactaaatcagaagcaggtcctcttaacacacctttactcagctgtatcaacgtatctttcatcctacgatacgtcacctcattcgcaagtttctccaacctaagagacgtgtttaacccttcttcaggtacctcatcaaacacaacagtaatcgaagaatcctttaaccggtaaacaactccttgcgcaagaggagacgaaccaagatcagatttgttgagtttcaaaacaacaacatcatggttaccaaacttgtgagcaggaagcacatctcctttgttggattgaaactcaataagagatttacccattagacctgtttgaacatcaacacatttcaaattgagaatcgttgtgcctttcttctgagcagtttcaatgttccttgaagcaccggaggttaaagacattgagatctcagcttctttctccatgtctataagtggagccattgttgacacaaaagcttcaagagacatcttcctcgccatttgcaagcgttaatttctctgaaagtgaaaatacatgatttcaattgtaatgagtttagtacacatttgagcgatactatacaaaacaacaactattgagattctaaattacgaaaccgaagcgaaactcagaggaatccgaattgatattaatctagccggagagataaatgatgtcgtaatgattctacttaccagaagaaggatttgttcttctcggttgagattgaaagatgaagaacaaaaccctagaaatcaccgacgaggaagacgaagtgagaaatggttgtggaaattggaagatgaagaagaactcaagaagatggtaacgagcacacgcatttgtctctcaaactcttctcaagcgttacgttataatgggcttagattttatcatataattgggctttaacgtttcgtttaggcccattttaaatgttttttttcttcatatatgtccctattttaaatgttttttttcttcatatatgtcagttttggatcagttttggtgtccatttaatttcagcaaaataaacttgtgcaagacatttcttttaccaaaataaaagttggaattttatatcattttaatttttgacagagattactagaaactgattaaagtacgctacagaaaaataaaaacaacattgctactcaaaatattttgaatcaattttgagcgaatatggctaagttgcgataagaaacactgattccgaaatcacaaagcccgagaatttgcgtggttaccacaatattgaagcactacaatcatcatcgttgttgccacgagcatatctattcgaaatcagtcctcaacacctcgtcatagaaaccatatcatataagacgtggtcatcgtttttgcatgttgccaagacatgcaaacttgtttcctttttccgaacaagaaaacatattatataaaacgtacaaaaattaatttgatcgtatataagttttttgcgggttgtacattatatatttatatttactcataattagtagaaaagagtacatttggttgccaacgaaaacatacttttttctcttttctactaataataatgaaagtacaacttttctctgcttgacttgtccacaatggccaatgggtagtgttgtactaaataatattgtgaagactttgttagaatgataaacggcataatgtatagagatggattcaaaactcgaatatttcaattgttttctattgaaagtgtagactagcctttgcaatatataatatacacatctacaaagactgcaggttacagcgacacataacattgattaatgacttggtaaacgtactaacatctaattcaaattgagacattttaacaatcatgtggttttaatattaaaatggatactaagaaaagatatatagattgaaacttcgattaatatatcattgatcatttctttccacattatcggtaatatctctctactcatatgctctattgatattgcatcattcgagcgacaaatttacaagtggctcaatttcttgtgaaataatgttttatactaatatttaatgtacaaaataagataacctttcacaaaaataacgaccatgtcgtattgtccagctaacaatttatttttaaactaaattcctatacgattaattggtcataagtcattacacttgcttctgtttctgtatatataaacttcctttttgtatttctttcggacacaacaaagaaagaggaagatg

SEQ ID NO: 13233 - DNA, 3000 bp, Unknown
  misc_feature (1)..( 3000): cDNA_ID_3028650_gDNA_ID_2214606_Annot_ID_187245 3000 nt of promoter + ATG
caattatacttttttcatgtataaatcttcttatctatatatccaagattctattcttttttaactatcataaaatattacaacaacaatatataatacaatgttatgcaattatattacttatgtggtttgaaacttatctaacttgattataagcaaactattctttgttccatgtattttcctaatctagtactctagtcacatcatgataagctcatgactaaatattgaattgtaataatttgaataacaaatgtataactatctactcatttatttcaaaagttctatctactcatttatttcaaaagttttataccaaaagagaaaacaaaaagcaaaaaattaaagagtcatttaagtcaacacttttaggtatctctctttgcatttacatatacccatattggagaaagtgtcttgtattgaatgttttggtatatctaagatcccaaaaaaacttacttgaaaaatgtgtatgtcattattaatattaccaatttatcataaggtacaaaaaaatcatatatcatgtagaccaaaaaatgtaataataagagaagattaagttaaaatactaaactaaaaaaggttaaatagcaaacagctaagttacaaatatcagataatgactataaaaaatagcaaaatagaaaaagtagaataaaagtagtgtttgatacattaacatgatttgtatttttttcttttattttgaaaatagttaattaagagtgggattgatggatggtttaatgcaatatgagaactttaatttttcgtcactaacttttgttaattgttaaatgatattaatttagaatgacatgtggcactctccagtgtgatgatgtgtcattcatatggagagagttgaccaactttcatatatatgatttgtgtccaagcaagatgtttatcatgatcattaaaaacggttaatatgattttccacaaacggtctatcacattttaatgatccatataagcaggagtgatccgtcttattgtgataattcctaagaagttgtattttaatcatgccttcatttcatggaagtctactagaaaaaagcgaagcttcgtaattacatatttggagattcaatgagaagatttgtgagaacttgagtgggaaaaactaatagaatttcttctctttatgagctatacccatcttcatagaatcctatattatgatcacaaactcttgcaaaatatctaatcaaaacggattattccaaaactcgagacatcatccatgagacgttgtgcaaatggatttagattactcgaatggagagattgaaggtagtaaacgcttatatttgatcatgcatgttgttctaatgatcttatctcatcaagacatcaacccaagttcgatcgttgtcctgagattttgatatctttgttggttttttaaaaatattatttacgactaaaatatcagtgttgtgtttagatttgttttctttcaaagttgttaatgcgacataataagaaaacgattgctttgacgttttgttgcctgatttctttcttttttttcctcttcttccataaatcgtaacaaggacaatttatttcttttaaaaataggactcttttctaagtacatataataataataggaccatgtacataggtgatatttttagagtatcacaagtcctaaaattatttttatattaataaagcaattataatatgtttgatcagtatcagtccactgatatttatgataccagtatcatctgacgtggcttcttctgattggtcacatttgacaaaaacaaaaaaaattatatatatttattaaacaaacattataaataatactaaaaaaattcttaatgatactttgtgagtatcacctatgaacatgctcttataattgagttacataattctatgtagtactcaaaattttataaatatacttaacctaacacgtataaaataaattatttaacccataaacatgaaaattaggttttcttttatagtagtggattgttattgctcaccaccaacaacataatcatacaaattaataataataattaacaaaaacctttttgatatagagaattttagaaaaataataaaataaagagaccaagagacaaagagaccaatttaataaatgcacaaaaagcaaaagtgcaccacgaattttgcaattattctcctcatgactgtttttttgctggaaccaaaactaaacaattctttgttttaaaaagtttacttacacatactttcttaattagatctaagtttaggattataatcttcatcatcattatttgttattattaatctccatattcagaaaattcgattaataaaaaaagaagcttacaagagagtgcccatataattggaatatctctctctctatctttcttctgaatctctcaaaaatttcgccattgttgttgctctgaaatctgttaactttggtacgcatctcaaaaaccctaatttgattatcgtcattttgtctgcatttaatttatttgatctgatcttcttcgccattctcgagatctcaatcatgggtttatccatcagaattattatcaagcttttctttttcttgaattttcgccgacaaaaaagcaaaattcgcttaatgtatagattcactagaaatggtaatgtttcttttttgggaaaatttcgatttttgatctgtgagatttgattgcaggtgatttgattgcatttgcctttgagagttttaatcttcaatttttggctacatcgagatttggttctgaattttggcatctctattagtagtgaggccatttcctgatttggatcataaagagtggagaaaaatcttgcctttgtctccttaggattgtggcttgatcaggtaatgagactatgtgcttcaaaattgagacttgtttggtgaaagaagcggatgaaaaagtttctgtgtacagcgagaggaattagtggtttctgcttacgaatgat

SEQ ID NO: 13234 - DNA, 3000 bp, Unknown
  misc_feature (1)..( 3000): cDNA_ID_1807998_gDNA_ID_2214606_Annot_ID_187244 3000 nt of promoter + ATG
cttagaaaagagtcctatttttaaaagaaataaattgtccttgttacgatttatggaagaagaggaaaaaaaagaaagaaatcaggcaacaaaacgtcaaagcaatcgttttcttattatgtcgcattaacaactttgaaagaaaacaaatctaaacacaacactgatattttagtcgtaaataatatttttaaaaaaccaacaaagatatcaaaatctcaggacaacgatcgaacttgggttgatgtcttgatgagataagatcattagaacaacatgcatgatcaaatataagcgtttactaccttcaatctctccattcgagtaatctaaatccatttgcacaacgtctcatggatgatgtctcgagttttggaataatccgttttgattagatattttgcaagagtttgtgatcataatataggattctatgaagatgggtatagctcataaagagaagaaattctattagtttttcccactcaagttctcacaaatcttctcattgaatctccaaatatgtaattacgaagcttcgcttttttctagtagacttccatgaaatgaaggcatgattaaaatacaacttcttaggaattatcacaataagacggatcactcctgcttatatggatcattaaaatgtgatagaccgtttgtggaaaatcatattaaccgtttttaatgatcatgataaacatcttgcttggacacaaatcatatatatgaaagttggtcaactctctccatatgaatgacacatcatcacactggagagtgccacatgtcattctaaattaatatcatttaacaattaacaaaagttagtgacgaaaaattaaagttctcatattgcattaaaccatccatcaatcccactcttaattaactattttcaaaataaaagaaaaaaatacaaatcatgttaatgtatcaaacactacttttattctactttttctattttgctattttttatagtcattatctgatatttgtaacttagctgtttgctatttaaccttttttagtttagtattttaacttaatcttctcttattattacattttttggtctacatgatatatgatttttttgtaccttatgataaattggtaatattaataatgacatacacatttttcaagtaagtttttttgggatcttagatataccaaaacattcaatacaagacactttctccaatatgggtatatgtaaatgcaaagagagatacctaaaagtgttgacttaaatgactctttaattttttgctttttgttttctcttttggtataaaacttttgaaataaatgagtagatagaacttttgaaataaatgagtagatagttatacatttgttattcaaattattacaattcaatatttagtcatgagcttatcatgatgtgactagagtactagattaggaaaatacatggaacaaagaatagtttgcttataatcaagttagataagtttcaaaccacataagtaatataattgcataacattgtattatatattgttgttgtaatattttatgatagttaaaaaagaatagaatcttggatatatagataagaagatttatacatgaaaaaagtataattgatttttgatcaaaggtaaatctaactaaaaaaaaaaattatagaaaataaatataattttattaactatataataacatacacaaatatgaacataaattaccaataaaaatagttaaaatataattatttttaaactattttcaaaataaacccacgcgtagcgtgggtactcttctagttcttttaagttaagatcattgaaccgttgatttctcactgcagggttgtccacaaatcactactgtcaccattgctttgatacggcaagaaaaacaaagatattgccaagaaatgcaatccatatcatgttagtatgttacttagagctcgagcttaacaacttaagcaacgaccatcaaataaaagtaatagaaatctttctaatcatataacaaaatattagatgtatctactttcattaagtggaaataagtcaaaagatctaactttagttactgtatgaaaatatactttttgaaaatctttacttgttttttatttttttatttttttctaattttttctttttttaaattgatatgtcatcaaataagttttccttttttacaaggcataactctctttttacacaatagatttaacattatgtttgatttccataattgtcaagattattttaggtggtttaaggttcaagattattttctcaattcggtttataaaccggttaacttgaaccaataattatgtctagatattgccaatgcaagttgattacacgtgctagtttaaaagttgaggctatttttgtaactttctattgagaggatttttaataagtttatacctctctcccttgttcacgaacccgtaaccctagccgccttcaaaaattcccaatttgttttttcaaacaaacttgctcagatcctcttcttcttagggatcaatcttcaaatcaattgtaagtttcttgtttcttataattctatctttcgattgatacctgtttcgatatcttcaagtctagttttttttttttcaatcgagtttttgatttagatcacaaatcgacagatctgtttaggcgtttttctgggtatcgattcttttcaacatccatgccttaatttcaagttttccccaattttcttaaccctaatatttatgtgttcatcagatctgcaaatttatttagggcttttgttcctcgtgctgaaagttaatcgattgtttgaatttggactcttgatttcatgtttttagccgtggattgaaaaatctagggttaggttttcgaatttggggttttttttttatttttaatatctgtttaaagtttgactttttgactaaaaattaaaaaattacactaataccctagattgttaaatcaattcaggttgttaaaataaatg

SEQ ID NO: 13235 - DNA, 3000 bp, Unknown
  misc_feature (1)..( 3000): cDNA_ID_2702364_gDNA_ID_2214606_Annot_ID_135671 3000 nt of promoter + ATG
tcggacgaacgtggcatgaggacccatttttccgtgccactcatcaaaacctcaaccaatactaaaacttttaagtgtagtaaaatacaccaaatattacttccctataaagtataaactctacatttatgatgaagaatccaagattatactagcatttacataggtaaacaaatacccaaaactaaaagtacccatccaccaataaaagtaactctatgatcaagaatcaaagataataagaaagaatttatcaagaccggttatgagggtcgacttttgcgaaatggtcaaatgtaatcaagcatcttttttacgtaggaagagaataaaattcactcactaaagtcgaaaagtagatctaaggcgtaagaatcgtgactataaatatcccattaactagtggataaagaaaaagaagaccaaaaactagtggacaaagaaaaagaacaaaaacctaatttcaagaaattcaataaatatcatcctccggataagttgttattgtacgtttaccaaattcaagaacaagaaaaaacttttcctttgaaacaaagaaacatggatttcttcaccgatcaagtaaagaagaaattctccgacaagaaaccggagagctctgatccggagccaaaccacaacaaaaacaaacccggtcacacggagccaacaacacataaacccggtcacggcgagccaacaacacataaaccggtctccaacaccgatccaacaacacacagaccggctacgaacgctgagctcatggctagtgccaagatcgtagccgaagctgctcaagccgctgctcgtcacgagtcagacaagcttgacaaagccaaagtcgccggagccaccgctgatatcttagacgccgcttctagatacggtaagctcgatgaaaagagcggtgttggtcagtaccttgaaaaggctgaacaatatcttcacaagtacgaaacttcccactctcactcctccaccggtggaactggaagccacggtaatgttggaggacacggtggtggagctggagcaccggcggctaagaaagaagatgagaagtccggaggtggtcatgggtttggagattatgctaagatggctcaaggttttatgaagtgagtaatgttttagtttctaaaaataattatgttagtaattatcttctataattactgttttagtaagctgttgttttttctgaattattattaactgttggatttgtcatttgtgtatgatggaggaaattatgatgttaaagatcatgtatcatgttgttgaccactcgagattgcgttaatcaaatatttgtataattagaaccgaactttaagttatgggaagtaatactaattaatatcgaatttaaatggaccgtctaaaaataaataaactaattattatcctgagaagaaggaggaaaaacacaagaaaatgataatttttaggttttggcaaataaattaaacctaatgtatcgaactgaaataggaaagcaaaataaagtcaatcgaaacaaaaatttaaaaataattactaaacattataatcaaaagaatcgaaacttgaattactacggaaccaaaatattttggataatcaaaaatatccgaaatctataaatacatttttgcagccattttaacaaataaatcttagagttggacttatttacaactcaatgccattagcattaattttttttttccgaaataattaattttactttaaattcttaatttaaattgtcaaccacattatcaatcaaatttaatccaaacaaacttcacatcaatcccttaaaattagcataaacgtatttgttaacaatattttaaaacaaagttttttgtttaaataaatattattcttactaaacgttttttgtttaaataaataaatcatgtatttgaacttatttacaatgtcatgctactgaaattaattatttagaaagaaaaatatttaattaacgatttaaatcttctaaatctttgcttttagagttattatgtcattatctaaaaagcaaaaatattttaaaatatttatatatttaaactttataaaacattattaatatttaaacttataaaaagtttaatatatcaaaaattttaacatcattatataatatatagtttaaaaaaatctcaaaaaaatttccgtcatattttgtgattaaaatttttaaaaatgaacatatattaaccaattggcgaaaaaatgtgtgggttcaacatcccgcatcgactaaaatatttagacaatgattcataaataagatcaacattaataaaataaatggttttttttgcagaacgggttttgcgagacgggtttgggaggacgttacttaataacagttgtaaactataaaataaaatattttatagatagatacaatttacaaatttttatatatactaactttaaaaaataaattgtccccgcggtataccgcgggttaaaatctagtataattatattttctaaaatattaattatttttggatcaaataaaataattaaaaatacctgaaaatagataaagtagtaaaaatactcaaaaataaccgaaaatgtccgaaaatatccaaaaataaccgaatatccgaatatattcaaagcaaaataaccgaatgaatactaaattttgaaaccaaaagaaccaaaaccgatagcgaaacaaaatttcaaaataagcgaatgaatactaaattttagaaaaataaactgaaaaccgaatgaatacgaactgaaagcggatagataaaccaaacgcaagtcctgagattgtgtaaaaggcccataaacgggcccaatatgcgaatccattttgttttcttgttgggaaattaatctttttctgcttattttaggagaaattgttttaattttaatttagggtctcttgtctttgatcttttgtacactttctctggattttctgaattcgaactttggaagaagaagaagctttgatcaatcatg

SEQ ID NO: 13236 - DNA, 3000 bp, Unknown
  misc_feature (1)..( 3000): cDNA_ID_2702371_gDNA_ID_2214606_Annot_ID_135673 3000 nt of promoter + ATG
aagcaaagatttagaagatttaaatcgttaattaaatatttttctttctaaataattaatttcagtagcatgacattgtaaataagttcaaatacatgatttatttatttaaacaaaaaacgtttagtaagaataatatttatttaaacaaaaaactttgttttaaaatattgttaacaaatacgtttatgctaattttaagggattgatgtgaagtttgtttggattaaatttgattgataatgtggttgacaatttaaattaagaatttaaagtaaaattaattatttcggaaaaaaaaaattaatgctaatggcattgagttgtaaataagtccaactctaagatttatttgttaaaatggctgcaaaaatgtatttatagatttcggatatttttgattatccaaaatattttggttccgtagtaattcaagtttcgattcttttgattataatgtttagtaattatttttaaatttttgtttcgattgactttattttgctttcctatttcagttcgatacattaggtttaatttatttgccaaaacctaaaaattatcattttcttgtgtttttcctccttcttctcaggataataattagtttatttatttttagacggtccatttaaattcgatattaattagtattacttcccataacttaaagttcggttctaattatacaaatatttgattaacgcaatctcgagtggtcaacaacatgatacatgatctttaacatcataatttcctccatcatacacaaatgacaaatccaacagttaataataattcagaaaaaacaacagcttactaaaacagtaattatagaagataattactaacataattatttttagaaactaaaacattactcacttcataaaaccttgagccatcttagcataatctccaaacccatgaccacctccggacttctcatcttctttcttagccgccggtgctccagctccaccaccgtgtcctccaacattaccgtggcttccagttccaccggtggaggagtgagagtgggaagtttcgtacttgtgaagatattgttcagccttttcaaggtactgaccaacaccgctcttttcatcgagcttaccgtatctagaagcggcgtctaagatatcagcggtggctccggcgactttggctttgtcaagcttgtctgactcgtgacgagcagcggcttgagcagcttcggctacgatcttggcactagccatgagctcagcgttcgtagccggtctgtgtgttgttggatcggtgttggagaccggtttatgtgttgttggctcgccgtgaccgggtttatgtgttgttggctccgtgtgaccgggtttgtttttgttgtggtttggctccggatcagagctctccggtttcttgtcggagaatttcttctttacttgatcggtgaagaaatccatgtttctttgtttcaaaggaaaagttttttcttgttcttgaatttggtaaacgtacaataacaacttatccggaggatgatatttattgaatttcttgaaattaggtttttgttctttttctttgtccactagtttttggtcttctttttctttatccactagttaatgggatatttatagtcacgattcttacgccttagatctacttttcgactttagtgagtgaattttattctcttcctacgtaaaaaagatgcttgattacatttgaccatttcgcaaaagtcgaccctcataaccggtcttgataaattctttcttattatctttgattcttgatcatagagttacttttattggtggatgggtacttttagttttgggtatttgtttacctatgtaaatgctagtataatcttggattcttcatcataaatgtagagtttatactttatagggaagtaatatttggtgtattttactacacttaaaagttttagtattggttgaggttttgatgagtggcacggaaaaatgggtcctcatgccacgttcgtccgactatccaactctttgaccatttatgattttgtcggcagaataattaaactatttgaagattggtagcagagtttagatgagttttggatgggcctatgagaagagagctcatatgggctcattaatagcccattattagatatatattctgagcccaactttgtttgatacattccattgaacgttgtcgtatgtgaagaaaaggatgtggtcatttccatcacacttactaattttttgtcaacaagatgaccacattattatgacagaacagaagtgaacaaaaatctaagtaagaccaagaagagtaaactgtatttatatatgtagaaacttgtgtagtatagtatatataagaagcagtgaaagcaaagtatggagaagaagagaagaacaacaggaggtgaaatttcaaaggagtggcatgtgaacacatatcctatggtttcttcaaatttccattgaaaccattgagttttgtgttctcaggtcacccctttgaatctcccctgttccattttttcaccttactaattttttttattcatactctaaatttgtgagcttttgtgctttctttttttttggtcataagtgagattttatgcttttttgattacacatttattataatggaacctctattttgtatctgaaacagagacaaagcattaaccatatcctacatatataccttaacaaattaatgacaactctggtttccaaaacaataaattatgtatgatttgacaattaaactggttgataaaatgtaaatttggaataaataattagttccataatatatgttttttatatctaaaatagcatagtcttttgaaggtgaaaagtcataaatcaggtttggtttcaaacaatgacttcataatcactcaaaaaactcttcttaattatcaccaaaaccccaaaaccaactaaaactgaaaaaacaaacgttgactttttgactaaccaccatcctccgccgtaaatc

SEQ ID NO: 13237 - DNA, 3000 bp, Unknown; identical to SEQ ID NO: 13234
  misc_feature (1)..( 3000): cDNA_ID_1807998_gDNA_ID_2214606_Annot_ID_135675 3000 nt of promoter + ATG

SEQ ID NO: 13238 - DNA, 3000 bp, Unknown; identical to SEQ ID NO: 13233
  misc_feature (1)..( 3000): cDNA_ID_2702375_gDNA_ID_2214606_Annot_ID_135676 3000 nt of promoter + ATG

SEQ ID NO: 13239 - DNA, 3000 bp, Unknown
  misc_feature (1)..( 3000): cDNA_ID_2702379_gDNA_ID_2214606_Annot_ID_135677 3000 nt of promoter + ATG
atagaaagtaactaaaaatttcaaatttttggttaattaacaagagttaaagagaataaggtacaatgatatttgtacttaagaaaatattagcatatagaataatacaccatcacttgaattgaaagaactttgaggaaaatatgaaatatatatgaattggatatccaaaattttaggatatgcatgtcggagggtctgtccgaaaatttgatgtgtggcattagatgccaattggttgcttgaaactatatattataaaaaaaattataaaagaaaagacaagagtaacaaacttttaaaatgcgatatcatacaaaataagtgagttcattacttatacagtgatgaaaaactgattttatttgataagattttaaaattaacttgatctttttcatcataattttctcagaattaatatacacatgtaacacagagttacagatattgacctcactggaacaactaatagtagaatattagaaataagaaacattttttgtaggatcactcttactggagtataatttattgattgaatgcgatgttccgattaattttagaaatttaattggtcaatggtataattgatagtaattagaatatatatatttatttcagcttttttatctatacgtctagactataatatcgttgcaagcaggttctaacgtcatgtgtagatcctttaagcagttcttgtagcatcacttgcattttcacgatcacgtagccttattgcttagttcaatttttattttctttgactgtgcctttagaaaggtctgagggtgatcctacaaaaaactagataactcgatatataagaccacatgtcagaaacttggaagggtttagtgattagacgactaaaacatcataagctatccaattaggaaaattaagtactaataagaggacgagattctcacatctcaaatacactttacatatgtaaagcttatttttgcttcattagtttttagagattaatgttctagaaatgttattatatgaaagcatagagcaactaaacaattacaacttctaaatgctctcttatttgccttgaatataaatttgattgggtagaaaaaatcttgtatcatcaaatcaaattgatatatccgccccgaatttgttttaatatgcatatatctaataattaatttgtattacatatgtgcatcaaatattaaacagaagcattttagagaattaattttatcaggtccacaattagttcatcggttttcaatgaaacctagatacgaaaagaaattttgataagactttgaattgcaaaaactctttaaaaaagtttaaaatatttctaagtaagaagaatcttctaccttcctggccacttcactaaagtccggtgggaagattctgcgactctcaaacttctgtcaatattatttacttaagtgaatatctgtcctagtttatggtaataaattaaatcagatattccctttctttctcttttttgcatccactaaaatttagaataattattcaacttttttaagaaattcaatttacaaaaaaatattgatcaatcgttatctctgtctctctctctcgccgtcgtgcaactataaatataaaaatcttgtggcctaatatgtgcttctttgatttatattgaatctcaattccttttgaaaatttaaaataattaactatataaattaagaaggtggtagaagaatatttgtttttctggcaacgactataaatttcccaaaatgtactaaaacgttcacaatttattcctttcacataattgcgttggtgattccataattttattttaactttgtcgaatatataagataattaagaaccaaatacctgaaatgttagcttagatctatttttcagtcaacatgagctaagatttataggagaattaggaaacatattttatcttaagaattatgagactgaatttacgaaagtataagctatgtgaagtggtgaaccaacaaaagcagaatctgagattaaaaacaatatatcgctttattagaaataatttaaaagtttgtattcttacccatttgttctttataacaagtttccatatattcccttttgctctgctgctttatatcttcctcttttctcctttagcctctcttttctctttctttcatatggaattatacatagattaattttctgaagaagtgattaaaaactaagcattataagagaagataaaaaaacaaatcaaatggttactaatttaatgattttactaatatttaccaagccatagttttttatatattaactattttgtttaagattcatgaagccatatatggtagcatcaaaagccttgattataagctttttgagaaatgagagtcacacatgatacacctttagtaatattgactcattagaaaataaaaataatttatctttgttatattttctcaaattttgctcaaacacaagcagcacttgatgtaaaacagtttttttccgaataattttacataatattaaaaaaaataaaaaaatattgactcattagagaagaggaacgacttctaacagtaagaagcctctcactctctctctctaaaaaatacacctccttagtctctccctctctcgatagatatatgtgtgtgtgtgtgtgtggtgacagatcacattattccgttcctttgaattgagccctctaaaaaggacaggaacctccttgtgatcctccttgtgtccacaacctaacattttattccccttttcctctatcttcttcttcattcgctcttcctctccaaaccctaatttccaaaaaccctgaaaatctttgaaatatttctgaagaaccatatagcatatacatatatcatctgaaacttgaaggcaccacaaattcttcttgattccttgatcatctatattatatttatataatcaataaatattcttcctatacagcgagagagagagagtatataagctataaat

SEQ ID NO: 13240 - DNA, 3000 bp, Unknown
  misc_feature (1)..( 3000): cDNA_ID_2702387_gDNA_ID_2214606_Annot_ID_135679 3000 nt of promoter + ATG
tacgatccattgattctcctctattcaacggttcgatatcaattacacacacgaagttaaactcttccctcccacaccttataaaaccctatacatgaaaaaaaccttcatcttgaaaaaacccctttccaagttttgcaatttccactgaacagaaaactttcccggttaagcaaaattcgccatggatgctcaacaacggagaactgatattcctcgagcaccaccggtcggagaacccggtggcgatatatcttcgattctcattgctttcggtgttttcgctgcaatcgccgccttggtatgatatctcctctcttctcgtttgatctctgtgttcagattagatacacgtatcatcacaaactgaatcggttctcttaaatgtttcatctttcgattctgagtcaacccttttctaaatgtgtaagctttgtatctgaagttgacttaaagctgatgactttgtattcttctcgacctagatttcacttgtttctttttagattttggattagtgtagtgtaatgtcacaagtacacttttttaaaacctatttgagtgacacaaaactctaaagacactcgctttgggttgtatttgttaaagattttgtttatggaatggactatcatcaggttatgtttccctcatcgttggtgcaccaagttcctgaaggtcacgttggagcgtattggagaggtggtgctcttctaaatataatcacagagccaggtatttatgatcccttttcgtagtttcattgcgatttcattcttttgttagttggaattaacttttgtgtgtttcaggttttcatctgaagctgcctttcataaccaactatgagcctgttcaagttactctacagacagatcaagtgagttttctaccataaaaagcttggatgtgtttagattgtagttttttttactaattgattctctactcttaggtgagggatataccatgtggtaccaaaggaggtgtcttgattacctttgagaagatagaagtaagtgtcttaagatttgcttttctgctggcatcaccattgcttttttaatcttaattatatgtattgatcagattaaacatgtttacaggttgttaatcgactacgtaaggattttgtttatgacactttgcttaactatggtgtgaactatgataacacatggatttatgacaagattcatcatgagatcaaccagttctgtagctctcattcacttcagcaagtctacattgacatctttgaccaggtacttgactataatttaaacatataaactttttgatcttaacagtttggaagcttaagctcatgtcattgactggttcatgtttttgatccatatggagtgacgtttccttcctctttttaggaaaacagcagtgattaaagctttctttagatagttttctaattgcgtccaaaatctggaaagtttacgatgatttccgctaattcatttgatcacatgtgtttcagattgatgaacgaatgaaagatgctcttcaagctgattgtacacgttatgctccaggaattgagattcttagtgtgcgtgtcaccaagccgaaaattccagagagtgtaaggcgtaactttgagcaaatggaagaggaacgtaccaaggtaaattccttttgaaccttgtccttggcaattcaatctgcactggtttgctcatatcatcaattccgttataatggactctggacgctttaagattgcttatacaattggaatgaatgattttgaaggtcttgattgctattgagaaacaaagagttgctgagaaagaggcagagacaaagaaaataatggccattagtgaagctgagaagaacgccaatgtaagcaagattctgatgcaacagaagttgactgagaaagacagttcaaggagagaagctgatatcgagaatcagatgtaccttgaccgtcaaaagagtctcgcggatgcagattactaccggtaatagcccgtctttttttcccatttagtttccttatgaatcaaacaaacaaagaacatatacagaataaatggctctaatgtttaaatttttcccctgatcaatgtccttagtgtactgagagaagctgaagcaaataagttgaagctcacccctgaatttcttgaactcaaattcatcgatgccattgctcgtaacaccaaaatattcttcggggacaaggttttactcgactctatctcatttctgaattcacatatctcgtgtcttatctctgttctgctgttctgaagaaagtatatctcttaactgtgcaggtacctaacatggtgttggatcaaaggctgcttgggaatttcctcaatcattcgacaaaagacaaagatggaagcttggaaatggccactgatacatagactagatgtttcagtcccacaaaaacaaattttcttttgtttttattgcataacataaaacacttatcagtgaaatttggaagcttctcccgtagctttcatttagttgcaacccagtctcctagtaaccatgtttttgtctaaaaagaaatctcattaagactaagctaattcggtgtaacactttagccattttatcagattcaatgctccacaaaatattaaaaatgactaagagattctctgtcagtttgagattcaaagtccaaacatatctgagctcattttggtcttattaggctgaaaatgaatgtgtcttgaaatccttcattgacattatcttttgatatacacatgtaaccctctccatacaaccgtcaacaacacacatgcaaaaacagagagaggaaatgcagggttggccaaacattgtccaagaagatccggtttagataaaccgagaatgcatccaaagcggtggggtaaaccgggtaagaggcaaagtccataaatgttacaagaaaagaaagtgtttttgtgttaaagaagaagagtagaaatgtatgtggttgagagcaaagcaggagctataggatgt

SEQ ID NO: 13241 - DNA, 3000 bp, Unknown
  misc_feature (1)..( 3000): cDNA_ID_2713284_gDNA_ID_2214606_Annot_ID_135680 3000 nt of promoter + ATG
taaaacacttatcagtgaaatttggaagcttctcccgtagctttcatttagttgcaacccagtctcctagtaaccatgtttttgtctaaaaagaaatctcattaagactaagctaattcggtgtaacactttagccattttatcagattcaatgctccacaaaatattaaaaatgactaagagattctctgtcagtttgagattcaaagtccaaacatatctgagctcattttggtcttattaggctgaaaatgaatgtgtcttgaaatccttcattgacattatcttttgatatacacatgtaaccctctccatacaaccgtcaacaacacacatgcaaaaacagagagaggaaatgcagggttggccaaacattgtccaagaagatccggtttagataaaccgagaatgcatccaaagcggtggggtaaaccgggtaagaggcaaagtccataaatgttacaagaaaagaaagtgtttttgtgttaaagaagaagagtagaaatgtatgtggttgagagcaaagcaggagctataggatgtatgatactctcattgtgttgtttgggaagttggccagcgattctgactctattggagagaagaggtcgtcttcctcaacacacgtttcttgatttcgcaaccgcgaatctcttggctgcaatcgtgatagcattttcgctcggtgagattgggaaaagcacgtttctaaaacctgactttaccactcagctacctcaggtttggttcgttctatatacttcttgagattcctgataaagtttatacgaacttgattggtaatatgaggttttttacaggataattggccgtcggtattgcttgcagtcgcaggcggtgtgcttcttagcatcgggaatttagcgactcaatacgcttttgcgtttgtcggtttatcggttactgaagttataaccgcaagcattaccgtcgtcattggtatacttcctttggtttgtgatgaatcaaaaacttatgtttctatggtttcttgcgtatcacggttgaattttataggtacaacattgaattatttcttggacaacaagataaacaaagccgagatcctcttccctggcgtaggttgcttcttgatcgctgttttcctaggcgctgcggttcatgcttctaatgcagctgatgtcaaagagaaactcaagtctttacctagcgagtataaagctgagacaaactaagatgttgctctttcttttgcctttgttccatgttttaaaaatgttttaacaaaactctgatctttttcagagatttatattcttctattgaaaatggtgaagacaagcctgaaataggtaaaacctatatatatattgatttgtgtgaagatatatgcaaagcaaaggaatgaaaattcagttaaaattagaaacttttggtggaactttgatcaaagttgtgatgttttcttgtttgttcttaccatgaacagagaaaactgatgtcgaatctcaagagaaactcgcggaaaaggcgaaagcagggacggcaggattctatgtagagctagagaacaaaagagcaatcaaggttcaattacaatgaccaagagaaaaacctttagcaagattacgtagcaaaggagagtatacaactactctcggtgcttaaaacctcatcaatgcgcaggtctttggaaaaagcataatgatcggactattcataacgctgttcgcgggaatcagcctttctctattctctcctgcattcaacttggcaacaaacgatcaatggagtacattgccaaaaggcgtacctaagctcgttgtctataccgcctttttctacttctcaatcgcgggttttctcatttctttgattctaaacctcatctttctttaccggccaatggtaggcttagcgagatcatcgcttaagaagtatatatatgactccaaaggtagaggttgggcggttttcgctggattcttgtgcgggtttggtaacggtttgcagttcatgggaggtcaagccgctggatacgcggctgcagactctgtccaggttattttttgcttcttcaaatttagtaatctcaaagtttacattttggtttttgcaagtacatgagctctgtttttggtttaggcacttcctcttgtaagcacattttggggtatagttttgttcggagagtatcgaaaatcgtcgaagcgaacttatgcccttttagttagcatgttggccatgtttgtggcggccgtagctattcttatggcctcttccggtcaccggaaatgatgatcttatcatagttgtattatacatgtaagattataagtgaatgaagaatatatgttctgtttcaaaaatgttatgttttttcattctaattggagaaacataattttttcgtttcgtctctacttaaatgaatattcaatgaaagaaaggagaaagaaaaagaaatgttaggtacttgtctttttccagaattaatttctctagtataaacgaaaatattagaaaggtcaaaaagtatccaaagattggaacctcactatgaagattccaaggcaaatcaaaaattttgtatatcaatttgagtcaatgttcagtatctttacattctctggacaaaagatctaaaagatatgtggtggaaactctcttgaacttatttgcagaagtgatattatcctctgttcttgcagaacctagcaaaggtagtgtctttttcatatacctattttggatgatttggttctacttatcttttaaatctcaaactctcttgtcatgaatagtttatggacatatgtatcttccatcaacatgagaaacaatcaagaatcttctctagtcttatgtggattgtttatctgcttttaaggattagataattctgaaattctccaagcatatcttttgcctaaaccaacatttttgcttgcagggctgatccatttagagcccgagaatatgtatctagtggagagcaaaggaggtgccatagcttgt

SEQ ID NO: 13242 - DNA, 3000 bp, Unknown
  misc_feature (1)..( 3000): cDNA_ID_2702417_gDNA_ID_2214607_Annot_ID_135688 3000 nt of promoter + ATG
gtaggatagaaattggtcttgggtatgggattccatgagatccatggcttcgaatagctcggcggtgtggcatggctgctataacggtctggtggttccggttcaggtgctccaccatctggttcttcctcaaaatccgagcttgatgagtagccatcatcatgccatgactcaacaaatctagtctcgttgtagtacgagtcttgactacatccatatgagtcctcttcatcagagctagagtagattattgtctccatcgttctcaaattttatttgtggtacctcgccaaagagagtaaaacaaagaagacaatgaatcagaacttaactcaggaagtaagtcaacaaataagtcaaaaataacaaaacacgatttatttatttttctttttaaaaacgagaatagcaaaattgaaacaaataacaaactagacaattaaaatttttattttgtttcactattaaggttgtggaagcaaatcaaaacaaattgcaaaaccaaatttttatggggttttcgatttaaaataaaaaaaatgaataacgaaaacagaaattgaaagggataaaagggaacgagttcaccttatgggattggagcttttagctctgataccaatgatgcaaacctcggaatccacctagggtttacgcttctcggtttgtcgacctaaagcttgaatgattcgatgaatgatggtagagatgaaagatggaggttttgttgaatgaatccacactcaacgtgcttgattgaatccacaatcaaaccacaaacaaatcaacttgaatccacaagctaattgatccgcacacacaagactttagtgaatccacactaacttctaatgcataaaactcaaagacactctttaaagaaaatacttgtttatttcgtaaaaggcttgaatacaaatgaaaactaaggtgagcttatatagaggctcaaacaatgttcatatgctctaaagaagtaaagaaatcgcaacaataaatgaaaatatggttgttggaactttaatgacgaaatcggccaaataaggaaagttgtgatgtgtcttgagtcttgacaacttgggctggaagtgatgtgattttgggacgtctagagtcattgtaggaagcttcttaattcccaaaagatgatcaaaatagagttgttgtgatttgatctcatttagctccggaaaaggaaagtcttggctccgcgggttcacataaggaatgatgcaccaaggattaagtgtgaatggttctaggtggcgtagaggatctccaggcttccatatgtggctctgggacgcacaaaagggaaggaaaggatagctttccttagttcgcacaagctggtttgatacatgaagtacttcaggtagtctgtcagaaggtccataaaaaaatccaacaagcagtctgtcaacgagtgcatcagccggtacgtcagctcccattcttacatcatcccctccctcttcaagaggttttgtcctcaaaactttttttacctacacatagataagtcaagttagtccattgaagtgtataagggtttagaagcttacattgagttttgcgaaattgttgagcatccggtggttctcctttgatctgaatagtgtcattgacactctcatctttgttcacagtaatttcgtccagtgtaactattcacagtaatcggatagtcatatacatcactataaaggttattgacgatttatgtgaattttgtgcatttttttcttatcaagcaaatcaacgaagtagcaatatgattctgattttaaaaacataacatttcgaaatgttaaactaaccgggatccgggtcaataaactaggttcaaaagagagaaaatcattaggattatatgcttgagtttgagggatgacttcagcagatcaggtatgtctctatgcgcaactatttcagtaccccctcatccataatatcacatgctcgttcgagcagattgctcctaaaaatgagactaagcagcatagaactcataatggtatcaacatatatactcctatatttttggttttctatctagcattctagcccaatatatagcagccacgcaagtgaaaagaacatcgttactcgaaaaatattttacttagctattttggactggatctaattaatatgtgaggtgtaagccaaattaacgtcaccgcattaaacgcctatgcacaagttaacgtcaatatgtctttagaagaccgcaacaccgatgcatggttatgaaactcctttatgtttttgttcatcattacgcaaattagtttgttctccagcgttaggatcgatcggctgaaacatattttcctgcaacatttattttactatatttaaggaggagaaaagtttttattaatcaacttttagtttttctaatatcacatggataaaataataaattaaattagacatacagttgttagtaattctttgggagatttgcaaaactacccttattctaataactttttgtaaaagtgccctttcctgaaggccatttttaaaactaccccttctaatatggcaaatgattgtcttaccctctgaatgattaggtttcacattcgtttcacaaacttcttcgttttggcacaaacttcttcgttttcctctccgattttcctctccgatttcattcaaaatcgccggcgaatttcctctccgatttcactcaaaatcgccgacgaatttcctctccgatttcactcaaaatcgccaacgaatttcctctccgatttcactcaaaatcgccgacgaattttctctctgagaaaccccaaaatcgcagacgaatttcctctccgataaacctgttcttctgtgaaggattcagatcatttctctacgacgcaaacaatccccagagatatcgatagatccgacggtaaccgtttttataatcgattttatagtcgattttatagtcaattttatagtagatctgacgctgtttcataacatgttttgcac

SEQ ID NO: 13243 - DNA, 3000 bp, Unknown; identical to SEQ ID NO: 13242
  misc_feature (1)..( 3000): cDNA_ID_3028728_gDNA_ID_2214607_Annot_ID_187263 3000 nt of promoter + ATG

SEQ ID NO: 13244 - DNA, 3000 bp, Unknown
  misc_feature (1)..( 3000): cDNA_ID_3028692_gDNA_ID_2214607_Annot_ID_187259 3000 nt of promoter + ATG
tgaactaattaaaattttattttaggcatctttggtgctcgtggcgaaccaagaagctattgaagataacacttctatgtataagcatatgctagacataatagaagacctttttgatcagtagtctacgaacaagagattgtgccgtgatcctaatgatgttgatgcgatgggtgatatgaaacttggaaaggatgtgcttgacaacgaaaagtatcaaaataattgatggcttatggatcaagaaagatgatgttaataaggttaagaaggttattgacatgaagatcaaatgtgtttcatgaagatggaaccgaatcaaccttgattcagttggtcaatctgatcttcatatgtcatagtatttctatggtttgctatgtttgagaactttttgtttggtttaactgtttttctctgaaattcatgtttaaagttttatgttactttgattattatggatttaatttggctttctttcaaatcttcgaataaattggattttgttttgggacttatttaagcttcaatattttcaactttgaaagtgttgttgtagttagttggctatacagatcttacaacaacacttacataaaaattaatacatttataagaaacctaaatcaatcccaaaaattaggatctttcatacatacaccaagattcaattttctcctcctacaaatgcaacaataattaccgaaaagtaaagtagagcatgtttaagtgttgtcaatgaaatatatcatttctcattttgaaaacagatattcaaactttttggcattcttatttcatctgtattcttcttcggaaaaatgggtaaaaaaaaccttcactttttacaaaaacatgtaaaaaaccctcaactttttttgttagtttttaaaccatcaccttttaataaatggtaaaataacacctagtaatattaaaccaaataaagtataatattaaaacataaagtaaaacaacttaattagtttgtaatttatactttccaaattcgagtttacgatattttttccagaatttagttattgtttttttggcgatataaagaaataagtttcaattagaatttgttatgtaaactaaaatcaatttatagcttaacacattttattttatttttctttgtatgttttctattttttgaagttttggatttaaaatatttatgaccaaaattcgttctaaacttgtgtgactgaaccaaataagtttttcttaatataaattttatattttgttattacaaaattagtttggtttctcgttgatgaaattctagaactcaaccaatcaaactttctttcaactaaatctatatataaaagaatatatcatacataatataaaataattactttatccaaattaaatcaaatctaccctcgaaccaaaataaataaaatttgaatagattctggatatgttatcttcaatatgtaacccattttgaaaaattctttctaatgcctttttcacactaccccttttcaattctactcttttctatttaccatttttatttataccctatttaaatttttaatgactattttacctctatttgtaaattgatttaggttaacaaaataaaatattaatattttttgcctaaaatattccaaaataaatttcccgccaaaaaatttcggaaaaaaaatttcccgccaaaatgttttttcaaaaacatttttccagccaaaattttcccgccaaaaaatttcgaaaaaaaaatttccgccaaaaacaaaattcgaaaacattttttccgtaaaattttttttggcaggaaatagatttacaagagattttaaaagggttttaaaatatttaaaagatttacaatagattttaaaagggtttaaaagatttacaatagattttaaaagggtttaaaagatttacaagagattttaaaagtgttttaaaagatttataagggatattaaagggctttaaaagaaatacaagagttttttaaagatttttaaagggtttaaaagtgttttaaaagatttacaagggatttttaaagggttttaaaagatgtacaagagtttttaaaagattttaaaagaaattatatgaaaaccctttaaaaactcttgtaaatctttttaaaaccttttgtaaaggttcacaagagttttaaaatggttcaaaaagagttgtaaatgttttaaatacttacaattctttttctaagagttaaaaaatgtttgtaaagattttataagagttttaaaaggatttacaaaggtttaaaatccttgtaaatccttttaaaactctttaaaaactcttgtaaatcatgttttacccttttatacgtttttaaaatccttgtaaatcattctataccacttacttatttttttaaaacgattgtaaaccatgcaaaacttttttaaaatcccttgtaaatcattctttgacacttacttatgctttaaaaacgattgtaaattaggttaaccccttttaaaatcccttgtaaatcattcaatgtcacatacttatgctttaaaacgattgtaaaccatacaaacacttttaaaatcccttgtaaatcattctatgccacttacttatgctttaaaaacgattgtaaatcatgttttacccttttataagcttttaaaatctcctgtaaatcattccaataccacttacttatacttaaaaaaagattgtaaaccatgctaaccctttttaaaaatccttgtaaatcattctatgccactaggggtgtcaatcgggcttgaagcccgcgggccaggcctgtatagggatgcaacggggcgggtacgggcacatttaataaagcccaaaaaaatgcgggcctcacggtcatggtccgtttggatcgcggttgaaagaagcccgacccatttttgaccgcggatttgcgggttgacccgcaacgtcttctttagcaccgttacgacttacggtgaatcgttgatgaattttgatatggtgatg

SEQ ID NO: 13245 - DNA, 536 bp, Unknown
  misc_feature (1)..( 536): cDNA_ID_2702429_gDNA_ID_2214607_Annot_ID_135693 3000 nt of promoter + ATG
tagtttacttgctttcttgtgtatgtctttaagttgtaagtggctgccactgatgtacttttcgaaatcgtgaacctaatgaaaagaaaacaacacttagtaaaaaaaaagaaaacatctttagtttatgcaactctcagactgtttagcttgattttcgagattattatttttcaaattatttatgtaaactaatttttctagaaattaagtaacggttgtggagttgagtttttaattagtgtgtggttgcttaaaaaaaatatgattcactttttaaaaggaacggtttacgacaaaaaaaaaaaacaaaggaacggtttagtataatttgtaccgaacgcagaccgcaactgcaaaaaagaagcgtctgggtgcgattgcggtataagcgaacaatccctaaacccgaaaataaccaaaaggaaaaacgcagagaattcgaaccagagagatctttcgaatcaaaacgatctgaagaagaagaagaagaagaagaatcaaaatctggatcagaaacaagggaggagaagatg

SEQ ID NO: 13246 - DNA, 3000 bp, Unknown
  misc_feature (1)..( 3000): cDNA_ID_2702464_gDNA_ID_2214608_Annot_ID_135697 3000 nt of promoter + ATG
aaaagtatcgactaatcgctaaaaccagcgactgatcgctaaaaatttcagcgaccaaaaattgcggtcgctgatcgctggcgattatcgctatttttggtcgctgaaccagcgacaggcaaacgaacaacttttggtcgttgtcgctggtttcagtcgccagcgacaagcaaacgaacagggcctaaattctattataaccggagatattccaaactctaaaggcgagggttcttctccagcggcaaaatttatggacaatgttgtctacagattgtgtttcaagggtttggtgaattatgaggcggttgcggacgatgtagaaaaggcagtgaaggctggatttggggttgcgatttgcgatgagaaggataatttgttgcatgagattaaagaatcacttagagacattgagattagtcgtagaggagtagagatcatggcactggttcgtggattaagtgaatccttcgatttggggatgagaaatgtcgtgatttattgtgatgacgattggatttaccaatctgtaagtggttctcttctttgttactgctttgggttagttattttggaatcatgagactataatagtgtgtggactattgatttattttgcatgttacaatatttttttcttctttttatgagtaactgaatttcgtagtgcgtatttaagttgcactccaaagataaatgtcacatataattgaaacgatgatgattttaatttgtttttagttttagattttggtcttcgttttttgctatagattataaaaataaaaataaaagttaaaaaattcagagatgaaacaaatcttgtgaaaaaaatagttttccacaaaaacctgaaaatcatggtttttagtattctttgaaacatggagaaaccattcaaaataaaatactagttttccaaaatcgttggaaattctaatttttttaatatcttgaagggtgagaaaatatattttcaatgaaataaaaaccaaaaaccacttaacaactagtaacttgagctttttttcaaatcaaaactagtaattattgtagaatcttagaagagtaatgatgattacgactttgacggtgatgatatattgtcttagtctaaggagaatatatctgattttcattgcagataattggtagagggaagtctaaaaagaagattgaccatcttgtggaagaagttcaaggcattttagaaaaaatggcctgtattgacgctgttttggttgcacggaacgatgttaagtttgcttttagacttgcaagagaagccataggcagaaacagcgttgatgtgaacgcagaacaaggagagacttgtggcatattttttgaagaaaccgatgtagagcacatgttcgttaccgagaaatgccttcaccgtcattgctttccttgtgtgaaacaacatgtgaaagtgaagctgcgtagcggaactgagcccacatgccttgaatatggatgcaagtttaagctcacccttgaaagatgtagtaaagtgttgacactaaagcttattgagatgtggaaacaaaagatgaaagaagactccattcccgctgcggagagaatatattgcccatatccaaactgctcgatgctgatgtccaaaaccgaactatccagtgaagccgacttatccaatgttaggacatgtgtcaaatgttgtggactattctgcattgattgcaaagtaccatcgcatactgatttatcgtatgatgattacaagaaacttcaccctgaccctctagttgatgacttgaagctcaagtctctcgcaaacgacaaaatgtggcgtcaatgtgtcaaatgtaggcatatgattgaactttctcatggctgtaaccacatgacttgcaggtatatatatttatttaactcgattttgctacatcatatgaatattttcattttgtaatgttttctttgtgcttgcattgtgtagatgtggttatgagttttgctatgaatgtgggattgaatggcagaaacgggacaaggtgattatgatgatgaagatagcgatgatgacgactcagaacatgattgtgaagaggatatgtgcgagtgctattatgatgaagatggtggtcgttggaatgattttgaagattttgtggatcaccaaaccgcacagtgatgctttgcccttttgttttactactttgattcttaaactctcactgcattgttgtgattgactttattttattatatggttcttgcagctacgatgcgccgagggatgatcaggatgtggtatacaagtatccttctcctgagcagtttttcagtgaagaaaggaatgctgatggagatgattacatttgggacgactacaacaattatggcggtttaactggcgataaaggaggctttgatgaaggctttttcagagattattattctctttaatttctgtttggatcaacacatagatttagtattggaagttgggaacacatgcattccatctttttcttttgcattttcttctttatgatctttgagaattttaaggacattattttttttcttaacattgcaataattacaaaattttttttatgtttttcttaattctcgtaattgtttaaaaaattattaatatacatatacataagtaaattgtcttttctagattttaattaacatttgtcatttgtattctgttattttccgatttgaaatcaatattcaataatgtagattttcccgaaaagaaaatacagaaaagggaactataacattatagaaattatcctacgaaataaaaaaaaagattatagaaatttaaaatttagagaatcaatcgacactctcattaacaaaatacgcttgcaaatattaaggaactttgataaagagcagtgaacgagaatttatttaataacttctcaagcaagctatattccctctctctcctcatctgtatatatatatagctagattttcacaagaaaaattggagactaatcagtc

SEQ ID NO: 13247 - DNA, 3000 bp, Unknown
  misc_feature (1)..( 3000): cDNA_ID_1837627_gDNA_ID_2214608_Annot_ID_135700 3000 nt of promoter + ATG
gtcctagatatccgaaatcttgtaatttgatagcatgatcgttttcattcttaatataatcattttgctgaaaacagaaaagaaaaaatccaatatataaacacttccatatagaagtcgcgggatgggagattaatgagaagaaaagacatgcagctattttataaaaatgctcgtcaatgcattatggtgatgaaataacatcattgggttttctataagttaataatcttattctcattaattagtcaaaatatacgattggaggtttatatatagattgactttgacctaaaccatagccgtaaatcggaaaatgacaatggtttatctttgtgcaatactagttcaaaatgcaataatagtaaaaaataggaaacgtagggccttctccattagtgtataaagtactcatttctaactttttaatatatctttgtgccaaaccacattatgacctcaaaactacttcctctcctcctcaatctcatcttcctcttcttctttccccttctaaacgcatccgaacaaaaaccttgctacagtttctcatgtagtcaagagagcgtcgttgctcgtttccctttctccctattctcctatcaacctgagtcatgcggctactcaggattcaacctcatatgcaaagatgatgccaatactaccttaaagcttcctaagtctgaaccctttcttgttaaggagatcgactatgaaacacagcgtattcgcctcaacgaccctgagaattgtttggccagacgacttcttaactttgacccttcaggatctcctttttcttttcttcgctctcgtaactacacgttcttgatctgtcctaaggaagcgaacatcactgcatccttcagagctatcgattgccttggtaataccacttcctccttctttgttgtgcagtttgagaatctcggttcgatgccatcttcttgtcacatctttaagatattacctcttccattttcttggtttgtcgcctacacgacataccctgatggccaaaacagtcgagacatgtggctcaaatgggactcgccggattgtagagattgtgagaggagaactaattcaagatgtggattcaaaaacaatacttcccatcaagtcgaatgcttcagttctgttaaccctggtgcgtacaatctcaattcttctctgttcttttgtacttcacgatattccaacttgaaacgacatcatctacttttgaaaaagttctttcccaaagaatccataaatggttgaaagcttcaaatccaaggagttgttaattaaacaaagaaatgaatctagttggctttaaataatgacattaaaccattgacttgattagtaaatcaatatattttcaaatagcaaacatgagagaatgtcgtaacattagaatatatgaatacttgtacatacaagtttcaccgttgacccgttttgttgttttgaaaacaggacttcacaacacaggcttacaagtactaaagataatgtgcctctccctagtcggaccactcaccgccttgactttttgtgtcggtcttgtcatgtgcagttccgagagagtctcttcacagatacaacaagcagtggttgcacgcctttctggatccgtaacgtcgcagccaagcaacgaagtcgcaaggataggtctcgatgagtctacaattgagtcatacaagaaagttgagctaggggagagtaggagactcccgaccgggtcaaatgatgttgtttgtcccatttgtttgtcggaatatgcaaccaaagaaactgttaggtgtttacctgaatgtgaacattgcttccatactgaatgtattgatgcgtggctcaagttgcatagttcctgcccggtttgtcggagtaatccatctcctttgcgcgattgattgctttgaatagtcttgtagcgtttgtatgtaatttggaatttggatctctccataaatgcattacaaactgtgtcaaaactcaaaactaagcccaaacgccaagtttattagaaaagtaaaaatgcaaatgagaattcgtagattttcctcggcagattctatgaaaccacaaaattgggaaatttcatgggctatgaggaaataagtgattaattctatataatatttatcgataaattaataattaatttataaagagattattttaattttgtaatttttaaaacaattctatatggaaagtagttttttctttgtaattaatatatttctaaaaccaattacaagtagataaataattatttagtttaaaattttttatcgatgtaataaaaataataaaaatgaactcttccaaaaattaatacaaatttatgtaaaaaaaacaatattaaaattctatttcactaagaaaatttatatataatattttaaatatatataataataatttatagatgtcatatatataatattcttcgtccatatttgttagttatttaaaatcgtaatttctaccatcacaatttttactaatcatcatttataatatagtcaaagcccttataccaaattcatataacaaaagtttatattgtttagaggcagaattatcaataattaccaatcggctcctaacttatttaataacggttgaaactgtatctgtgtttgttttgtttcagcaaattcccgcatcctttgcgtttaaaccagtcctcgttaattgaagtttataataataccccgtccgagggtatgataagtaggtgaacttatctctctgactttggtcgctttcactacactacactagactgtccattagcggattaaacgaagacgacgagttaagcttttgctgacttgcaaatttctcattcgtcttctttctccaaatctcgatgccaatttagggattctacttgacgttccgtgcaatttcttcttctgcgctactagaattgatttctctcgaaccctaaatttcctctggacctcaatgcttgtttgtttctaattacttggttcaacg

SEQ ID NO: 13248 - DNA, 3000 bp, Unknown
  misc_feature (1)..( 3000): cDNA_ID_2713302_gDNA_ID_2214608_Annot_ID_135702 3000 nt of promoter + ATG
ttataattggtgtaaggaaacgggtgtggcgagatcgtctgagtatccggaagttcagaggattacaagcaagttgttggagactttggaagagtttgttagagatagggcaaaaagagggaagagtcccgagaggaaagagatcgaagctcctcctccggtagttgaagaagaggagcctgagcctgatatgaatgagatcaaagctcttcctcctcccgagaattacactcctccacctccgcctgaaccagaacctcagcccgaaaaaccgcaatttaccgaggatttagttaacttgagggaggatgaagtcacagctgatgaccaagggaacaagtttgcgcttgcactctttgctggtccaccgggtaataacggaaaatgggaagctttctcctcgaacggagtgacctctgcttggcagaatcccgctgcagagcccggtaaagcggattgggaattggcattggttgaaacaacgagcaatttagaaaaacagacagccgctttgggtggtgggttcgataacttgttgctcaacgggatgtatgatcaaggaatggtcagacaacacgttagcacctcgcaattgacaggtggtagcgcgagcagcgtagctttacccttacctggtaaaaccaacaatcaagtattagccttacctgcaccagatggaaccgttgagaaagtgaaccaagacccattcgcagcttcactaaccattccaccaccttcgtacgtgcaaatggccgagatggagaagaagcagtatctactgagccaagagcagcagctatggcagcaatatcaacgtgatgggatgagaggtcaagccagtttggcgaagatgaacaccggtccagttccggcttacggaatgccacctgtcaacgggatgggaccgccaccgacggggtattactacaacaatccttactgattcattcttttttgcacccattcatatatgtgtagatgactcgtcttccacctttgatcttgtgtgtgttttattatatcccctcggattgtcgtaaaacgattccatcttcttccttgtctctgctcgagtttgatttatagtttatgtacactttcttgagaatcttgattcccttctgtataacattttgatatcattcatgtttccactgtttaacttaagaacacttctgtcggatagtcttaacttgcaaagtctccataggacttattatatttgggttgtgttgtccaaaacaaacaagtgaaacatagccactctttcaagtttgaagccattggttcatttgtacattattaggtgagacagatttgtcgctttcgtatatttctttctaatattccaggagatgtttactataaattaaattcatcttttttatagttgggattggaaaatgaaagcacgagaagtctctgttagattaaaagagttaggtgacccaataggttatatataatgatagataatgtgtgaccgtccactaccatccataagtatgtataatgacaaattctttatattatttgcttgtggagaataatacaaaagaaaagctaagctggagtctcttcatgaccaactcaaataagggtgtctcatttttgtaaacaggtcacgtacacgtttctggataacttaatttgatttatcattatcactgttattataattagacatggtcacatggacaatacccgatgaaaccgaaccaaaaccgaataggttttaattactgaattgatcttaatttttatatccaaagaatcgcaaccaaatccgatatctaatagatactctaaagtatcgggaatataaatatttatcttaaaaatattatttatatttataattgtaatagtccaatacaaaaatgatattttaattaaaatgatatcttcttaatatatttcttatattcttaattaaaaaaaaaaaaaaaactatcttaaatgatatatacgaaaataagaataatcattatgaaaataaataaaacaacggaaaacttataatacgatacaatacattatcaagcacacaaaacaactaaaaacacataacttaatcagtacaaaatttgagaaattcaattgcttaccatttgagaaattcaatcgctctaccattcgtaacaattttattatccgttgaagtaaaagaataagggagtgcatgaaatgaatatgctattacagattaataatgttgacctataaaattcgtgatagattaattcaagttctaaagtaagcccaattatttttgtttcaaaaaaaaaaagaacatgcccaaaactatttttgagttgattttactttttttatccaaaagaaaaattgttttccctaaggcctccaattattgggccggggctgttaacagaagcactaaaaagagctctatactagaatcactgaagcagaactctccctaaagacctcaaattattgagcagaactctagtatacgcacacggcgtgagaatgaagaatcagataaatcttctccataatgtaatcactttgacaagtccttaactttgaagtttgaacttcgacaaatccacaaacaaacaataatcaatgcccactttatcacgtccccaactttgaactttgacaatcaacacaaaataatcaatgccacacatgttattttgtaaagctctaagggctacaaacttctccatcccccaatccaaaaacgtatcaaatttgtctcaacatacatattaaaaatttcaaactgatgtattccaatccaaattttacgttgatgaaatatactaacgtagatttcacgtcatgatttgagtggctcttagacattatcttggcaattacgcatacttttctgctgactttagttatagctctgacttcttataagtcaagttatgtttcaatgaaaaatgaaaacccacatctttatttctaccaaatttttctctcacttttcttaaacaaaatcattattcttaaaaatatttc

SEQ ID NO: 13249 - DNA, 3000 bp, Unknown
  misc_feature (1)..( 3000): cDNA_ID_4262177_gDNA_ID_2214608_Annot_ID_135703 3000 nt of promoter + ATG
gtcagatctccgttgactcagcaattccgaagaaaaagtcaacgagtcgtcgcggcggtggtagccatttcgactctttttcctccccagccaccgcgtcgagttcaggcggacgtagccccgtagttgaaaccgggttattttcaagcccggatgagaaccagtctgaaccgggtcaaaaagccgggtttaattggtggaagagaagacggttaagcttttctatgacatggagaagagaaccggtacgcatttgactttctgaattttcaaactcggttcgattttgtccttaaccggaccggtttattgtttgcagagagaggatgaagttacgaagacatcaacaaaaccatcggaggaactagaaaaaccggcgacggagataccaatcgaggcaaacaaatgggtaatgaaggatttagtgagccgcgatggaaaatcgaagctgaaatcggaagtttacttagcgtcgattgatcaaagaagcgaacaagccgccggagaagcagcatgcgcggcggttgcggtggtggtggctcattggttccacgcgaatcctaagctcatcaatccttcaggaacagcgttcgattcactaatcacgcaagggtcttctttatggcaatctctttgcgacaaagaatcgtatctaagattgtttccaaacaggcatttcgatctggaaacgatcgtttccgcaaatttacgaccggttagggtttgtaccgataaatcgtttaccgggttattcagcccggagagatttgcttcgttggatggtctgatgtcgtttgatcagatttgggacgaggtagagaaagaagtagcgttagcctcaagtaatggtgaaactagggtttatattgttagctggaacgatcatttcttcgtggtaaaggcagatttagatggtttttgcgttattgattcgttaggggagagattgtttgaaggatgcaagcaagcttacattcttaagtttgatgattcgagtttgatgtatgagaaagaggaatcgtcggagaagttggtttgtgagggtaaaaagtgttgtagagaatatataaagagctttttggcggcgattccggtggcggagttggcggcaaaggaggagaaagggaatgtagtggatgtgtctcttcttcatgagagacttcagattgatttgcatcatattatattgactagtagtgattagagttttttttttttttttctgactattgattggtgactcgttagtgtagatttgttaggatggtgagagatattcaatgggagtgtagatttaggatggtgcatgtggttcgttataatgttcttgagagaatgtgttggatataataagtcaagaaaaagttatcatttgtcatggcttaggtactaaaatccaatcagggtttctttttgacatgttttcgagtacattcctcagccgagaacaaaacccgaacccaaacctaatgtaggtgatgttggaaatacttaatcctacttgacaagatcaagagaagatgagaagaagaatcgtaagaagagaagaagaaagaagatgtttgtttgtgtaatgaagaaaagaagaagaagaagagtcaacatgaaaggaagagaagataaaggcttttgggccatgttgcacatgaatccttagtcttttttcctttttttttggtcaacgaacgagcgcatgaatcctcagtcaattattatatttataggctaaagatagtcggtagagattttaggtttgataaatgagataaaattaaactttcattttatcaaagttataattagagagatttaactttttatcaaatattttgtgtatgtcgggtttgcacattcaaatattttatattatgtatgggtaaaaactttcaaggtcaaaagcacaagacaaataagtgtaaaaaataatatgaaaggttatgctaaatgtagatagaaattccagaaattgaaagatattgtgactggttattgaaattgaatttgatcctgacacaccacttcattttgttttgttatacatacggagaggccacacacgtctctttttctttttctttctttgtagtttgtatacaaaggaaaaaaataaaaggagaccccatggcgggaaaatacgatcgtttgggtgagttaaaagcattcgacgagatgaaccaaccaccacaattttcttatctaatattgcgattttaatagtatataaattttataaaatatctcaacctaataatttaaagctttacacatatcaaacacgtccaccacaattttcttatctaatattgcgattttaatagtatataaattatctaaaatatctcaacctaatagtttacagctttacccatatcaaacacgtgcagtggaacttctagaccggtgaacactaaacagatttttatcatttattaacctaaaagacaactaataaatatttattaacttaacagatttacacgtctctttttcttatggcatatcaacatcaaacaatattatagcaaagataatgtgattatttggttattgtaattgaaattaatccatataccaattcattttgttttgttatatatatcgagaggttattgtgatttaaaaaaaaaaaatatttaatcatctacccagtaaaactacgccacataaccaccacaataactctaagagcacttcttaccttgaaacgtctcttacttaaattaataattaaatctttaatttttatcatttattaacctaagaaacagctaataaatatttattaatctaagagacttacacgtctctctttcttataacatatcaacatcaaacaatattatagcaaagataatgtgattatttagttattgaaattgaaattatccacacaccaattcattttgttttgttatatatatcgagaggcctaagacaacacttacacgtctatctttctttcctttgtataccaaaaaatataaaataaaaaacactatg

SEQ ID NO: 13250 - DNA, 3000 bp, Unknown
  misc_feature (1)..( 3000): cDNA_ID_2713298_gDNA_ID_2214608_Annot_ID_135704 3000 nt of promoter + ATG
taacattaaaaagcaaatgaaataaaactcctaatcagtttgagtgtgagttcaatgcaaagacctcaacggttataagtattcaactagaaatgattgtatattaataaagaaaacaaaaaagagtcaaagtctctgttaatgtacacatttaaaagtcatgtgacatgagttaagttgagtgaccactatcgtttactttgaaattgtatgaaaagacaaaagaaggtctttgaatatcggataatatatgtgtggcttaagatgcatatacttctaccacgaagtatgttaagtttaagtcatgtgaaggatactacttttgtagccatgtggctacctcaatagtcagatgaattttgacccatgaacatcttccctttcattggattgggcaaaaaaaaagggttcaaagtctacaatactggattgtatgattgatgtccaaacacctcaatgtaagctttaaaatgcagtatgaacacaggtgcattggtggaagaaaaacaagtcgaacaaaataataaattttaccagctcatgtgcaatttctttgttttacatagatgaagtctcgtcacttgttgattaacttaagttgaatagtgaatccaataccacttgatctatagtgtttatgattgaagaaaaagcaacttatgaattccaatcgctacaatttcataatcatctcaattccaaacatattcaaattatacctaaaccaagtcgcattggtctagctagtggtaaaagagagaaaagtttctgtaatcttggttcgagtaacattgatctccagggttcgaattctaacatggttttcccaggctccgctgagttggatgccatgtcacctgacatgttaattgaatcaataagcccccttgtaggtgtgccgttagctcttttctttttgtataagtgctcttttgctctctctgtttcagagcttggtgtgtttttgggttaacattgcattatgtaaaccttttttcattggtataaatttaacattagaccaaaaaaaagttagggacagcatcattaaatattaaaaattagaagttttttccaaaaaacacaattctttttttttttttatcagatgaatattttaccgtatattgaagaaggcgataaattcctcaagagaattaccgtttagaaaactaagttctaaaatctagatcaaaccagtttgatagacaaagttccgatccagttttggtttggtatagacatttctacaacaatggatgaaaatagttttttttttgtttggattaatgactttcaattttattctgttttatttgttgttttacccatctctaatactatgaatgtattctatttcaacaggtaacataccctatatattaagcgcttcttgtctcattaaatgtggatttaaaacatgaatttaaaataccaaatataattaggaagttaaatttggtggaatgataaaaatatgtgtgagggcaaatattgataattcaacggcgtccggaaggtgccatgacatccatcttaacagattgacttatatattagtggcagtcaatgtatgcattaagtcaccttttattaattcagatatgaaatttgaaaatttatacgatttcaccttttatttatacaagtacttcacttaatggtttttcatggtttggatatgaaagaaaaaaaacgttttcccctcctttatttagaatctctcaaacatatatttgcgtgctgattttagctaaagtatgtttgcgtactacttttacgcttttagctatagtacgactgcgttgtggtcctttgtcatccaaaaaaaacacagttgtaaatgtactagttcctttaccattccaaatttgtatctcatctacacttattgtacttattccatttgatctgcttatcaaattccacctttattgcttgttccttgttcgaaattgtagattatagaaccaatattttagcacaaaaacgctgaaatgcattaaaaaagttatcaaaaaacaaacacagagaaaaaacacgtgctcgtataggaaataaatcgtcagaaacacgtggcaggagaatcgtctgttctcctctacgacacaagtaggaaggaaggaaggaagtacataacttgcttggagtaaacaaatgtgttcacgtgcattttgttgctttatccgtgttgacgtggaaacgttttactggtcttgctgatcctttaacgaaaaagcattatatgtactattaaagaacaaaaaaaaaagcattatgtattttggaaagaaaattaggattcctttgtcctctttgaacgagttaacttttttttatcatataatagaaaataaatccaaagattatatttccacgaactttcataattttttccaaatgttttattgaaatattaaccattatttaacaatttgaagcaaattttaaaatgatgaaaggagtagagatgaaccagtccgaaaataagttctcttgtcttgcaaaagttgtttagacagagaaagtttcgcttgtcttgtcttaaaccaatgtaccaaactcatccatccaattagtaataggcacgtcagcattagcccgcggaaaccagaccatgtgagtcacacgtgatgtttttaattccttttatcgatagcctcaaacgcggatttgctgcgtttgctgaccaagtcgctctttgtttggccatttttaattgtgttttcttggagggtttctttctttgctgtctttgattcttttttaatgttctctacgtttccttagccttatttagaagacatacaatgcgtatgatacgcctctacgtacacatttacatacatctatatataaaccaacaaattatcgcctcctttttagtcacacatttatatcaacacctaaaagaaacaaaaaaacagaggaaaaaccccaaaaaaaaaaacagagaaagaaaccctaaaaaaaacagaggaataacttttgaaatctatg

SEQ ID NO: 13251 - DNA, 3000 bp, Unknown
  misc_feature (1)..( 3000): cDNA_ID_2713294_gDNA_ID_2214608_Annot_ID_135705 3000 nt of promoter + ATG
tgtttttttttttggggtttttcctctgtttttttgtttcttttaggtgttgatataaatgtgtgactaaaaaggaggcgataatttgttggtttatatatagatgtatgtaaatgtgtacgtagaggcgtatcatacgcattgtatgtcttctaaataaggctaaggaaacgtagagaacattaaaaaagaatcaaagacagcaaagaaagaaaccctccaagaaaacacaattaaaaatggccaaacaaagagcgacttggtcagcaaacgcagcaaatccgcgtttgaggctatcgataaaaggaattaaaaacatcacgtgtgactcacatggtctggtttccgcgggctaatgctgacgtgcctattactaattggatggatgagtttggtacattggtttaagacaagacaagcgaaactttctctgtctaaacaacttttgcaagacaagagaacttattttcggactggttcatctctactcctttcatcattttaaaatttgcttcaaattgttaaataatggttaatatttcaataaaacatttggaaaaaattatgaaagttcgtggaaatataatctttggatttattttctattatatgataaaaaaaagttaactcgttcaaagaggacaaaggaatcctaattttctttccaaaatacataatgcttttttttttgttctttaatagtacatataatgctttttcgttaaaggatcagcaagaccagtaaaacgtttccacgtcaacacggataaagcaacaaaatgcacgtgaacacatttgtttactccaagcaagttatgtacttccttccttccttcctacttgtgtcgtagaggagaacagacgattctcctgccacgtgtttctgacgatttatttcctatacgagcacgtgttttttctctgtgtttgttttttgataacttttttaatgcatttcagcgtttttgtgctaaaatattggttctataatctacaatttcgaacaaggaacaagcaataaaggtggaatttgataagcagatcaaatggaataagtacaataagtgtagatgagatacaaatttggaatggtaaaggaactagtacatttacaactgtgttttttttggatgacaaaggaccacaacgcagtcgtactatagctaaaagcgtaaaagtagtacgcaaacatactttagctaaaatcagcacgcaaatatatgtttgagagattctaaataaaggaggggaaaacgttttttttctttcatatccaaaccatgaaaaaccattaagtgaagtacttgtataaataaaaggtgaaatcgtataaattttcaaatttcatatctgaattaataaaaggtgacttaatgcatacattgactgccactaatatataagtcaatctgttaagatggatgtcatggcaccttccggacgccgttgaattatcaatatttgccctcacacatatttttatcattccaccaaatttaacttcctaattatatttggtattttaaattcatgttttaaatccacatttaatgagacaagaagcgcttaatatatagggtatgttacctgttgaaatagaatacattcatagtattagagatgggtaaaacaacaaataaaacagaataaaattgaaagtcattaatccaaacaaaaaaaaaactattttcatccattgttgtagaaatgtctataccaaaccaaaactggatcggaactttgtctatcaaactggtttgatctagattttagaacttagttttctaaacggtaattctcttgaggaatttatcgccttcttcaatatacggtaaaatattcatctgataaaaaaaaaaaaagaattgtgttttttggaaaaaacttctaatttttaatatttaatgatgctgtccctaacttttttttggtctaatgttaaatttataccaatgaaaaaaggtttacataatgcaatgttaacccaaaaacacaccaagctctgaaacagagagagcaaaagagcacttatacaaaaagaaaagagctaacggcacacctacaagggggcttattgattcaattaacatgtcaggtgacatggcatccaactcagcggagcctgggaaaaccatgttagaattcgaaccctggagatcaatgttactcgaaccaagattacagaaacttttctctcttttaccactagctagaccaatgcgacttggtttaggtataatttgaatatgtttggaattgagatgattatgaaattgtagcgattggaattcataagttgctttttcttcaatcataaacactatagatcaagtggtattggattcactattcaacttaagttaatcaacaagtgacgagacttcatctatgtaaaacaaagaaattgcacatgagctggtaaaatttattattttgttcgacttgtttttcttccaccaatgcacctgtgttcatactgcattttaaagcttacattgaggtgtttggacatcaatcatacaatccagtattgtagactttgaaccctttttttttgcccaatccaatgaaagggaagatgttcatgggtcaaaattcatctgactattgaggtagccacatggctacaaaagtagtatccttcacatgacttaaacttaacatacttcgtggtagaagtatatgcatcttaagccacacatatattatccgatattcaaagaccttcttttgtcttttcatacaatttcaaagtaaacgatagtggtcactcaacttaactcatgtcacatgacttttaaatgtgtacattaacagagactttgactcttttttgttttctttattaatatacaatcatttctagttgaatacttataaccgttgaggtctttgcattgaactcacactcaaactgattaggagttttatttcatttgctttttaatgttacttgcaatggaagggaagcttttcttgtgccaatacttgatatgggtg

SEQ ID NO: 13252 - DNA, 3000 bp, Unknown
  misc_feature (1)..( 3000): cDNA_ID_2702449_gDNA_ID_2214608_Annot_ID_187289 3000 nt of promoter + ATG
cgaaagacaagattttgacaggtatttgtacaagtactgagtcggtcaacaaaccccgtctggactctggacccgaagtaacccaacaaacgttgcgacaactacattagcaccaccaccaaggcaccaataatgcaacgtaagagggacgcagcaaaactgtcgcgatgtgagattcacgcgctctaatttaaacgttgactctttgtttcatcgttactctctcccatttatttacttcgcatactctcttcgttacaagtttccatttaattactcttaagtctctaactaatagctttagggattcgtcattaatttaaggcaacgtaaacttaaagagtttcgactaaaagccgtttcaggaaacatacatcatcacatactttatctaaataactggcttattaattttataacaaaaatgacgttatttagtgttaagatatacaaatatttaatttttactaaattagttaaggtaaaattgtgttcctttctgtgagttttccgcaatattaaaaaaccctagagaaattaacaaaacgtaattgactaaaaaaagagttcaaaacaaaacatttgttacatttatttcataatttaaagactaagtataaatccactagaaaacagatgattaaaaatgcgggtcccacaatacgccaatcgtcaaataatcgcgcaccttttcgccacgtagcataacaaagtcacgtaagcccttcctctacattacaagaccaaactcaaagtctctttctcccccaaacccaaaaacattgacccaaagagagagagacttctatcgtgcgcacctctctctcttaatcctttatcctgcgcaccaccaccaccatcttcttctccggcgaaaacaaacccaccgccatggggaaaggtcgtgcactttccgacggagtgatcaaaaagatcatcctttcatacacctatgtcgcaatctggatcttcctcagcttcacagtcatcgtctacaacaaatacatcctcgacaagaagatgtataattggccattcccaataactctcaccatgatccacatgggtttttgctcttccttagctgtgattctcatcaaagtcttcaaagtcgtcgagcctgtttcaatgtcacgcgagacttatctcagatccgtcgtaccaatcggcgcgttgtactcactttctctctggttatcaaactctgcttacatctacctctctgtttccttcattcaaatgctcaaagccctaatgcctgtagcagtttactcaatcggggttttgttgaagaaagagactttcaaatctcagactatgactaacatgctttcgatctcgtttggtgttgctattgctgcttatggtgaagctaagtttgatggttggggtgtttttcttcagcttggtgctgttgcttttgaagccactaggttggttttgattcagatcttgcttacttctaaaggaatcaatctaaatccaatcacttctctctattacgttgctccttgttgtttggttttcctctctgttccttggatctttgtggagtttccagttcttagagatacttcgagtttccatttcgatttcgtgatctttggaaccaattctgtttgtgcgtttgctttgaatcttgctgtgttcttgctcgttgggaaaacctctgctttgactatgaatgtggctggtgtggttaaggattggctcttgattgcattctcgtggtcggtgattaaggacacggtcacacctatcaatctgtttggttatggacttgcctttttgggtgttggatattacaatcactgcaagttacaggcgttgaaggctaaagatgcacagaagaaggttcaggcaagtgatgacgaagctgggaagcttttggaagagagggaaagtgaagctaaacgcaacgaaacccaagattgatctgttctgattcaagaatgcaatttcaggaaataagagcttcaaggttagaatgatttgggaagatggattttgcattttcataggtatgattatcattgtcggtgttcgttcgtctacgttttagttttgcgattatatttttaagttatggctgattatattacatagtgatggatgggtgtttaattagaggttcatgaatcttttgaactccattgtatcttcttcttttgagttgtattttgtttcttacttcctcatgaatctatctttgtgggtaacaattgttttagtagtacttctttatattttttccctccattgagattgttaaatgtcaaattgaaagtcccttttacgtctctctttatccaatgaaaccgttgtatgttggaaggcacaagaagatggtcaacaccaaaaactttttgatattttatgggttatgtaggatcatttagtagcaagatccacaatttaaggaaataaacaaaatacccataccgacgttcccttgcaataatatgacacatgacaccatcatatgaatacaatggtctcatttaacctctacaaatatccttcctttagtctcaacaagtttctgtcctgagtaaagggacaggccaaataggtgttagataccaaactaaaaacattcaaacaggctcacgggttatggatttctcatcagcgaatatttgggaacttttaacacaattcggatctactctcgcttggcataaaagctgttttgttccagaacagaattcataagcatgcattggtgcttggtttgtcactttgtgaaatgtgactttgaatagccatcctacctcttggcagaattgtttttggatttgggttatatcctatcaaattccaaaacttaacaaaccagttttgtttgatttcaactggaatcttataactagctcatagttcctacatatcttttttttgtttgaatctactacatatcaggcagtagtattctagactcggacgaaactttattagtccaaattaggctgcaccaaacgaaatgcagatacatcatac

SEQ ID NO: 13253 - DNA, 3000 bp, Unknown
  misc_feature (1)..( 3000): cDNA_ID_2991239_gDNA_ID_2214608_Annot_ID_187287 3000 nt of promoter + ATG
atctttttttttttgcaacatcacaaccatccattaattattttagttacttaataagaacttctcatctgaatgcatatattattggagaatgaaagaaaccaacgtaaatattttcattaattaatagtatgtaagtatatgtatgtaaaaaatgtgtagaaaaaaggaaaaaagcaagcaagtgtaaggcatcgaccacccgaccacccttataatctagtgtaaggttgccaattgagctaaaagagtaacaataaccaatagttactaaatagttgttcataatcagtgtggggcacgtgccccaccctcttatacactagatccgcccctgaacctaacagtcactgacttagaagtacgaagcttacatgtacacttgtgaatggagactttccgatctcattgcataaatgacagtgatgttctggttttataataaatcaagtattcaaccgaatagacaagaggaaatacaacaatgccattatctctaacatttctcgtcaaaaaacttgtcacccggggttgttttccggaagaccatttaactcttaagtcttaagtggtcgcgcaaaagagacggtacaaaaagaaatgtaacaatagagcattgtatatgacatatttagagtaatttaagtgtttgtatgtatatgttctctacaatgttagagaaatattctcagatctaatgcaaccctagcatcattatcatcaacttcatgacatgcaactttttctttaaaaaatgtagtcgtccacggtttctcaagacattgtacactttaacaaatcattttttgcagagtggtcatgtaccttttgagaaaatgtacttgagctacaagcctacaacacatcgttaatgaatttttcagtgagttctttagaaagtcccatgactgtatcaacacctcccaccacggaatcaataaaaggtgaaataaggggatgctcaagcatcaaacctccagcaaccttgaaagttattgcatcatcaataagatcatcgatgacatgttctggtatctcatggaaataaacctctgctttgtcccatcctattcttccaactccagttttcaagtttctcacaaaaacagattgcacaacgccaccgtgtgaccccgaatagcctttgataaactcgcgagcttcttctttactagttggttattctctaataacacctttgtacacaacaacagtatctgcagtaatcaatagagttggttgagaatcttgtgtaaactggttttcacctcctaatttcaatataatctcatttgcttttgcttcagcaatagtcacaaccaaatcttcaggcttctctttcctaatagctttctcatcaatatctgcagttacaatagtgaaatcatatcccatttcagccagaatctgctttctcgccatcgactgagaacctagaatcagcttatatccgttctccatcgccttctttgccattctcgtgttgtactgtaagcggaaagagtaaagaagaaaaatcaacaaacaaaaagaagattgaacaaagaatgttgccatcttgtaacttcaaaattttgtatagcgtacattatccaacaacaagatgtcacatactataattatattgtcatcataatatagaatgctaattaatcaatagagaacaatagattactcttatctgtcagcagaacaatatcatttctaataaccattaactgtctgtaattaatggtattctgtttctcctattagctattacaccaaacctggcacacagtggacaagtcctctccatggtagtctaagagaaagattataaaccttgaggccataaacaaagaaagtagaaaattttccatgggctatcagataaattactagcaaaagcttccactaaaaccatcacacttggctaaaagctaaaatgttaacgtttgacacatctacagattttgataagtgtagtcctaaattgttcgttgatttcatacgtataaacacaatagaagaaacacgtttcttccagaagaagtaagaaaactctaaatatgcaaactacacaaggaacagaacaatcagaaaagcaaaaacaaaatgcatttacagtgaagaaattaatatgtgaagattccattagacgcgtcaatggacaaacagttcatgatgctaattgtacatatatatgatatatcaatgatccaataaaaactgctgaggcaaaactctaggaacagagaattagggttttgagattcagcagattcaaactcaccaaaagagattccttaattataggtaaacatacgattttcgaatgtagaagaagattgatacgagggaatgaagctggaacgagagctggagagaaaacaacagatggctgtaattttgcctcctcaagtttcctggtgttcggcctcgtttgccgattagtttggtttggcccatttctttatttcggttatcatctgtatttgggccttagcctttgtttttgtattcattaaaaatcaaaacgaataataagtctaatattaaaaaaggttattattattttagatatcataataatttaatacataatcacaaacaaatattattttataatataacacgtaaatacaaaaatttgttaaaaatgagttctctgcaatatcgggttcttaacccagtataattagtaatacaaatatgaaaataaggaatataaaatgatcttttaaaatcatatggcgaattggctattgaagacttttcaccaaataatacaacaaaaacttcgagactcataaaataagtgatccaactaagtcgtcgatgactataagcttttaagtctctcgctagactgtccacagatttcttcatcttctttgtctcttagcctttctatattatccaccatatctttaaatttcttttataatttgctgtatagcctatataaatgcataaccatgagtgacactaataagcaaaataagagggaatattaag

SEQ ID NO: 13254 - DNA, 3000 bp, Unknown
  misc_feature (1)..( 3000): cDNA_ID_2702457_gDNA_ID_2214608_Annot_ID_187285 3000 nt of promoter + ATG
agagcaccaaatctcaacactagtctttctgaaactttttacaaattttttatgaaaaaattacactaagagaggaaataaaataataaacttataatttccacacataaaatgctaatgtcttgggtcgtaacatgagactcttatgccttttcacgtgattatgatcagttcatcccaattggtcaatatactagaggaatcagctagaaaaacgttgtactagtcaataccttcagttcatcccaattagctaaaacagaacacaagaaaggtcttgctaaagagccaagtcccaaacgacacgaattcgacttggtctttgtcaatatctcaagtccaaaatataatactccttacgcgttgatccggtataatctaattatgaccaaaacaaaacaaatactccgtatttgtgattagattagcaaataaaatatttctcgttaactttctctgtttttttttttgttttttttgggtaaggactttctctgattatattagttaactatttccacaaattgtgtattaaacatacaatttacataattgtggcatgtttttgcggaaccggcccactaactccataatcaactggatcattaattatttagtttatcgtaattttgtcatagcttcatggtggcactaactcaatatgcatgaacctcgtctagactcttacagtaggttatagttagtttaaagttgtcgctgctttttgatcaagaattctaaaattagttgagcactgtatagtttattaatttgtttctcactttcactattctttcctttaaaacaaaacctactgaataatattttgaacccatccaatgttcaatgactgaaggacatatacatggtaaacgttggtacggagatctataacaattttcgtgacaaaataattaaacatgtaacaaaaatatcaatagacgcatgcagtcagaaagagagaagatcattttctcctctagggactaggggtgtttaatctgatcggaaccgaaatattcaatccaaaaatcgcatcatttcgaaaatagagtttaaatgaatccatgttttctatatccgataaatgaatctgaatacaaaaatcgcgccaaaaaaaaaataaaaaaaaatcttgatctaaaatcgacatattttaaaaaagtatagatacttttgactaaaacaagattccaaactgaaattgtaccaaattttggtttgtttcaacgatggtctctatcttgaaattaatttgaattttatcataagaaaaggaagcataaaaatcgtatattactaaaagcctaaacgattttaatgtgactttttaacaataaaataatgagctagttgatattgagacatgaagaattgcaataataagaacatgggctgtgtaagcaatgaaaaggatatataatgcttccacgaccacttgggtgtcttttgttcactttctcttttaataacatgtttataatgggcaatgggtcctctccacagatacattcagattccaattttaatcatttacgatttgaccatcttttttacaggtagaaggttgaatatggaatcatgatatgtaccaaggaaccttctaagtcctgatgctggtgtaggagattattgtattggtgattcaatcgtagaagaatttgtatgttcatcaaatctgattttttctatctcaattttgatttcccacatgggggattttgaagatatcgaaataagatgaagaaaataatacaaaatttgtcatcagtcggtaataagttgattatcgtgttaccatttgtgttggaacgactgttctcgtatattaatgtgcacgagactatagaaacatcagtatgttgggtatttggggattagatttcaagtaagttatggttttgtaaaatggagttgttgccttaacgcatctctaaactatcagtaaaactttataaaaagtctcggttataatttttgttgcgtttacttttgtaaattttttcatatcggattatcattatcatttttccctttttcttttgatatccatgagatttggattaatcggaaacaaaagagagttggagtagtttaggatccaactagtttagcatgattatggttttttcttgcgttacattttactttccgccaacacctctttaacacacttaaggagattgtggtcgacccggtgcaagaaggacggacaaagtggcacagagtcactcactttttgcgtttgcatatttttgtgggccggggaaacaacttgaccacattcataagatagatgttgttggaagtctcatttatgtgaagtatagaactaggcatgatcttgcgtacccaattgggatcattagtacgtttatgagtacttacaagttacaacacacatgatttcagctcaaaactcccaagaaaaaaaacacacaacataaacgatgctgacgtcggccacaaacgtagcaaaaagagtaaggttgttccaggaaccaaacaaaaacaatttaatactataactaaactcggtaaccaaacacctcataacttgccttaacgcgctctcaaaggtgaaaaaaaactggtctatcttaagcaacttctttcttttgtgtgttgtgggaataaaataaacgaaattaaatacgaaccccaattctcagctcagatacattgcatgtgaaatttcaactaagtatataataactcatatcttgacctcttactgaccgatcatttcgttttcctgttttttttctccttcctctcctctctctctctctggtttttttttgccctatccatagggttttcttcgctctctatctcctcgatcttcatgtgcatctctctctttggtataatcggagctaattcgttcgttttcttcttcatcttcgtcggatctctcttttttgctctttcccacgggttttcgcttgagaaatcaagcgttttcgtttttcctgggagttttgagctcaaatcatg

SEQ ID NO: 13255 - DNA, 3000 bp, Unknown; identical to SEQ ID NO: 13249
  misc_feature (1)..( 3000): cDNA_ID_4262177_gDNA_ID_2214608_Annot_ID_187281 3000 nt of promoter + ATG

SEQ ID NO: 13256 - DNA, 3000 bp, Unknown; identical to SEQ ID NO: 13248
  misc_feature (1)..( 3000): cDNA_ID_2713302_gDNA_ID_2214608_Annot_ID_187280 3000 nt of promoter + ATG

SEQ ID NO: 13257 - DNA, 3000 bp, Unknown; identical to SEQ ID NO: 13247
  misc_feature (1)..( 3000): cDNA_ID_3028771_gDNA_ID_2214608_Annot_ID_187277 3000 nt of promoter + ATG

SEQ ID NO: 13258 - DNA, 3000 bp, Unknown
  misc_feature (1)..( 3000): cDNA_ID_2713290_gDNA_ID_2214608_Annot_ID_135706 3000 nt of promoter + ATG
tcacaggttgtgtttcaataatgttcctgaagctctctcacaacaaatttagcggccgttttcttccaagagaaacaaacttcccttcacttgacgtgttgagaatggataacaacttgtttacggggaacatcggaggtggtttgagtaactccactatgttgcggattctagacatgtccaacaatgggctctctggtgctattccaagatggttatttgagtttccttatttggattacgtattgatatccaacaatttcttagaaggtacgatacctccttctttgttgggaatgccttttctttcgtttctagacctttctggaaaccaattttctggagccttaccgtcacatgttgatagcgagctcgggatatatatgttcctacacaacaacaacttcacagggccaattccagacacattgttgaaaagtgtccagatacttgatctgcggaacaataaactctctgggagtatcccgcagtttgacgatacacagagcataaacattcttttgttgaagggaaacaatttaacagggtctattccacgggagctttgtgatttgagcaacgtcagacttctagatctttcagacaacaagctcaatggtgtcataccttcatgcctctctaatttgtcatttggacgcttacaagaggacgcaatggctctcaatattccgccctctttcttgcaaacaagccttgagatggaattatacaaatcaacttttttggtagataagattgaagtggaccgctctacttatcaagaaactgaaatcaaatttgccgcaaagcaaaggtatgattcttatagtggaagatctgagttcagcgaaggaattcttcgtcttatgtatgggatggatttgtcaaacaatgaattaagtggtgttatcccgacagagcttggagatctcttgaaactacgaaccttgaatctatctcacaattccttgttgggatctataccatccagcttctccaaactgatagatgttgagagccttgatctttctcataacatgttgcagggaagcattcctcagctactcagcagccttacctctcttgctgtgttcgacgtgtcttccaacaatttatcaggaatcattccccaaggaaggcagtttaacacctttgaagaggagagctacttaggaaatcctctgctttgtggaccaccgaccagtagaagttgtgagactaataagagtccagaggaagcagataatggacaagaagaagaagacgataaagctgctattgatatgatggttttctattttagtactgcttcaatttatgtgaccgcattgataggcgttcttgtacttatgtgctttgattgtccttggcgtcgagcatggctccgcattgtggatgctttcatcgcctcagctaaacatgtgttgccttagatctgttgagcttagttcttggatatttcagtgaaattttgtttatgtatggtttgagtgtttttgtagtgtaatttacgatgccttttcacttatgaatagttgtgtctctttatctcaattttttgttaaaatatttaaggttttttttgtctttttattgaatcttttttttattgaaatatttacggattttttaaaaggttttgtcctcttattacatgtcttttgcacttttgaacggttgtgtctttttaatgcaattttttgttgatatatttataaattctttcgaatgtatctttctatcgtatctttttgttgaaatgtttacgattattttttacaatcgtatattttcagtttacgtttgtgtctttatagttgtatctaatcatttaaagttatgtctcttcattatattttattgcatttactcgtcacaatttctcgtatgagtagttgtctatctaaatgtttgtgacttttgaactttatatatttgtcactttctaagtgaatcccaaatttttgttcttttacacaaatttgttttattataaatccaaactaattaatctgtaaagtagctccaagttctttactctctaaactatttttaaacatacattatttcaatattaaagaaattcctctaatttttgatctaaaaaaaataaaaaattggcatcttcgttagaatttttatacttttttaaagttgattaaaaattcttcatttctatgatcattccaaaatttgatttagaatatataatttttaatgaactttaaattttagattgcaatgtattttgatttattgttaaaaaaaactttttaaaaaaaaattatcttagtttatgacttttcgtttcatatttgtttattacaaacttttttgaaataattttctccgcgatgtcgccggggtctgcgtcctagttattagtacaatggaatcaaactaatgtaaaactgtgaacttgacggaaaaaaaaaaaaaatactgtgaacagcaaagggaaaaaaaaaaaagaaaaaaaatgtcagaacaaatccttctcctccattgagacagtgtacttctgcttcaatggacatttgatatcatcaaatcctgcgtcaggtgagaaagacgcttcgccgttgtcagagttccttttctttattctctgtagaaactagaggcaaaaaatgtcggaagttttcatgaatctgagtaacttgtatctgcttctgtttacatgtttctttggtccgtagatcgaagtagaactgtcacttacagtttaagactagtaagctcattactaaacaactgtattaacaagatttaggcttctttttttattagaatgtttagatttgcttctaattcagatgtaattttagtttattcaatctcaagaaccagacgatgagttatttacatgaaagataggcttaattaggttgtttctattggcctaagtgaaatgtgtgcctcctatgttgggtgttttaactaatgctgattgatatgtcatatgttgactgattatgttactgtgtttgtagtttacga

SEQ ID NO: 13259 - DNA, 3000 bp, Unknown; identical to SEQ ID NO: 13254
  misc_feature (1)..( 3000): cDNA_ID_2702457_gDNA_ID_2214608_Annot_ID_135707 3000 nt of promoter + ATG

SEQ ID NO: 13260 - DNA, 3000 bp, Unknown; identical to SEQ ID NO: 13253
  misc_feature (1)..( 3000): cDNA_ID_2991239_gDNA_ID_2214608_Annot_ID_135709 3000 nt of promoter + ATG

SEQ ID NO: 13261 - DNA, 3000 bp, Unknown; identical to SEQ ID NO: 13252
  misc_feature (1)..( 3000): cDNA_ID_2702449_gDNA_ID_2214608_Annot_ID_135711 3000 nt of promoter + ATG

SEQ ID NO: 13262 - DNA, 3000 bp, Unknown
  misc_feature (1)..( 3000): cDNA_ID_2702441_gDNA_ID_2214608_Annot_ID_135713 3000 nt of promoter + ATG
cttccataagccaaggttggccaaaaaaccaacaaaacaaacagagatatctaaattaacgttacatcaaaccctaaagtcaaaaagaaagaggaaaccaaccccatcatcggaatcgtctctgttccgaacaaactcatatctccggtaagatcccgcaaccatgccggcgttttgctgcaacgcttaagcgcttaaaacgtcttcgtaatgcacactccaaaagaaagatctaacacataaccctaaaaattcgccatcgattcaaatgcggaatttagagagctctttaactacattaagtctacaacaatctatatctactctgtcacagtctcactttgttctcttctcgtaagtgtccattttattgtttacgtttccatatattttcttttcttgcgaattaaatgttcacacgtggaagtcgtcgaccgttctaagtctctgtcagtggccataacgtttgccaccattaccttaaaatcacacaaactcataatttaacaaaacatgccaataaaggaaaactatatagtaagatggaaatatataagatacacgtcacacatagttttaatttttaggttaatacatcaatatatacgagactgatggttcaccgaacgattgtggtattttttttctaaattagaaacttaggatggcttgcttggctgcatctaagatagaatcagtctttaataaataactaagttagtatccatggtttgcacggattaattttttaatttgtctatcaatttcgcttattgatataatactaatttgactaatattgtgtttgtctgtaaatgttaatttatataatttacgaagttaaaagtttatcaatttattattggtatcatttaaatatagtatcaaaatgagtttgtatcgattggagagacagtacaaactggtttacatctacttacctttgatcacgagaaaaaaacaatataaacatattcatagatcttcaaacactttaaaaaaaaaaacattgtgaccatttagttttttcatagttaatacctcagtggcaacaagaacttccatgatgggttgcataggatactcatcaatatcatcttcaatctttggtgcaagttgtctcctacagaacgaaagaacgaatttgttcctcctaatgttattctaacgaaaatactgcataaaaatatttaaggtgtatacaattatagatttaacaaaaataattgtagtggctttgataaaattatattctcgcaaaagcagccagtgcatccaacgttgtatcaacaatgacttggaaaacatcaaatgcatttgaatggctaatagtatttgtacgtatattttaaataaacttcactcgacaattttatatttttacaataatagaatagttgaaaagagtatagttcagttgagttacctttgtaaaaatcgattttcgcaaagcgaatcaaacaaacaacgataccatcaatagattcttggcatgcttgatcaacaatctcaataaactttacctaaagagtacatgccaaactattgtcccttgaaggttcaaaactattacaaacaccagttgttatggagaattgcctccaaacctgaaactacttaacctgaatatgccatgcattccttgtaagacttgagagatttcaagggggtgggggtggggtggggtggggggggggaatggaaaaggattagccaacaatatcattttacttcttttttttgtttcgtatgaggaagaatatgcaatattggtgaatgaattatgcatatgggaaagacgtatttataagagtagaatggctaggtcgaaaatattcttttcggattatgtcttgggaaaatattgtctaaatcacataaatatagggaaatattaagatgattgctttaaacttagtttggcaaatatggaacatgttaagaaacagtttaatgattcgagagattattgaacagaaatattgaggaatattgttaaaatatttgattacttagaattgggtagaagatttaaattcgaatgatataacacaagataattcaaaaaagattgggaatattccttttcgactaagattataaggtatgatctgttcggataaaaataaaatcaacggttaataataaagaaatcagatagccaagattagaacttaggggtttgattgctttatgattcaaaagagttttagtaacttaaaatgtcatgtaaaatctgttgttattaaatcaaaatatcttaaagtatgttaatgttttgtgtttttcatttaagatttataaaaaataatctaaaatctttataaatttgggatgattggattcatactcttataaagtcactaaaagttttgtgttattcaattaaaacaaaaaaatttctaacttttaatgatttaaattattatgttattggttcatgactttctacatttttcttcacaaaagaaagttatagaaagtcatgaaaagtattatccaaatagagagattgtttgaaaaactttacaagattatgaaaaactaatcaacaaaaatataaaaaactatctaacaatagtttaaaatatttcttttatttactttataagatttgaagaaagtcatcaaaatctcttgtaaattaaaaatcaataacactttcttaattaatacaccggttcatcattaatacacacaattattacatgaacgatggctctttctctctctgagggcgattttttgcctaactcacaccgtttcaattctcctcgccggagcagttctccgaccatcataatctgtctcttttcacggttttatgacggcggttactttctgccaatcagtttccatggcagttatcattgcccttcactttcggagggtaactacccacacaaaccgccatggatacaaacttatatatacttcaattcgctccttcttctcccttttctgcaattcaccatttctcaaacactgtcatccacaatc

SEQ ID NO: 13263 - DNA, 3000 bp, Unknown
  misc_feature (1)..( 3000): cDNA_ID_2713330_gDNA_ID_2214609_Annot_ID_135720 3000 nt of promoter + ATG
aacttgaagatgtcaaactacctcaaaagccaagattttggtgtgaaatatgcaatggttttgcaaaatatgttgttgccaagttagtctttatgaaatttttagattgaatgtattatgaattctaatttggtttttataagctaataatcctatttaaattttaggttttggttacatctccatattacggaccaaaccggtgaagctagatgcatgttattcgatagtcatgtaaaagaaattcttggcactactgcccctgaattgcttgatggtgcatttgatgaggtatattgcctttttaaaaacaaattttttcattaaaatgactatgttcatgttataataatctatagtttttttgtagatcgaagacccaactgttttgcctgatgtgatcaatggtttgaaatggaagacttttcagtttctattgtgcattcaaagggaaaacatatttagtggatatgattcattcactgttgcccaagtctacaccggtaacattgctgatgaaatcgttcaagaagactctgatgcatacgttgatccatcatccttaatttcgattgaacaggtttgtcaaataacattaaacaattccaatcatttatatttatattttagagttgtcttattaaaatgtttatgtattttcatatagggttcccttatactcactgatggtgttgatctttctgatgtgaatttatcgtcaacctctactccatcatcaaaacgaaaagattcagatgatgttgatgaaaatgatcaggcttccacaagtaggaataaatgttctaagatgaccatgtctgaggaaggctccgtcgattgatgctcaatgactactccagcttggatcgttttcttctttcttatgtctttgcttaaagttatcgaagttgttttctttttttaagttctaaactatctttattttattttattttattttttgggaattaataaagttaaattcattcatatgtcgttttgttaacaattttattacttaagttacactccctctgttccactaaattttatttattatatgttcacacaaattaagaaaacaactttcatgaaatattattattttgttatttaactataatattagtaatatttctctcttctttttattgtttaacaataacaatagtaatgatgttgatgcagaacatcaatctttttgaaacaataaaaaactcaaaacatcaaattttgtttattattacaaaacacattattttatattataatgttaatcatactaagaactataaacaattttgctaattttgtgttaaatgttcaacaaaatcagaattagcaaatattttgtacactaaataatcagtctaactaaacaaacctattcctatttttcatagattctcattttaataattacaatttgttgtaacacgttaagaattaaatgtcatcattatttttataacctataagaaattatattggttgtagacgattcgttttctttttacacatcaattatttcaacgaggagataattgatcaatcatcccttaatttgtgttccaatttgaacaataatatagtagaaaaactaaattagaatatacattatgtatgccttgccataatagatttagattataaattttttggttaacaaaatattttcatatatattgtttcctaatttttagcatgactatgtttatcatattatttcgtttcttatacatttagctttatactgaaaacaaatcaatattctttgttattttttcgtcgattacaatgaagaaaagaaaggataatgatgaaaatgatgtacatcaacaacaaaaaaatcagaaaaccaaaaaaagaccagacgtttgttcgatgaaccaactttagttctcgtcagttctgtttttggtagagtgtttagtgacattaccaatgtcgatcttaccaaaagaagtcaaactgctcatactcccgtgtccttaccgctatacccgacaaataataatgggagttactcacccattacacctattaattcgatgaactcaactcttacaggtagtattctcatatatcatcatcattacttctttcgactttatattgaatcatatatgtttgcacttcaaaggagacagagtaatttataatacaccaaacacatgagaaaatatagtcaatcgatctaatagctcagaagtttttaatccaacttttacaagagctgccgcaaaaactagaaaatcaggttagtaagttatatactatatgatatacaatattatcatataaatttaattataaaaataatattttatttctaaattattttttatatttatattttttactgctttatccaatacaaaaagtataccatcatcacttcgtaagaaaaccaatgtcaatacaaccaacaattatgatattgttaacaaaacacctattagaagattgtctcatgttaaaggaatggccagaaaaagatcaaacccatcaggttataattttttaatactagatacaatacatattagttaatattattatttttctttatttggttgttgttttctcagtaggatcacctgacttcttaactcctaatcaaactaccccaaacgtaaacacattgtttggggtagattactctagaaatgtcttatcggatataacaaatatatcgggagaatccatcgtctccaccattagattaatgtccaataagaagaaaaaagtatcaacagggcaaggttcgatttatatttgaaagtagctatttatgttattttttagtatgtttgtctaatgttcaatagtcaaacagaaattttattgtttaatatttttgtttgatgattgttaggagtcccccattcaacaaaattacaatcaaaggagaattctacaagtattgtacgtgacaacacactcaatgatgaagaaattgatcattctgaagcaatatattctgatagtggtataatg

SEQ ID NO: 13264 - DNA, 3000 bp, Unknown
  misc_feature (1)..( 3000): cDNA_ID_2713318_gDNA_ID_2214609_Annot_ID_135723 3000 nt of promoter + ATG
ttatttcgtaatatatattgccaaacattatttagttttctataataaccttattattaaaaatatctaaactcatttaacgaatttttaacaataggtgtccacattagtaaactataaagatttggaaaatctacttagataaattcaataatacttaatatacaacaaacaacatacaattaatacttaatttacacatgctaaatgtacatttaaattatgcctctggaatagattacactgtatatatatatatacataatatttagtaaaataaaaatctctaaatttttagcgaaaatatcatctcgcagtgtaccacgaatcaatttctagttctaattaaatttggaatatgtttagttcacaattatagcttagaaagtcttaataatttcacaaaagcttagcattatcaatgtttgatgtgtgttgcttatagcatgaaattgatgctcagacaattgatgtttcgattgatatatgctcaaccaaatcactttcacggactatgcaaaatcgcggcggctcgtctgtctccaccacttatttgacgcctaaccggctgccttgggcgatttttagaaccttaaaactatacatccaatcaaatttggacacgtgtccgtctctctcatattctcaaacctctattcacagagacgcctctctcattttaattcagttttgattaatttttgatccaaaatttcaagagaattaacctaccaaaaattgcattacaacctcccattggaaatgctcttagtgtctgacatgttttctcttcttttcagttttcttgtcgtttttacgatgtttcttcagatagtcctttcttatcctcggaccatgctcgttatctgagtcttgtgtcaatgaaggtggtctctcgatcggagcccaagactactttccgttccctgttcatccatcataggaccaatagagcctctgcctattatttacaagagagtcacattaaagttttttcatgtgaaggaaaatgagggtagctagcaaactcatctgctaggtaaagagtgtgaaaggacacaccgtgattggagaaaagtctcaatgtcatcatctcctaagccttcctcatcttctgaataccatctcttgtttgatgactcacacgtaacctttttctcatcaccggagctgaatctcttatctaaactccttctcatgaaactaccattctgcttcattcggctactaccgctttcctctcgtgattttccatcttcttagtcaagaaacagaacatgtaaacaatatgcttttaacaccttctttctcagctttccttctcaattctgctgcttctctaaatagaattgaacctattcgattctcagtttgaagatccatctcctaaatcgattcgttaaagttagtaaattcaagatccctaaagctttctaaccacaatcttgtggaaaagatttgatctttcgaatgtgagacgagagcaagaaccaacaatctaaaaaacagagaataacataatttcttacgaattgtggactaagagaaattcaattaccagtaaaatcgaatacttgacgaatcaaagcttcacagagtcttgcggcggacttctccggtacgcgagcacagatcaccaccaaaggactttgatatgtccatcgaataagaatcgttcaccgaagttttttagtaaaccggaccaaacccgtgcaataaattgaataaatggcaggaatgccactatctgcgaaaaagtaaccaggaatgctactcttctaattcccattttttgtcgaaccctaatttttaaaatcaaaccgtttctgctctcattcaattcaaattttccaaaatcaaattcaaaattttctcgcctttcacgattttccgacgaattcttgattagtgtaatagtttgatggctcgtgttagagacggtattgctggccctgtatatgattcgacggagaagtcgtcgtccggtgaagtttcgacatcagaaccagttacttcagaaattgagaacgagggagatgccgccgacttagttccgaccgaaccagcaggtccgacagaaccagcagcacgagatgttgcggcgaatgatactacaaagaaaccgctgaaattgaaaaggctatggaggaaccgcgtgttggtgatgaggcttctcctaaaggaaccgccgaaattgaagaggatcagacagggacaactttgaaacctctaattgacgctgtcattcaacaattcgaagaagcgaaagacgggaatggggaggagttggaggaggaggaaatggtgaatacaattccaaaagaaggggtagaaaacgttaatcgtcaggtatatacaattgaatctctatgacacatttttgttttgtttgagtattagttctcgtattagttagaaatgttcaactagttcatctgtgacacatgtttgatttaagtaatttgatggaactagttcaattggtacatataaattgttagtttggtacatatgaattcttcaattggttaatgtttattgaatttggaggatacttgtgaggccgaggatgatgaggtttctgttaaagagacagaggaagatgaggctagcaatgatggtttagaggatgatgatttagattctcagccactgccgccacagaccatgcattttcttttttcagaatacggcaaagtgtgcaagataagcagtaggtgccacgtcacgcagacagttgaattgatagagaggaagtttaaagaagaagttgtatggttcaaaagacacgatcagttcaagcatatattccacatgcctcaggagcctaaccagtagacgcaaggcatgtgggtgcttatgctgcgcacagtgaagacagatttgctcgaggaggcttggtttgtggtaaatggagtacctattaggtattccattaaagagcatgtgttgttaagtgggtttgattgccacagttacccaaaagaactgaatacaatg

SEQ ID NO: 13265 - DNA, 3000 bp, Unknown
  misc_feature (1)..( 3000): cDNA_ID_2713310_gDNA_ID_2214609_Annot_ID_135726 3000 nt of promoter + ATG
tccatatagcgcgtcgccttgtggagggcgtcctctagatacaccggtcggtttaacaacaaatcatcgcgaaagggtgactcatgctacacggcgttgcgtagtgccgagatggccgcctcatccgggacggcgatgtgagaaacgactgccttgaacctgtcaatgaaggtgcgaagcggttcctttgggccttgggccatagtccaaaggtctgcgtgtgtcgtgccgcgctcgatgtacatggagtaatgcttcaggaaggcgattgaaagttccagaaaacttcctattgaattagcaggtaggtcgaaaaaccaattcaaggccgcccttgtgagatgttcggagaataactgacacttgccgacctcagcttcgctcggatggaaatggtctctttgtgtggcgacgctgaaagacgataaaaattgttgtgggtccgtgttaccttcataactttttaacttgatcttgttatcatgccgaactgagacattactaatatgcacggcaaaaggcgtcttctggtttttttccaggatctgctctaattcgggagtggagctggttgcctgatgaactttctgggacatcgcctgaattgtacttctcagctcctaaatttcctcgttttgagatcgttcttgatatccacgtccaacggcatttagaccgctcggccttgtgttatttgctcggcgcatggcgcttgcgaatccttccgaatgttgagctgttggttgacctcggaggtccgtgtaagcgttagtgagaacgtcgaacagttcgacattctttcgatcctgagcttgaatttgcgccagaatgttacgcatcaatgctcctggatcatctggccttgctggtggagtcagagctgggcgtccttccatcccttgtactcctggctccaatcccacggtcggcgttggtgtgttgagtgtgggttcgttctccacgggattgacctcgatcgggttcgtcgcgtctttgccctgctcacctcctgttggagcgacggcggcatgctggatcctgtctggggtgtcttccacaaactccccacggtcactttcattttcacttcgcggcatccttccttctcgcagatcttccttggccttctcttcttcttttcttgtggtagacccctacctggcgcgccaattgttggtgtataaaccgaacctctaaaccaaagaaggaaatgacgagcctgaaggaagatctttattaatatcactgaagttcggccgtttacagagtatttctacaaccgagattagatttctgatctcttaacataaatacaaacttcacaagtcaaaattagacttatgtttctgaatcagaatgagaagtttctattgcttttctctgcagatttcaggtgtcctttcctgacattcctttgtcagtatttataatactgcaaggacaatctatagtacaattttcttctcgatttgggactctctcctgaccagcagctccctgaaggtgggcttcgtctggtgttgggctctttcgtctttaaacgggccgatcttctcttctttcctccctcgttgccaattacgatatgttgggctttaaccatgttgttggggcgaagcccatatccaacaacactggaggactagtcaagtggtcaaaaatgcggattacactttggttataagagaaaaataatattagtaataatatttttttcctttaagattcagtcaacgataaacagaagtaagatattctgaacagtgaacaccgaaattttgaggagtcttttgtgggtacggagacgaaaaaaaaaagagttcgttgtagtgcggttcttcaattactttgacacatatttagccttttgcaagaaaggtgatgatcattatactgacattcctctacattacggtgttaccaaggattttcaaggtatattttccgaggttaccttctagacattgtaactatcgatgctaaaataagattccttgatttatcatccgacttacagatttttttttttgaaagtttcagcatctacaagaagaattctaattaaaatcggcacaactacgcggttgctgataggtgcattccttcggtgattaaactatatttgttgacttgggtatcattatgcatgctaatcataacattaatgctatcaaaccaaactccatatacttcactagtatatatatcagggatcattgccgaaataacatagatattatatttgttatagaagattggtcatggtgagttcaatgggaagaggaagagagatcagttttaattaatgttgttgatgcaacatatatgaagtttgtttggatgttttggtgactattttgatctaatgattatttgcctcctctcatggaatcaggcctggcctgtccataaagcaagtgaagcacttcctttaggccacaaatataaaattaataatcggaaggccataattttaaaattacttgtgtgatccgctggttaagtacatcaatgttttgatagaaaaaagtcttcaataaatcaatatatttgctgcaataatttagaaagttagtttttataagaagtagaatattttatactttcttaaaaataatcaacaatttttcaatacttttctaatatttgaatacaatttttttaacccaaatatttgtattaaaggtcacatgttttaaaaatgctttaagccacctaaatcataggacaccattgcatggaatgcataaatcactatgaaagggaaatcaagaccaaatcgagcaagaagaggacttagaagaagaagaagccgtctcactagaagaagattcgatggttgatacatacgctaatggcgggagctataaaactcaagaagggcatgctcagggtcatcagactgaagattgttcaaaaagtactgatgggctcaccgattcttcaagagaagaagccagtttcgcaagatttaaggacacctactcctgcatacctatc

SEQ ID NO: 13266 - DNA, 3000 bp, Unknown
  misc_feature (1)..( 3000): cDNA_ID_3028855_gDNA_ID_2214609_Annot_ID_187307 3000 nt of promoter + ATG
gtgtatgattgataacttgttatacagttgtggtcagggcgggtgtaaatatttgtgtgagccacatgaattggataggtgtgatgcagaggggatgaattggacgggagtgagaagttttgatttgcagcgtctcaagtacaggttctatcattcgagggtggtccactttggtgggaagatgtcaagagtgtggcaaagcgctcaagatttacttctcggtgccaaattgaccaactttgcgctgaatattgtcgtcttctggaatgttctcgtcggtggtcgtggtcaccaaaccttgcagatttggtgttataagatttccttgtgcaagagagtcgacaacatttggggcgcaaacaacatttggggcacagttgagtgctccaatgttgtcttcactttctattctctcttgagtatcgctaaggtcttgtattatatatctgttgatgtttgaaaactacttggattttcttatgctttctagctaggttgtaacattaataaaattaagctgttccgcttcactattttaacactcaaatgaattttttgctcctagtaatatgtattagattcaaatgaaaatatttgtataatatagcaacatgtcattcttaatatcactttccatacagaaaattttagaataagaaataaagtttggtgtaatgttatgtcaggattatatatgatcaagcattcagttcccactttccattctagaaagtacaaataattgtcatatgttcatttggagtaatgagaaactaaaaggtatatgtttgccaaagtgagagatgtttcctgatgcatatataccttgaatttgtttgtacagaagagacaacacgacagatggaggtctataaaactctaatggttgattgatctaaaaacatatcaaatacttgccttaagtgtagcggttgaagggagagagatgtaccacgatgaattttcatgaccagcctgtcgactctactacctttctgttataacagtagttggtttcggagttaaaagcagagctttctttcataggataggtaagtttagtattgtttgtgcagtctacttggtgtagatagatgtttgtagcaaaatgtggtagaagcaactgtgatatagtatgtctttgctttactcttgagcttgggtccttaccttatgattcttgatgcataacttagtgctcaaccgcttattttaagaaaaaattaacttgtttgtaattgagtaatgtttgtacaaaaaaatttagaacaagaaataaagcttggtgtaatgtttgtcaggaacaacagtactaggagtactctcgagccgcatagcaacaaaattcactagtaaatttggagatctgattgatgtgagtagtttaattactgaagatatttggttttgccttttatcatagagagttgtttgttcattacatcataaagcattgtacacttaatcagtttaagcattccgatgacatttagtggttttcaccaatgaaatagcatttaagatatcttgatattttctttgcaaagcctttgataggctatcagtgagtcccataacaagcaacatcaactgcagataaataacaaaatcaaatgtgtaaaaatacttgagaataccatatgcttgtctttcggtggtgtcgtctacttagactttgacttgtttcttgtacgtaatggcatcaactgaaatcacaaatcaaaacagacatgatctgtacaaaagaaagtttttcaagttctgtagcagaataagaaactataccatcatgtagattactaggtaactaatgaaattattgatgcgatagaacttatattaaccggtgtctaatttgatttctcgcggtgaacggtttagctacagtttgggttttagttttgttttagcaaagtttgtttggttttgatttcattagttttgattttattttggttttaaaataaaaaacaaaatatgaaataatgaattaatatgattatatttgttttagtacatgtatctaattaaactataatttttagtgatttgttaaacaaaaaatcaaacacatactacagtagaaactctacaaattaatactcgataatttaataaatacgataaattaataaattttgtcggtcccaagtcgggccaatataaaaattaaccaaaatcggtaagataataagataatattttttttaattgaatatacaaacaacaaaatatgaagaaaattaaattaagaaacattttaaaaaaaaattagtattgtgttttacgtaagtataaattaatatttattaatttatagaataaattaataaatattattatatattattataaattaataaaatttcataatcttatattattaatttataaagtttcgtagttgtttagactggacacagaaatagaaattgggcaattaatgggccgtaatagagccttttgagaatgattaagcggcacacgcacagttttgagttttgtaaaaatcacaaaatcttcttcttcgtctcaaaaacctcccgaccaaacattttcgttcgctgcaaactcatggctgtaagtttttaatcttccttcgctaatccacgatttcgattccgttatttctttttggaacccagttttagaatttacttctagggcttgcaaaagctctgaagttcgagctcttctcttgttaatttgtccaattagaactaattaatggagtgttcacgaatcagaactgatgggtttggttttaggtttcgaaaaaatttgcttttttcattattatatgtatgaatgaagcttggtttgtaattgaacgtctatagttgatttttaggttactactgttttagatgtaattaaagagtatattaatactaagtagtttcattcaattattcagtggaaacaagagcaatgatccatttttgtttattgttttgaagaccataccagtaaacccgaaaccagcttaaatggggaatg

SEQ ID NO: 13267 - DNA, 3000 bp, Unknown
  misc_feature (1)..( 3000): cDNA_ID_3028872_gDNA_ID_2214609_Annot_ID_187300 3000 nt of promoter + ATG
ccgtatctaatatccaagaggatgttaaagacttacccgagagtttttctgtgctcgtgcttgcaccaccattgagtaagaccttcaaacgacgccactccacatcactaaagccactcacaccatcacggtctgcatcagtgataacataattcgcttgttctgtttgtggttgttgagaaacatgaacagcattgacgttgatatgacgccctcgaccaacagaagcagctccgggtgtgacgcctttgcctcttccattaacaacacggctacgtggtctctcaccccaccattcaggatacccgacgactgcaaagcagttgttggaggcatgaccggagcgattacaatgtttacaaaccacagctctctcgaaagcatcaattcgatcggagatgggacgtgacttggtttgaaccgcatgagccacaacttgagaggaatcttcatagtgatgcaccgtagttttgagatcttcctcttgacgaacaacattgtaaacctcctccagagactggataggcacacgggaaaccagagaagatcgaacagttcgaaaactgtagtcaagaccagacagaaactcatgaactttgtcactttcacggtcctgttcttggagaaatccaagatcgcagtcacactttccacatttgcagacacgcacgggacgataatgagccatgttgtcccaaatctggttcagttttcagtagtacgcctcaatggcgagaccacgttgcttgcaacacgccaactccgccttcagttgctgaatacgcggaccattcgtcacagaaaatctcttcttcaagttgtcccacaaatctttggcaacatcacgatgggaaatactcgaacggagagatgaatcgatggacatcttgatccaggacacaagtaaggcctgaatcgtccaccaatcgtcaagatctgcagacccttctgctggcctagcaatcgagccatcaagaaaaccaaatttcttgcgagagcagagagctgttttcatgccgcaagaccattcatcgtagttggatcccttgaataagggatgagagatcacggcacctggattgtcggctgcggtaaggtcgtaaggtgagatggtgcgtcgtgtctccatcgggttaggggtcgtggtcgtttcggtcgcatcagagtttgctggggtggccatcgtttcaaagcaaacatgtttaagacaatagaaaaaaaaattgtcagggctctgataccatgaacaaatagagatcgatgtatgagaaaaagtttcttgtccttattcacagtagcctttacattgttatataggtaagagacgatatctactttcctaaagagatacaaatcagaatcaattcacaataaatgtgattgatattggagcgtatcacattgatacgttaagatacgctattacgctattacaaagtcctaaaaaaaatggattaccgagttacggtcgcatggaaattttaaactaagggtatcagctggtttagaaagtactttatatttggtaagggtttcttatacaagcatttgagttgtgtgccctgaaaatatttgcctctacgtatttctcggtttggccacttggagaaagataatcaaatgctcgtattgactgaatggaagtactagtgtggctgttactagtgtggtttgttgaaaaacaagtctttctttcacgggaaatcgttcagttactttacaagttatcattgcttttattaatggtttatggaaactacaatatcctgtttaggttggttggtatctttcgaaagttaacaatgagacatcactagagagagcttttaaccttcgtcggagtctttctccactatatactgaagtggaagtactagtctgggcagtgccggtcctgacctaaagctgaacaagtaaaggttttaggcgccaaaatatatataacattttgagggcatcaaaacaataagatattttgtagtatagtggctgttccttgtttttttgtttatcatgtcttggatttacgtctcccaagcatcattttgctatattttcaatatttgtctgcaaaaaaaaatagtttgggctttaggcagtccatagtgttggaccgatcctgagtatgagtgatgagatacatgatcgatgaacataaaattgaaattactttcgtcacgaactgccatgatctagtaatattagatttcttcaacacaaaccctttcaaatggcaatttgttttcttacaaatttatcctcaatttacaaaaatatgcaggtcaaacccataaaattcaatttaatctacaatataatccgtcactaccacccccaaatttatcaaagtactcccacatgaggaacgtgagagtgttctacattaacattctattttttggttgaatcatttgtgcttatctatatatttttgaatcatttactttgaaaaaataaagattttgttttatatatctatatagatgatgagataatacaattttttgaaaatagagaaaattaaataaagatgagagggctaattaatattattgaaaattgttttgttctattgaaaaagaataaaaacatccaacacagtaaatacatttttatgatactttacaaaatcaaataagctatttgtgtaaactttgaaaaaaaatacgtgaataaataacttttttttttcttctcactgataaaaagatttcaaagacggtggcgcacataggtattgcgtgtgcaacgcttacctcacatagttttgacacaagctagacttgttaaaccacatgccatcattttcatttctttttatatttcctgcctaatcaatctagcggctcccacagaaaattactctcctccataccaatctttctttattttttgcatctctatctgtcacacaccaattcttattttatgtatatatattgacgcatacatctccaaattaatcaatagcttatctagttcttgactgttcaacgatca

SEQ ID NO: 13268 - DNA, 3000 bp, Unknown
  misc_feature (1)..( 3000): cDNA_ID_2702520_gDNA_ID_2214610_Annot_ID_135729 3000 nt of promoter + ATG
aaccaccgaagggaatgttcccgacatccaccgtgtcggcggcgtaattgacggctgtgacgtcatcttcgtacggagctgttacgagtatgaagcggagtggttaggacttacacaagaacttcaccggaaaccggttataccggtcggagttttgcctccaaaaccggacgaaaagtttgaagataccgacacgtggctgtctgttaaaaaatggttggactcacggaaaagtaagtccattgtctacgtagcttttggttcagaagctaaaccgagtcaaacggagctaaatgagatcgctctcggtttagagctttctggtttacctttcttttgggtgttaaagactcgtcgtggtccgtgggataccgaaccggtcgagcttccggaaggattcgaagagcgtacagcggatagagggatggtgtggagaggttgggttgagcaattgcgtacattgagccatgactcgatcggtttggttctgactcatcccggttggggaacgataattgaagctatccggtttgctaaaccgatggcaatgctggtttttgtgtatgaccaaggattgaatgcgagagtcattgaagagaagaaaattgggtatatgatccctcgagacgagacagaaggtttctttactaaagaaagtgttgcgaattcgctaagattggtaatggtggaagaagaaggaaaggtttatagagagaatgtgaaggagatgaaaggagtgtttggagatatggatagacaagatcgttatgtggattcattcttggaatatcttgttactaatcgttaactttgagtcttgatccaatggtcggttaattgagtgaagttgatcaagtgttgcaaggatgatcattgtataatgttatgatattttggaatggtcaagttttcttgagacaaagaaaattagcgtctcatgatattgtggtatcaaatactctatccacatgaaaaaatatagggtttattggcaaagtaacactttttcaaaaataatttgtaaagtagatagtttttttagaaattagagatataacatttttcttactttttgtgagatagagaatatgtctaatagactaaaaaacaaaatatatatcaaatactataataccctttatcttgagagagaataaaaataatatgagagaccatttatactttattttatttgtctttatttttttaatttttattttagttttcttaaaaaaatttcttaaaaaattacgttgacttttagagtatttatatgtcattaatttaatacacaaacatttcaaagatcgttttgtacactaaccattattcattggtgtatgtatataccgatattcataaatagaagtaatattgtttttaatattttacaaatataatgattgtataaaccaaatattattacttaatataatggtttacatgatggtgtacataattaagttaatcttgatggtgtacaaaatgattgaaactattatgacgattggatagaatggtgtatacaacttttgaatgatatcatacaagattggtaaacaaagtgtacaaaacttggtgtacacttacagggaatgtataaatcattatttcagttagtggtgtacgtcatctcgtacaccaattttagtacagtctcatagatctttaaagctgtacgatcatgtacaccatattttcaatcatctatgtacatcattttgtatactattatactcactctatcacttcttacgataatattatatgttgatttttacattattatcgtacactaatatttgtacaccagttttaataatatcacgtatactgtcggctgggattaaataaaaaaatgctacatatttttgaaatatagcaaaattagtctttttagattcacatacaaaatttaaaaattaatatgattatatggtaattttttatgaagaattattattaaacaaggtaaaaaaatttaagtaaaaaaaaaaaagagaaaaagtaaaatttgacttgaattttgtctttatcttactacataataaaataacaaaaggttatataagtcatttactaaaatctctattagacaaaaagttgtattagagtggaaagagaaaagtgtctatttctcctatttctaaaacaactacttactttgcaaattatttgtagaaaaagtgtctactttccaacttatctcaaaaatatattcatcctcgttaccaccatctctacattcacatttttttcttccgagaatccaactttatgtaccatgattttattttagaaagaaaaaagttgaagtattaagacatatatgtttactgcggtaaatttctaagattgagattgagactgcatcaattaaaaacgaatactgcggtaaatttctttaaacgaggaacaaaagtttatgaaaaagagagggaaaactctaactcaaattttggtaaaaggtaatttaaaactcaaattgaatttgaatgagttcaagttactagttactacatttaatgttgattatatttctattggaaaaacttaaaagttgattgtttatctcgcaatcatccttaaacaccacacttgcaaatgttacaaatgcacgtgtttggtactttacctttaatctgacaaaactttagcgtttgcgttttgaaacgctgcatcgcaatcgcccgagtgaacgtttaacaaaatcaaaattgaagattgtcaatttccttctaccattaacctttccttttataaaaaattaaaaacacactgatataaaatctcagcgaaaatcgtggtaatttcagagattcacgcgtcctaactaaaatcaaatcgtgtttttactctttttacctctttcctattacatcaaaaactaatcttttagcgtttaaaaaataaaataaaggttcttttagcgttttctcgttcccgcttacttcactgcgactacaacgaagagtcgttttcactaaaaattgtgccgcc

SEQ ID NO: 13269 - DNA, 3000 bp, Unknown
  misc_feature (1)..( 3000): cDNA_ID_2702516_gDNA_ID_2214610_Annot_ID_135730 3000 nt of promoter + ATG
tttctcgttcccgcttacttcactgcgactacaacgaagagtcgttttcactaaaaattgtgccgccatgaacaaccgccgtggagtaacaaccgccgtatcgaagcgtcgtccagtgattcacgtgttaccagacgagacagcgatacgagtagtctgccacgcgtcagtaatcggtggtataatcggttcaaacggttacgttgtttcaaaactccggcgtgaaaccggtactaaaatccattgcgagtctccagttaacggctccgaccactgggttgtgttcatcgttggttcaaccgctgttaaccaaagtattctattgactgatagagtcggagaattctccggcggtgagcacgaagattgggtgacgtgtgaagtgtccgccgctcagacggcgttgattagggttttggaaagatcatgggttgttttagccgcgaaagatggcggcggagttgttgatggtgaagatgaagaagcttattgtgggattttggctgatcggaatcagattggtgctgttttgggtttgggtgggaaaaatgttgagtggatgcggagaaattccggtgccatgattagggttttgcctcctccgatttgcggcactaagaatgatgaactcattcaggtaaagttgaagtctttatatgatttttggttaaaaagttgttaaatttgttttggttatttggtttttgatatgttgtgaatgtcacttctttgtgtgttgtattagattactggtgatgttttggctgtgaagaaggcactagttatggtatcgagttatattcaaaataatgcacctctcaatgggtatccaccgccgcttagcatcaaaggttatgagtcattatcaactgatgggaactcagaggatccacattctgagtttttcccaaatttgcgttcttcttcgttgtcaaatgctacagaaattgttgcatccaatagacatttaccgtatgatggtggaaatagtacagaacgaaaagttgtgttcaagataatctttactagtgttgtagctggaggtattattgggaaacaaggaactattattagagctctgcagaatgaaacaggtgcttctatttctgttggagctccattgaaagtatctggtgaacgagttgttactgtttctgcacgtgaggtatataggtttctattcttctgctttctgctacacatttatccgagtttctttgttgaatgttgacataatcacattcgctttgttgttttcttctccttagaacctcgagtcacggtactctcatgcacaaaatgctctggctcttgtctttgcaagatctgttgagattgatgttgagaaaggtctgcgtccgggattgcacaatggtgccatagtgaaaactaagttgttggtaccatcacattttgctaatagcttcaatggaaacggaaacagagaagcaatcatagcaactggtgctgatgtacacatttcagtaggcaaccaggttttagagtggatctcagaaaatgaagtggtgattgaggtaagtgcatgttttcttgtaatcagtgtaagtgttttcttacccttagagatgagaacattgcaccttttgatcctctgattgttttaagattaagggagagtatagtcatgtacagaaggccttgactcatgtttcgtctaaattacgggaaaatctattgccaaagaaggtcctcggagaaatgagagctagagttagtaatccatatgaaagtgcaggaggaagaagccagatttataatctgcaaccatcacaacaagtaagtttgtttctttcctccaagctagaggtgatcgcagccatctaattcaataaaaccgcaggatgcaagcaggggtgattctctctcggtatcagctgctgtaccagacttgaagatggttagaagcggtgcagaagtattgaaatcaaattctgtaatgcacaccgaggtccttaaagaggtggatgaactcaacgactttacacttccacaaagtttgctggaggaagacttgacacaaggaatgaaacaacttcaaatgtctagcaatggagacgtctcttctttaccaccacggtctgttcttgccaaacagcaacggttccattttgttaacaatcattctcgttgaataaaacaaagtttctctttgttttgaagcagaagtaaaggtgtatctgtgagaaaaattaccttggagttagcagttgagaaagatgctcttggttcactctatggcagagatggcaccggtgtggataatctacaacaggtatataaatgataccctctcttaatatatatcttcagatgatgctagacaatgatgttgatgagtttttgcaaactttcagatttcaggagccaatgtggatgtgaaggatcctacaggaactgaagctacagtcttaatctctgggaatcctgagcaagcccgcacagcgatgtctttgatcgagtcaatccttactgatcaataaatgattgcgttttgcaactacttttggttgtttcgttttgagtttacatatcccaaaactccatccattttttgtgactggttttgaaaactagcacttgttgcagtgttgtctagaagaatacaacattttgccggtttaccaatactggtttacgaataccggaatcaacgacaggaaaaaaatatttaaaatgcttagtttgaagtcatactaataccggttccatattaaaatgcttaatagggactacgggcccaatataaaagtgtcaaggcccatgtaaaactttacggagttcaacgttaacggtaatactaataatcttaacggtcgtcgtcagagattcaaaatttgaacacaaaacgcagaaaaggaaaatcaaataattcctccggacacgcctttctcttacctcactctcttttatctttctttgcgttaagcttttcaatttctacatctacaaaacagagagacgatttgcttccaaataatt

SEQ ID NO: 13270 - DNA, 3000 bp, Unknown
  misc_feature (1)..( 3000): cDNA_ID_2702508_gDNA_ID_2214610_Annot_ID_187339 3000 nt of promoter + ATG
tgaaaaagatctagactttttcttcttctaaacagatataaagtatctggtaatgcctaatcacaacagtatgtttcatagtaggcctttggccggcccgtgagtccaagaagagggtgtctccatttggacgatttctttgttgcggtccataattcataagccgtatattagcatagttcatacttacccataattggaatggtataagtgcggactattttagttccaaaaacatttagaaaatgttgtgtacgaataactttattggttaacgcaattctgtatccatatataagagttaatgtataaaatatggcaaatcgaaattgttaatgaattcaaatattgaactcatggccaacaaccttggaacatttagtacaattacaaccagtgttcaagttccaaggactcaaatttcaaccttcaattaagtaaactatgtaagaactcagaaaataaatgtaattttatggagtatttggaattaaaagcatcaaatggataatgataaaaatgagttctctttatggtatgaagttcacgtgaaagagtactaatctcgaatgtatcttagttcagtaaactggtgaatccgacaatagttttgtagcataatataatgacgaacgtaacatttgtatgataatgttgcaaaaaatagtttttctcttcttcttctttttttcaaataccattcaaacctgcgaaatatagacttggccaaaaatattatagtactacttttgttttcgttgtatcgttttcattgaattttctttttcaactcgtttaattactgaatattactgtaattaccgatcaaattcatatatatttccaaaaagattaaattaattttttatttttatgagaaaaccaaaaccttttttagaaggatcaaaatgggacattgacggctgatggttgacatctggcaggtagatttgtttttgtttttctttttctttttagtttcattttaaggataaacattatcttgtgttggagactcgagatctgattggtcgaaagaaacccacgtggtcaccatgttgtcattttaggtcccacctaaactcttcgatagctttaagcctttaacagtagtgaatctagtgatactaaactttactaattaggatttaggaagaacctgaagcgaattcacttaaagcactagattcaaaactatgaagcatagaatagtaatttaatatctgtaagtgataaactttcacatgcactataataataataaatgatcatattttggtaaaactatgatcgagatccctcagaacttaaatattataaatccttcttttggaatcaaactagtgtttcttagtttatatgtaaggccacattttttatcgaaaaaaaaagtgaaatatatctgaaatctgatatgtactttagagatttatacattttcacatgtattgatcgtttttatatatttggccaacctatgatcgaaagctcaaaaactgaatacataaaaaaaaaaatatacatgaatcaagaaacttgatttcttgattctatcattttttaacctaattttatttcatcgtacttttttttttttttgacaattcccttactcttaaatcttaactcatgtatccttagaagttttgcattttttggtccgaaaagcttctccactggatcagttaccattggccaagtaagtttagtatcctcaccaacatcgaaaatcgagatattattgatgcgtatttcttttgaaaagtctcctttcaacaaaatttaagttgtaaggctgaacattataggttgaaataaagaaattgctcaggtgtacgaaatttaagccgaggacaaaggagcgtgcgaaagcatctcctaattggtatcctcaggaactgtttctgctactctcacgtgtatgactctcacaaatttgcatattccaccatataatatacaatatattatatatatatatatacttacatagtttgatagttcaaaccaaatagttacaatatagacgacttgatattagttggaattcgatggccattatcatattaattgaaactttaaaaccaaacgtaaatccatttctagtttggtttacttggaatcgacggtactaaaaaaaatttggtctacagatgttgtaagtctcatattgaaaacggtaagtcaaataaccaagttatatttttattaagcatatattgtctgcgtaatgagacttaattaggtcatttagttcatgtataatactgtacataaagtcaagtaattactagtacagggtaaattaattaagttctaattaacgagttttgctcattctcttatatgcaaaagttcgcctatatggaaacttgcaatagatcttaatatattggtagaatggaaatgtcctcaactcctaatttatgtgtgacacgtgttaataaaatcaattttgtattttgttctattatagaaaactatcatcagtttttaatattctctaaaatccatctaccgttttcaaagcttttttcccgttatatattttacataatttttttgggtaaaatggagatatcaaataaaggaagtttatttgtagtagtatacatttcttcggtttcagttttgattcagaaagtttattttttctatgtaaatactttataatactgttccttctgtctcatgtgttctatgaactatgtgtatactgtatacatattttaggttattaacttggtacgattactaattagccctcaagctgtatcgaccaacacaacgactcaaatagataaaaacgaaatccttaatttattcctcgaatacattgttgactcttacttccttcttatttttttcttttccttttctctctctctattctctttctcctgattcgttcttcttcatctttctttggccttgcgaagatctagaaaaaccctagaacgcaccaagatctaaaggaagatcaaaatagggtttaaatta

SEQ ID NO: 13271 - DNA, 3000 bp, Unknown
  misc_feature (1)..( 3000): cDNA_ID_3028903_gDNA_ID_2214610_Annot_ID_187343 3000 nt of promoter + ATG
gtcttaatacataggataccacacgtgatctacgtatgatcgcatgtacacgatctttgacttatctttccttttatccaataaacacatgctctctagagagtgacgttgtacatgtatacacttgtcagttttattatccgtcttgcttaagcagattacttaatcctacggctatggataattagttgttaatttgttattagtttaattaaacttttagttaaaaaacgaatacaacaaaggtgtgaccggcataagcggaagcagtgggtccaattgtcgtcgcactgccccgcaaaatctgttgctcaaagcaaaggttttctctatttgtttatttagttaagtttttttctttctttttactaaatattactcattacggatttataagtttataataatctcttcacgagtgtaatgattttgttagtgatcactgatcatcggtcatcttttgtaatcatcttgaattattatgatgctgattcattttgattttgctatgttcttttttcaaggttcgtatattttggcttttcagttaaagattttcttaaaaaaagttttgttaaatacacttaaataaagatttacaattagcacttaatttcaatagaaatttgaaagtaccatatttcaatgcaaattatacaaacttactctttttagttattaataagaatataagattacataatctcaaccagagatacaatcacattttataaagtttattcgttgatttattatgacttctaatgttttttcgcagctattcttatttacgaacagaaaaatcccttaccaacttactataatacttaaatggcaaaatcgtagtccttaaatttagctataacgggatgaaaaagtcatgcgtagcttagctttttgttggccacgtctttctttaaagcataatgtgtaaaagatatgattgtgaaagttcacactatattgtgcaatgtgtaagatcattatatactaattaatttacagcaaatgaaagaaaaatgcatggaatcttcttactcttttacctgcgatcatttatgtgcatagatcatttgggttttggtatgttttataatctaaatatctgataaccatcgataacatacaagcatcggcaattcaacatccataagtttcttgattgtcgtcatgccgtccagattgattttagtagacgatcatttcttacgttgactctctgctaacttacctacttgataaaaactacacaacatatacatcataagtaaatttagagaggatctagcatctcttttatttagaaagcaatgaaactctagcatatataaaccaaactcatgatggtatgtatagtggttaaataatttatcatggctgtggagaactaaagttcaaatttcaattatgacgtgaatgttttaaaccatgaaaatagggtaaatttaatatctataatgtttaaccataatgttttaatccaacattataaaccaaaccataccataatgttttaaaccaacattataatccaacattatatgttttaaaccaaaccataatgttttaatccaacattataaatgttgtgaaaattagcttaggatttggtcaggaatctccaagaatcaaaaaataattgtataaatttgattggtaatatttcgtaattgcataatgactctatttgtataataaaattttgcagaatgaaaagttgtaaaataaaaatttgtgtcgattagatacatttgcaaaaatgcggaataagattttatatcataaacaagtatatatctacatatttgtataatgaattgttactagtgtttttaggtgaaaacacaaattttctattttgttaaatgttatgcaaatatttttgactgataatttttttgtataattacgttagaaaatgtcattccgctattattatgcatattaccaataaaatcaactgtgtaacaactaggggtgtcaaaatgggtcaaaattcatgggtcaactcaactcaactcaacccatgaaccctaatgggttgaaatttttgactcaaatgagttgatgggtcaaatgagttgatgagtcaattggtttgatgagtaaaatgagttgggttgtaatgggttaatggttttagtggtttacccaattaacccatcaaattttgtaaaattgaattaaaccaactaaaatttctaaaccaatatttaaccaacacatctaaaccaatttaataaaatcatccccaaatttacaaaatcaatcgtttctcgacctccacttcgacctatactctccaccggtctcatccacatcggagactgacaagacgacgaagactgcttcaattgaagacgacgatgatgatgtgcttgtagtgggtcaaaagggtgaggtatgtttccactggacccttctcatttctaactactttttcgttttcttcattcgaattggcgtgaaagttcagattctgtatgcgttagtgttgtttagctcttaatcatgttcaggatctaacttaagtgatggtagaagcgtattcaatgttgctctagagttctgaagcttgtttatatggttaattttcactttatttgaatggctctacctttaatagactagtcttcttctagtttgtggtacttgagcgatgaagtttgagttctgggattagttacttctgatagttttgatgtgattgccaaattgttatgtgtttgtttcggtaaagggtttaagctgaaagaagatatatgcttgccgtattgtcatatccttctctttgttttgatgtgagctaacaaaaatcgtatttagtcatatgcttgtcgtattgtccaaaacagtcttcttttctctttgttttattgattctttgactgtgtctatgtgattaattcttgtatttggctaataacaggttttattaagcaatctctaacttggccttatttctatgtatagttatttgcagctgatcttttacaaaaa

SEQ ID NO: 13272 - DNA, 3000 bp, Unknown
  misc_feature (1)..( 3000): cDNA_ID_3028895_gDNA_ID_2214610_Annot_ID_187349 3000 nt of promoter + ATG
acttctttgtgggatcttaaggaaaaagattgggatcgtaaggataagcaaagcaaaaaccaaatgcttgaaagtcttctttcaagaaccgaacctctttcagagtgtgacttggttcttaagaagaagctaattgaggagttgttttcataagtaccgaacctctttcaaatgtttaatttctttctaagtacttctaggatttgtttcaatgtcacaacaatgacatgtttaatttgctttgtctgtttttattgcaaatcactttgcttatgtatgatattgtcttaatgttatgtatgatattgctttaatgctttttatgatattgttttgtctcttatcttatgtcacaagtcatatttggccttatatgtcacaagactttgttgttaacttttgcagtttatcatcacgggttggagacaaagatagacaagacacgtaacttgcaactcatgttccacttgatgccaaaagagacatatgatttgtttgctttgttgtcttgtttttagctttgagtctatcaacaatttaaatatgaggtacttttagactaaatatatttaattaaggtatttttattccaataaaaaatattaggtattaaacaacaaaaaataatagatgattttttcaggatttttttgccaaattattttttagtttattatataaaaatattatgctttatttaacatatataaaagataaataatagaatatttattatattatttagtaatcacaaatgatttaaaaatgctaagactgcaaaactactattttttacggtaaaaatgtcatttaatcccccaactttcaaaaaattggccattttatacatcaacttcgtatgtggctgtttaaaacatgaactaaacgttgactaatttttaaaacatgatctttcattgatcaggccaaaatagacatgccgttatcagtcattaacggaacttctaacgtccgttatcatccgttaactttattagtcaagtttcaaattgtggccattttaaacatcaacttcttatgtggccatttaaaacatgaactaaacgttgactaccatttaagacatgaaaaattcgtttacagggccaaaatagacatgtctttatcagtagaacctagaaacccgttaatgactgttaatctgtccaaaacaacgtcgtttgaaaataatcgaaagaacataaagatttttcccatatgaaattccatattaaaaagttttaagcagaacccaagaacatagtttgataaagcgataatcgcagtgccagtaattggaaacaaataaaggtgttttcgtttatatatttgttttaaattttaaaaggaatcatggaagcaaattgaagactcattataagattgttcgtcttgtttgggcggttgtagaaatagatttggggaactagggtttcatttagaaaacaatcctgattttcttttgattattctcaaaacaaagtcgttttaggaatactaatagactcgttaacaagtgataatgaatgttataagtttttttaatgaatgatgacaacatgtttattttggcttggtcaacgaatttctcatgttttaaatggtagtcaacgcttagttcatgtttaaaatggccacatataaagtcgatgtttaaaatgaccacaatttaaaacttgactaataaagtcgttaacggatgataacggacgttagaagttccgttaatgactgataacggcatgtctattttggtatggtcaacgaataatcatgttttaaaagttagtcaacgtttagttcatgttttaaacgaccacatacgaagttgatgtataaaatgaccattttttgaaagttgggggattaattgacatttttccctattttttaccaccttttgcaacaataaccttttatgttgtacatttttaaaaataccccttccctttaacagaatgaccaaattactctcatctaataggaacatgtaattggaaactgaaattttctagccaaatttatttttcccgcaaaaaaaaaaaattccgccaaatttttttcccgccaaaaaaattcccataacaattttttttttcagccaaaaaaatgcttttaaaaatccttgtgaaatatttttagcggaaaatagatttacaaaggattttaaaagagttttaaaagatttactagggatttaaaagagttttaaaatatctacaagggattttaaaaagattttaaaagatttacaagaaattttaaaaatttttaaaaagatttacaatcgaaccgacccgaacctgattggacccgaaccgagattttctatttattctattgaatcctagaataatatacccgatatacccgtacccgaccgggtattacccaaacccgacctgcatacctgaatgtcctgccctactacaaattttgatatacagtattgctaaaactttatcatcgttttgttattaatatgacgcggttaaaaaaatatgagaagtctacaaatttttagacgtagatgagataataaaaaggaaatataacttttctctattattggtatttagtttttataaacaaaatgtttacaaaaaagaataatattttttttgtaataataaactctgtaaattgtgtacttttgtgatatataagcttcaactttctatatactttttaatctttgtttttttttttaatttaaaatctttatataagcaaatataatttatattccactccgtttaaagcaccatcgatgaaaattcccggtggattctcgccggtaggaggagatgtctcaattttcactcaaatcttttttagtttttaccaaaaatatattaaagtaaaaggcaaaaaatcttcaaatttattcttaccaaccaaacaaacaaaaagaatccttgcaaaataatcataaattttaaatattttcccatttaaagagatatgcaagtgagaacttttgagaggcgcaacaacaag

SEQ ID NO: 13273 - DNA, 3000 bp, Unknown
  misc_feature (1)..( 3000): cDNA_ID_4255094_gDNA_ID_2214610_Annot_ID_187342 3000 nt of promoter + ATG
gaaggaagtaattcttcattgcaacttaaaacagctttagacatgagtttcccaagccaagcatgatagagtagtccccttgatccgagccctgaaaatacccagaagttgcaaaactgaccagcacctatgagctgattaacacatcccaagagcggcagtgatccatggcttgtgacaggtggcattgctctcaagcccgcccttgctcccgcaaattcccacttttctatgtctggataaactgcacttgctttcggaagaagctcgttgagagctcttgaagcttcctctgctgggacatccgatgaataatttcttgattgccattcccatgtggatcccatgtgcagattacggggtccctgaaccgcgagccacgcatctgacaagatcgaaggtccatcgtccgggtaacttcctctgcattacataatttaataaagaaaagcttttgaacaggaaaaaaaaaccacaaagataagtagctgagctcaacatagtaatgtgcgagtatgcgactacatcaacacatactttctttttttggaaggtctcacactaaaaaaaaacagagaagaattgtacaattgaaagaggatgtaaagttgacatcagagttgaaaaagaatactaggaatggataactataggcgcaaggtctcgcaatacctggcactctcgtgtaactgcatatgagtaatgacacctcggcatgtccttaaagggagctttccagtaagccctggaagaaagtctaccttggatccaagacatattactactgcatcatatcctcctacatataacaacacaaaagctgttcatactaaatttctgaccatgcggatgagaacctcagagaaaaagcatggatactatactcttggattgttaacggctatctaaattgtgtttacggtctctagatttaagtttatcacatcagttttcatgcctgtgaaacttgatccaaaaggactagttgtggttggaggatgtttctataaagcttacgcaagttccagaattaaacaaaaatataagaatatagttcaaaatcattcaccttcaagttcaagcacatcagttatagacttgttcaccaaagttatgtttttccttcccagtgatgtttttgctgagctctggcatgctagaaagagtgcctagagaagggagaaaaactcggtaaagaaaaacgcaaaagcttggtgctaacatatttgtgttgtcttaacctggagatatcggtgcggattaacattcatagctcctggaaaatagaaggcgcagttcaaaggcaggtatagattggggacgagattttgtgcaccatctttgtcaatagtctctactacacaactagcaagacagtttcgagcattctaatcgcataagtaataaacagtaaaactacgggtttagttaatatttcaaaggtatctaagtcgagttcaaacttacatcactcattaaatctaaagtcttggcatttgttgctggtctcaagattcccctaaagcaagaagaacttggtcaaactaaagtatcattgaatgaacatttcaagttattagtgttattgagattggtaccttcttcgaaccataaaatttccgaaactctcgctaaagtctctgttctccgtagattggtaactagaagaagcagctgtttcagccacatttaagagctctaaacattctctccaacactcagcaccatgccaaagtagctttcctacataaagtaagaatctttatgaaacaatacaataatcaccaaaggggacaatttcttctacctttaggagaataaggatggaggagtcctccagaaacaccagaagcaccacctcctatgccaacttcatcatatacgtcaacacttaatctcagctcttttggactctcctgcaaaaacaacacatattttaaattcagaagcaattatctcacaacaacacaagaacaaaatcaaatttagagatttaaccttaagcaggtgccaggcaacagagattccagcaaaacctgcaccaaggatggcgtacctggaggaacaagaagaaactctaaaaatcacagtgagaaagatagagagaaacaaatgaagagagctaacctaagaggaggacggttgggaagagagagagacgccgaagaacaagggtgaagaacagcagtgatcatgtctacacgccaatgcctttggattccggcaaatgcttgttttgcctgcgacgagttcgttatatcggataactcagttacctaccactactgtaaaggaacctctgattcatctagagggtcttcttctcagggacaaatattggtttagatcggtacaagaaaaattctacatgattctaaacccggttgagtacattggattcgataatccgatgcgtatactacacgttaaaaagtacattgaattttggtttaggccttttctccaattagtttattttctgagtcagacaaggcgttacattattgttcgcctttttagttttattttatccattttcgcaaacgttaaaacttaaagacacaacaaaatatataaaacggagatatgattgaggggcatatttgtcattttcttgtgatcgttgatttcgaagtcgctataagagtataagtagcagccttgaaaagtgttgttcatctctcgaagtaaaacttttctctcagtgatcggataaaattctcggcgaagaagtgaagtttccggcgatcagaggtgagttttccgttagatccttatcctagttgctacttgtgtgacttcgttgattaattttgatctgaatatcaaaaatcgggttttaagattctccagagtcctgatttttctcatgcacatgatcttccaaaattcatagggcttatgcaattgattagataaggatcattttaggtcaaaatctggtaatcacgtattgatttacttagttgtttgcattttttgatcgttttgaaaggtgat

SEQ ID NO: 13274 - DNA, 3000 bp, Unknown
  misc_feature (1)..( 3000): cDNA_ID_2702512_gDNA_ID_2214610_Annot_ID_135731 3000 nt of promoter + ATG
atatactggtgtcatgattatgttcataacataatatcaaatccaaaatttggtcgattttttttgttagaatgattgacgacagttctcaagttgtataattgaaatcgaccaaagaagtgtgcacttacttgaagaagaagaaaaaaagaagtttaccctccattttcctacaagttcggcaataaatgactagagataattctttataaatctacatatacatttttacagacattttaacaaataaatcctctactaagaacttatttacaattgtatgccactgacattaaatatttgtttttaatgattaaatacaagatattatattcaataatagttgccaaaaatctctcaagatatctaagtagttttaattattcatatttgaaaatttccatattttatattgcgctcaacaaacgtttccaaaaatctctccaaaaaattctacataggtttattcacacatctataatcccagatttttttcatcaactaattactgtcaacatacattttccgagatttctactctacgatatctgttgaattatatatcttttaaattgatttgaattatatatctttaaattaaaatattattgaaacaaaaataacaaaataatatttaatttcactgaacggggttagatggtatgacgggtttggatcgaaagtaatacgagacggtatactacgggtgaaattcattagatatatttaatttcactgaacgagattaaatggtaggacgggtttggtcgatagtaatacgagacggtatatcacagatgaaatcctaaatataacaatcaaaatacaataatattatctttaacactatacaaaagaaacaatactaacaaaaaaatataatttaaatttaaattattgttataatttagattttaacttaatgaactgtatgttattgtttttatatttttaaacagtaatgatcaaacatagtaattttacactaaatatatatatatatataagaattgtatatttagaaagaaaaaaatattacattatatatatttttaatctactaaaccaattaaatgttttgtttttgtataaaaacatatagtcccgcggtgtaccgcggataaaaatctagttatatggatatttgttgaaatttgacccccttttaatttatttttttgaatgggtgttcaggcagtgcataagtcatcgttttggttacactgactttaacagtataatatttttctagttatttatatagatgagtctctcttaaaagtcgtcgcaagagaaaatctatgtaccatttcggtaattgttacttttctttacaattttaatcttggtacttcgcctaagatacggaaagttgaccgtactctgaccgattgacgaattttttctgtgatatgaccgattgacaaaatttattatatattgaaagaaaaaaatttgacgtagttttggcagccatttcttggatatttacattagatgtcaataaaaacagctttccgatgtatattttggcagtcttatacaattgtatatatgtaaatgcaataattttatctttttttactttgtgttaatatgcaagtatgtagagtttataccatacacaaacggatttttgttagcttttagacgttacagtaatcgtgagttaatgaaatgccaaaacattgatgtgaagcttgacaagaatttataggcagaggttcaacaagtttcattacatcataaaacgacaacaaaaggagcagaaactttttgcgcatgggacaatgaggtaaggttaaacttgaaaatcttcgacatgaatatatatgaaggtagatttttgtttattggtaaatgttctttaggatggacaaacgttctgtcctgtctcgattccatctacacatttccgtttcatataggaatgtgtttccaattgtgacaaagttctaattaaatcctcttttgaaggaatattcctcatattctatttaggataaaaaaaattatattcaaattatttattaccccaatgtcatgaaatgttatgtggtaataagggtacttataagttatttcaaatcttatattacaaaactcttattcagtttctattctattcggattttcattcatgttcgatgttcccatttccttaccgcaaagtctcgtttcgaatttctgttgttttttttgcctcgtaatattgataaacagtctacattttaatatttcgacaaaaaaaaagtctacattttaatatatttatatgatgaatgtattagttagagtacctagttttttttgtgcaaataattagggtacctagttataatacttgtttagttgaaaaatagtttatgatatttctcttttattaatttaatattttatccttattttattatttttttaaagatgaaaaggttaggcaacaaaaagtcacacctgcaacattaagatggtctagatcaattacgtatgcccaaaaatttagatatatatgcaacatatacatattctgtatatacatacagacacagaattctatgtacacgtcccccacacatctgaatgcagattctgtgagatatataaagctacttaagattctaatcctatgattattgtaagaactaaaaaaagaataatcagtgcattttagagagaagatagagatagagattaccttcttcttcttcttcttttttgtcaaagagagagattaccttcttcataggaaaagatttctttcttcttctgcattccccaaattttatcttcccaagaaacccaacacagaagaaaatcttaaaggtacacttgaatagttttttcatttgttgcagatttttttccttctaattaaacgcattttttagttaaaccttagagaaggttgctttgtctatgtatattggtgtgttgatatacgtatctcgaccttaacggttggtttctttgtcggaagtttagtgaattgtggtggagatg

SEQ ID NO: 13275 - DNA, 3000 bp, Unknown; identical to SEQ ID NO: 13270
  misc_feature (1)..( 3000): cDNA_ID_2702508_gDNA_ID_2214610_Annot_ID_135732 3000 nt of promoter + ATG

SEQ ID NO: 13276 - DNA, 3000 bp, Unknown; identical to SEQ ID NO: 13273
  misc_feature (1)..( 3000): cDNA_ID_4262546_gDNA_ID_2214610_Annot_ID_135735 3000 nt of promoter + ATG

SEQ ID NO: 13277 - DNA, 3000 bp, Unknown
  misc_feature (1)..( 3000): cDNA_ID_2713342_gDNA_ID_2214610_Annot_ID_135741 3000 nt of promoter + ATG
aatgtcatttaatcccccaactttcaaaaaattggccattttatacatcaacttcgtatgtggctgtttaaaacatgaactaaacgttgactaatttttaaaacatgatctttcattgatcaggccaaaatagacatgccgttatcagtcattaacggaacttctaacgtccgttatcatccgttaactttattagtcaagtttcaaattgtggccattttaaacatcaacttcttatgtggccatttaaaacatgaactaaacgttgactaccatttaagacatgaaaaattcgtttacagggccaaaatagacatgtctttatcagtagaacctagaaacccgttaatgactgttaatctgtccaaaacaacgtcgtttgaaaataatcgaaagaacataaagatttttcccatatgaaattccatattaaaaagttttaagcagaacccaagaacatagtttgataaagcgataatcgcagtgccagtaattggaaacaaataaaggtgttttcgtttatatatttgttttaaattttaaaaggaatcatggaagcaaattgaagactcattataagattgttcgtcttgtttgggcggttgtagaaatagatttggggaactagggtttcatttagaaaacaatcctgattttcttttgattattctcaaaacaaagtcgttttaggaatactaatagactcgttaacaagtgataatgaatgttataagtttttttaatgaatgatgacaacatgtttattttggcttggtcaacgaatttctcatgttttaaatggtagtcaacgcttagttcatgtttaaaatggccacatataaagtcgatgtttaaaatgaccacaatttaaaacttgactaataaagtcgttaacggatgataacggacgttagaagttccgttaatgactgataacggcatgtctattttggtatggtcaacgaataatcatgttttaaaagttagtcaacgtttagttcatgttttaaacgaccacatacgaagttgatgtataaaatgaccattttttgaaagttgggggattaattgacatttttccctattttttaccaccttttgcaacaataaccttttatgttgtacatttttaaaaataccccttccctttaacagaatgaccaaattactctcatctaataggaacatgtaattggaaactgaaattttctagccaaatttatttttcccgcaaaaaaaaaaaattccgccaaatttttttcccgccaaaaaaattcccataacaattttttttttcagccaaaaaaatgcttttaaaaatccttgtgaaatatttttagcggaaaatagatttacaaaggattttaaaagagttttaaaagatttactagggatttaaaagagttttaaaatatctacaagggattttaaaaagattttaaaagatttacaagaaattttaaaaatttttaaaaagatttacaatcgaaccgacccgaacctgattggacccgaaccgagattttctatttattctattgaatcctagaataatatacccgatatacccgtacccgaccgggtattacccaaacccgacctgcatacctgaatgtcctgccctactacaaattttgatatacagtattgctaaaactttatcatcgttttgttattaatatgacgcggttaaaaaaatatgagaagtctacaaatttttagacgtagatgagataataaaaaggaaatataacttttctctattattggtatttagtttttataaacaaaatgtttacaaaaaagaataatattttttttgtaataataaactctgtaaattgtgtacttttgtgatatataagcttcaactttctatatactttttaatctttgtttttttttttaatttaaaatctttatataagcaaatataatttatattccactccgtttaaagcaccatcgatgaaaattcccggtggattctcgccggtaggaggagatgtctcaattttcactcaaatcttttttagtttttaccaaaaatatattaaagtaaaaggcaaaaaatcttcaaatttattcttaccaaccaaacaaacaaaaagaatccttgcaaaataatcataaattttaaatattttcccatttaaagagatatgcaagtgagaacttttgagaggcgcaacaacaagatggcgcataatagcaaaagacctaattttgcttctgggtccttggattttcttcctcttcctctttattcccctcaaaacctaggagcccaacgagagcacccctttcctcttcttctatatccctttttatctcttcgcagctttctctcctctctcagatctatactctcttctccttcacaatcgttcgttttatcctctccatcggattcgtcagatatcttcgatttctcgtcgtttcatcggttccaggtcaaatccaggtatgtcaattgtaaaatttcgatcagattcgtcgatttcgatcagctttttcgattttggatctattttctatgaaatatcagatctggtgattgttttacatatttttgggttgaattcacaagattttctggaaacgagatcgattaattgagttttctgtgtttttatcttaagctagatctcgatttctatgtttttggattgatttgataagattttcgagaattttttgtgtttttgtcaaagttcgatctcgatttctatatttttggttgaattcacaagactttctggaaacgagatcgattttgtgagttttctttgtttttaatctcgatttttggattgatttgagaagattttctgaaagcgagatcgatgtttttggggattttctttgttttgttcaataattcggtctctgttttcttatcaaaaaattcgttttccatctcaaatcgatgttcttattgatttaattgagttttagtttgcagggatttgatcgttggtaagctatctttcagcaaac

SEQ ID NO: 13278 - DNA, 2614 bp, Unknown
  misc_feature (1)..( 2614): cDNA_ID_2713389_gDNA_ID_2214611_Annot_ID_135744 3000 nt of promoter + ATG
ctttagttcattttgagagtgactattgtaaaatatatatcgtttggcttacaagttgttaggtgaattagaattgatgcattgtcgtaaaaacatatcatgtaaagctttttccaactcgtaaaataaatagtaagttaaaaactaaaccaaatcatgttagtaatattagagtattagaccataagttcactagttcatgattcacattttgcagtatgtaaaggttataaattctgaaatgagtccctccaatgcattcacatttccctttttctttgttctttatattttgctttaagaaataaaaaaaaaagttttcttctttcttgtttttgccggaatgagtcattgacatgtcatgatcattatcatgtatttacgaaaaaagaagtaataatcatgggcttgcactatctatatccactcgtctctatcggcaggcctcgtcatatcacgtgtctatgaacctcttttcttctccgactatcttcttctcttatgtttcaactaccaagaagttcttctggacctaacactatcacatctctttagaagaaaaactagcaagaagttctttgattatggtaatctaagaagaaaacatttatttttagtacttataaaagaagattaaaattgatggactctttgcaaatgcactcccaagtcgcaacacatgtatttgagccggacatggtataaaataaatatgtacatgttttcatgatctttgttgatttaactacttttcaagcagcattctaccatacatggaagcaaagaattaatgcggtcacaaccagcaatctattcactcttccaccgtcttcaagaaatccacaacacaatcaccgcaagaagacataaaaaatctctcaagcaaccttatgcaactctggttaatctgaactcacatcgagtaacgtttctactatggattccttgtttatctgtttttgcctaggattcaaagccataggctcttattttgtaaagcaaaacctattgattttatagagatactaaactcatagcataaaacaaaacccaactatttttcaattctagttttagtttatgtattgaagttaattactgttgtgcacaaaaaaaaaaagaagttaattactaatcaatccggtttattccggttcatcccggtctgctcacgggtaagtaaatgcatcttctttgtttcttttagaagcgctgtgacttggactttgcatagactctctgaatcgtctcggttctctcattagtttaagtatgaggctttgctcccagaagtgccaatggtctagccgttctcactttccggtggaagcgaagccaatgatctcaaactatctcatcaaacgagtcacattcgcgcaatgatgatctctttagcgctctttctatcattttcccctgtttttgtctgctccttcttcttcttcttcttctttgaggctatttgatgatacattcgaagtcaactgaacagaagttgatgtcgctctgttttttggcggggctacaaaatttgtacacattgaagagaggtcttctcttctttgctacctttttttgttagcagccatggctgagtgaatattcttccacctgtctgagagaagggtattctgatttgctcaataatacttatatgtttttaattttgattaattctgttcaattggtagtctgagtgatgaaattagatagatctcagagcagcaacagaagcagtatctgagaaaaggtctagtctttgtattagttgaaacttgtaaaccatattctttcttcttagctactaccttttcaatgacatgcttctgaatggttattacagcaataaggatacatcagtgttttgcttgaaaagtaaattgtgggcctaaaaccatttttaaagaatgaatgaaacaattatgaaagtggtcaactttgggaacaaagtttgtgcctttgtggtgctctattcagctttctctaagtttgtgacaacaaactgatgtgagttgtatcttgtttttgttcaagattgtgacttttgtggtgggattatttcaatttatcagtttagcctacctaggttctgttgagtggaattattggttctcagatctcaattaatttgagaactcttatcagaaactattccaagataagaaggtgttttttttctctatctcatagcctcattggtatagacctttttgtgttttggcagtattgttttgggagaaaccaactggattttaacgaaatattgttaaaccaaaggtttgttttcttggagattgagcttagctttgtttggatcattcggccacttgtgtgagagtttgattgatggttagtcttttttatatcatcatcatgctttgatagttgagagagaggaagaggcagaatcatcacaagttctgataaaggacaaaaccttttctgatgcaactcacgttttcacttcacaagctccaaaagagtttacttgggaaaacaaaagtttgacgaatgcaaaaccaattttgttagcataagaccaaacctacttcttcgtctgcctctttgcctgtatttgagttgttcttgttttgagagaaagggtgagaaaatg

SEQ ID NO: 13279 - DNA, 3000 bp, Unknown
  misc_feature (1)..( 3000): cDNA_ID_1009169_gDNA_ID_2214611_Annot_ID_187385 3000 nt of promoter + ATG
aggaacatcaataaaaccagaagataaagaaaaatcatgaaaatcctgatgtaaaactaagagtttttctttcccaacaactgatagagctgcaatatcttcacgattaaaactcttaaacgaaagaggaaaacgtggttctatcagttgttggaaaagacaaactgtcgctgttacatcagaagatattaaagctatggccagaagattttaaaccctagagttccgattctaaatcgtccggaagatcggagatcatcattgtctttctcatctcatccctcgaggaagaaagcgttgcgtatatgtgtataaaaattagggttttcgttacaataagcctaatcgatttatctaaaagcccattagaaagcccattagcttcacaaaatgtattttaacccgatttaaaatttcgtttgggccaaagccatcttaacccgacccatattaacatcactgcttacgcaaacacaacaagatttggagatttgtcgttaaacaaatttcgccgacctacgtatgagccgtcgcctccaatataaaccaaagccatccctaatcctcgaattcttcctctctgagtttttattctgagatagagaaagatgtcaggtttagcttgtaattcgtgtaacaaagacttcgaagacgacgctgagcagaagtttcactacaaatccgaatggcaccgttacaatctcaagcgcaaggttagaattcaatctcttgtgttttcgtttcgcgattaagttcgtctatggtttatggatttgattttggttcttctagttcatgattagtttggttttgaaatgtttatagatagctggtgttcctggagtaacagaggcactatttgaagctagacaagctgctatagctcaagagaaggttaaagctgttgaagcaccgatgctttatagttgtggaatctgtaacaaaggttacaggagttccaaggctcatgagcagcatcttaagtcgaagagtcatgttttgaaggcttcgacgagtactggagaggaggataaagcgatcatcaagcagcttccgcctcgtcgtgttgagaagaataacactgctcaattgaagggttcgattgaggaggaagagagtgaagatgaatggattgaggttgattcggatgaggatttggatgcggaaatgaatgaggatggtgaagaagaagatatggatgaagatggtattgaatttgagttggatccggcttgttgtttgatgtgtgataagaagcataagactatagagaaatgtatggttcatatgcataagtttcatgggttcttcattcctgatattgagtacttgaaggatcctaaagggtttctgacctacctcggtctaaaggtttgtgctttgtgcttagtctgtcttagatctttgtttttctttgctacttagtacttacatggttgttgtttcaggtcaagagagacttcgtgtgtctgtactgcaatgaattgtgccatccatttagtagtttggaagctgttcgtaagcatatggacgccaaaggtcattgcaaagtgcattatggtgatggtggtgatgaagaagatgcagaacttgaagagttctatgactacagcagcaggttccatttcttctgctttctcctctgttgttggtgtctaaatgtgcttgaactaattgtgtcttcttttgatgtgtgtttgtacagctatgtcaatggagacgaaaatcagatggttgtgtccggtgagtcagtgaacactgtagagctttttggtgggtctgagcttgtgatcaccaagagaaccgataacaaagtaacgtctaggactcttgggtctcgagaattcatgcgctactacaaacagaagccagcaccgtcttctcagaagcatattgtcaactctctaacctccaggtttgtctttaaccgatcagagatcatttatcactgtctctgtgtagaatttgaatctgacgtgaatgggtcttaaaacacaggtacaagatgatgggtctagcaacagtgcagtcaaaggaggccatagtgaggatgaaggtgatgagagagatgaacaaaagaggagcgaaaagcagtgtcaggctcggaatgaagagcaacgtcatcaggaatctgcccaacaatgtcacctattagtcttgctcctcgattttcaggtctctcctctttgtttgattttgtgaccagagttttggtgagtaaatctatctaagtttttcactagtactcaagtatcttaggcccatttgggtctctgttttgtctgatttagtcttttgaaaatgttacgttttggctgagtttgtatctcttgcccagtgctttgtacactctacattaatctatatttcatttggtagaagatcaagagctaatcaatctttatctgctaaatcataaatctagtacacttttcacttatctatacatttgttttagataacgaatgctctcgacttcactttctctagctatcttgataaattgtataaaggtaaatgcacaggtcgatttacgagttcctcacaaaccgcgagtaaatctcgacacgaatatcttgcatcatccactatatctctttattatttatcactctattgctctctcttacaggcactactgtttcaaaagagagaggaacaagtttaaagcctaactctttccaaagtccaacagcccaacttcacaggagcccatcgaaatcataagtcttctaaaccggaaagcttttgagtcgaataaactgaactgagagtaaaccggagaactgaatttattaaaaagtaattatattatagatttacctcgccctaattggcgggaagctctaatcaaaattggagggaaaatcccccaaaaattctttcgtcgctattaaaattcccccaaaatcttctcttccctttactttgatcacttttcaacttcctaaatctcttcacagttactttcgattttccgatttcgtagcttcgaaaatg

SEQ ID NO: 13280 - DNA, 3000 bp, Unknown
  misc_feature (1)..( 3000): cDNA_ID_2702541_gDNA_ID_2214611_Annot_ID_187379 3000 nt of promoter + ATG
aaaaaagaaggtcgttttcatataaaatgagattttcaaaattttaaaggctctcgagtgaatattttctattaacatgcatggttcggatttttctaaaactagatcattcaaatttgctttagattagtgagaatgtttgcccaatcatatacgcgaaagataatatgatgagataaatgtgtcgtaatttcttgtacgggtgagcatatcctaacatttgaaaaagttgaactgtaaacagattataacaatcttttacatattttgttaataaaaaatggttatctacgtaataatggtagcttcgtaggaaacattagaggtaaaatgaacaaagaacggtaggttctaatgatcgggacattcgtcgttgattaaagacgcatttcattttcttacttgaagtgtttgataagttaaacctactacattttctggaagactacgaaatataagaatatgtgggaagatatactataatatatcttctcatggtataattggcatgactttttttcaaaattggcatgtttcatttggtaataaaataaaatgttatcgtatttcaaagaaaatttgagcaacaatatagtttatacaatggtacttcttatagtgataattgcgataactgttgattcaaattctttattttattaatattaaatatctagtaagccctattgttcaattattccatgtacttttgacgatgtatagtcggagtctaagctagtttttttcttctaattatgagaatatgaatctaaatctttctaagttatgttgttgttttgtttcaagttatttctatcctaccactagtcagtcaaaccggaatttcaaaacttcaaagttaaatgttaggtttccattgattaattactctatacaccttttttttgtcgggcaaaatcaatatattaggacaagacgtcggaaaaagtttggaagaaaaccaacaatgtgtccgcaatatttggaccgtaaagaatgattatatattacgtttatacaaaatgatcttgaagtgagggtacctaaaatgctaggttgatttccaaatatgtatttgtgttggagcgaattaatcagcgggttgttgaatgatcacatgaaatccttaagataattgaaggagactcaaattacacacacgcaaactcatccatatctgatcttagatatattatatatggaactaacattggtcattttgcggtcttgagcggaagagatgactcaatacttagtacttttctaagaagattgaactcaaaacagcctcaacgagctaaattatttttgtgtgaagatagaactcaaaattacatccacagaactgcaatctatttatatgcgaagagataacgcaacatttaattttagcaagctaaaattcactttccaattaaacgtaaactcaacacttactttcaacaaactgatatatctacttgaaaagaaaactcaacgcttgcactcagcgagcataacttctcttcttcttcttcttttttcttgtcgaggtaacaaaaatgtcacaagttttgttgaggagaagagtttacagtcacatcgggagtttttttttcccattaaatctcttttctttggaggtctttaatttgattctcaacagatacgtgatcaagttgtgaataatcaatttttttgtgaatatataccaactcgaataaaataaaaacataaatggacaaaataaaaaaaagtcaaaaaataaaattgtcattaattattatgtgtccttttttggtaatttatttttgggaaaacagtaaatattttattgtgtttaattatatagaagaatagctaatatttggaacaaaattgttcacgtggaaaagacagtgagaaaacttggatccatccatagtccatatatatgggtagtcttccttctttctttatttgatgtgttattcatgaccattttatatttgaattaaatcatataaaccatttgattctttgaccatcgaccattgacccctaaaccaaacatatgattttttttgggagtcgtaattagcaacaaaacggaccggctcgtgcgtgatccgacaccaacaccaacataaggtttttttttttccgttcttaacaccaacatagttcattcatatatatagggaatatacacatgtgggtgtgtgtataagtatatctgtatatatgtataagctaagatgaattaataagggtcctaaaaggagaatttcttgaccaactacacaaaataaacaaaggataaaatttggacgtgtgaggtttagctgcatgtaccttgtacttgaagacccttattaggtgagagcttcatgcacacactctcttccacattttcctcccttttctacataataatttctaccccatacaatagtaatgttatttaattatttataaacaatcacataaacactgaaatgtaaattatattcttacagcgtcttattgaaaattctatgtctttcaaacttagatggtaattgggttttctaaatatgctaacaaaacttagaattgataaatatgtgtatgtatttataaattaatcaaaaccgtgttagcgtaattgttttttaatcccattcacgataaagtaagaagaaaaaaaccctactctttgtcgtcttccttcatctttttcctcctaagaatagtcgcaagtcatccttgtctcatgatatataaataccatcaaaaccctaatctcataaaagttttagttgtctggtttttcctcatctatacaagtaagcccaatttctcaccctatacatatcatacatatatatcgatcttttactattctctcttctttcgaattcctcctttaatacctttgtcttatggataaacagttgtagaacgctaggatctatgtgaaacttagacttgttactatgtgttttaagcaggtataaaaaggttcttggatttggagtaaactaaagatcatataaaatg

SEQ ID NO: 13281 - DNA, 3000 bp, Unknown
  misc_feature (1)..( 3000): cDNA_ID_3028991_gDNA_ID_2214611_Annot_ID_187372 3000 nt of promoter + ATG
taactatatttctctcctctttttattggtcaaagaataagaataataatgatgttgatgtagaacatcaatctttgtgaaacaagaaaaaaactcaaaacatcaaacttttaggaacagagggagtataacacaaggaaaccgtcgagtgaaattcttgacacttgtttttcttgtgaacaatcaactgtgtacggtagagttggagcatttgcgcctaaactatttgaagaaacccaagaaacccgacaaatggagattaatagaatatttaatgcaagagaaactttaaagtgaagtttgtcacacatgtaattttttgtgaacaatcaattaactttaagggaacatatcaatctcggacatgtacatatcaatctttgatatatatacgacaaatttggagtatttgcgttgtttgcttttaggagaaaagagacaaaagaagatcaatcgaacttaatgcaaggaaaaccgtatagggaaattctctaaacgtgttatttcattcctagtaaaataactgatataaatgaaacagatcgatctctgacatgtacgatattttgagtaattacgttttcagttctagaaaagaacatacaaatggatatcaagagaatacttgattcaaggaaaacatcgagcaaagttatttacacaacttgtttcctacaaagaaagaattggctttaagggaacatatcaatctctaacatgtataccggatttgtagcatttgtgttacaaggaaaccgtagaatgaaattcttgacacatgtttttcttgtgaacaattaactgactttcaaggtactgatcattctttgacatgtacaatagattgttgagtatttgcgtcttaactattgggagagaagaaaccaaaaacgagattaagatgatacttaatgctagggaaaccttaaagtacaaaatttttgtgttaattcctaggaacaatcagttaactgtaagggaacatatcattcttagacatgtatgacaaatttggagcatttacatcataacttttgggaaaagagacaaaagaagatgaaacgaatttaatgtaagtgaaaccgtcgaatgaaatttctcacacgtgttatttcttattttcaaacaactaactttacagaaacatatcaacctctgacatgtatgacaaatttggatcgaactccgatctttttaaatgtcggctctataaaaaaagttcgttagtctcttaatttttgttttaaaaatctcaatcattacaataaatatgatgttgaaattgtattattttattaatttgtaaatatggacataaacattaattcaacattagtttttgttagagaaatactgtaatataccacactgttatgtttttattccaaaaatgccaatactagtttatcttctcaataatatcacaaggttttgtataaaaatatttattcaaccaaaatgaaatacaaataaaattaaaatatgtatatttgagttgcctagctctttctaatttaaggtttatatttccatcatttaaaagaatttttgagtcattttaatattaaatttgttgtactattagaaaaaaaatagtgattgtatttaagaacaaaaactaaaaaatatagtattttagagaattttccaaaaaaaaaattcacgttattgagttattcatttataaacatttacttaatttatcacaacataagaattttgttccctagtttcaaaagtttcttttaccgaattctaattatgtaaagagataaacaatttatgcttttataattttttattttgtataggtcttaaaaaatacgagattctattttttatatgagaaaaacaaatggacgttttcgaggaaaaagaggagaaaagaaattataacggcaaaaaaaaagttgctggtttaggcaaattaataataatttgtgtaaagaagggaggacaagcgtgaatcagaaaagaccactgtaaccgtagctttaaagcggcaacgcgccgcctcacacgacaacctcgtaaaaccgaattgaaacaagccacgtgtcttatcctaaagaacgtgtgatacactctccgtaagtgagattgggagtgagaaaagaatttgccaataaaggaaggatcaaaattataaataaacaaaaaaggaaggaaaaacaaaaaatcaaaagctgagaaagtaaatgggaaacgacgactgagactcttcttctccttctccttcttcttctacttatttcatcgtttcatttcttaggtttctgatttcatcacaacctctggatttgatttttgattcggaggtatataaaaaaatgtttagtggggtttgcgattcgatgaactagggtttgtaatttcactatcttcttcttctcttcgatcgtttactcatcgggtgagaaggaagcgtctttcatgtgttcttccgtgtaatcgactgttttattgggcttagtagctctaggtaaaccttaatttcttcttcttcagtacttgattcatcggatctgcgtttttcttatgttttttcttctgggttttggctcagagtcatgatctgtagctttatctctgttaggaccttaaagttataaactttgatttttctgtaatgggtattgattctactaatgaaagttttcgaatcttatggtaaatagttaacctagttggtttcttcgttttgactagctcgtttgtcttaatttgggtatgtgcatggtctttgagagcgaaagctgttttttttgtttcaaggttcttgttttcatttttgaagcaagtctttcatatttgatatgttaattttgatgatagtaagatcattttactgatggctagtgctgttaatgagactttgtttccagtttttgagctaatgcttcttgtttgtgtttatctttgagtctaaagattttatttgtgtgtacttgcagtttggtcaaagaattcgtaacaagtgaatcttagattgggaagatg

SEQ ID NO: 13282 - DNA, 3000 bp, Unknown
  misc_feature (1)..( 3000): cDNA_ID_2991470_gDNA_ID_2214611_Annot_ID_187364 3000 nt of promoter + ATG
aatattcagccagagattggttaagtggagcatttgtttatacagccatggttaattatccaactgcagctaatttcatggcgccactgcctggttatcccgtagagcaggtgagatattcattcgttaaagtgtgtcatcgagtattttctttttcccgaccgtcattttctcttgcatcagatgtgcaagatcatcgacgggttccctcgaggatccagtaatcttgaccgtgcctttgctgctgcaagcttatactacaactattcgggatcagaaaaatgcttcgagatggaacaacaaactgatgatcatggacttgatggttggcaatatcaggtaaactcatttagaccgtcatttagatatttgaacatattctaatagatttgacgatttgcagtcgctagagcaagaaatggttttatgttatgaaacttaaaacttataaatgacacaaaatgattattgaatggaaacaggcgtgtacagagatggtgatgccaatgagctgctcgaaccagagcatgctccctccgtacgaaaatgactctgaggcattccaagaacaatgcatgactagatacggagtcaagcctcgaccccattggatcaccacagaatttggtggaatggtcagtttttttcttcccctccattggatcagtttcttcggctgtaagattcaatatcctgctctttggtcatcttttgcagaggatagagacagtactgaagagatttggaagcaacatcatattctccaatggaatgcaggacccttggagccgtggagggtaagtggtactacacagtactattcggttttggttcttaaacagatggattattttcatcaaattttcagggttctgaagaacatttcaagtagcatcgttgcgcttgtgaccaagaaaggtaaacacttctgttatgtttatgaatgttggggaaagttagacagagatagatttgagtgaaaaatcgaaacctaacattgttttgtgtggaacaggagctcaccatgcagatctcagggctgctacaaaagatgacccagagtggctgaaagagcagaggaggcaagaggttgccattatagagaaatggatcagtgagtattacagagatttaagagaagagcaatagaggagccaaacaaaagtttattgcactaaaaatcaacaaataaagaaactaggtgtttttgattcggttcgtgtaacaaagtaaaagcttcaccaggaatttgtattccctcaaacaaaataatctgatgtttgtttctctatggagtgaattctgtaactaatatctgattatatcgtggcattcatgaaaatgttatggaacaaagagggtatcatcgcaaatagtcaaaaatgtcacgcgtatttaaaccctaattagacaccgagaacataagtaacgtacgacacattcttcatgaaacaaatgcgaattcaattagattcctattcttcttcttcgctctcttggtccaaatctgttgtcgaggtaggagagttacaagtcccgaaagtgtatcccttctgtgtcaacttgacggagaccatcatgaataaaggttcttgtggcaagtcagatttttgacttcttatcccgtttggcttggacaatctgatcagctatatgttcggacaagacatgatcgtggaattggcttaggagaagttgatagacgtagtttggttcgaagtttctgaagtctagaaagattagtgggtcgggacctcgagaaggattctggtaagatccgagactcgtgacgctaccatccctgtcgtttatgataaattcctcgaagtctctgtctcgactgatcattaccgagtttaagaaacctgacgatgatggagtacgagaccaagcggttacatgaacatcgagtttcattaattcagtatccattgtcgaatttttattcgacaaaatcagagagaaaatatgattcgtggagaattaaagtgtaatgttatgtttttataagcatagatctgattataatttgttctaacttctaacgcgtttatggaatttccttttttgtctccattttttttcttttttcgttcttattttctttttgtttaaattgtttaatattatttgcgggtttacgatgtgtttatagataagatattttataaaacaaagaaaaaaagaaaatctttctaaaaactgtaattaatatttgctataatacaataaaaagtaaagtttggtagtggatcatgctgaaatttaaccttgaaataactaagttaatgaaatttgatcattttataaaaagttaaactaaattttaggatttaagtgttttttcgaaagttcataattttttcgttcaaaatttaaaagttttttttttttttggttcagactatgaatgatcatttgatcgataacttgttttttattgggttttgttggatttctcatagtaatttcattgttcctccttgtctttgcgattgtcctctttgacttcatggtactgaaatcttttttggatctttctattttttggaaattgcttggatagctcccgatcgtttatctttcaatcaaactacggtttcatttttctaagcccaaataatctcgatttccgaaatttcatttcacaaggcttcaaactaactccgaaagatgtggaaaaatttagtgaatacgaaaagatgtgggacgcttcataaataaagatgtgcggcaattttgtaattacgcaaagatgtaggcaattacgtaactacccaaagatgtgaggggatttcgtaaataggggaaaggtatgggataatgtcgtaattaccaaacgatgtgggggtgatagagttactagtgccaatcttggaatagatagtctccctccagttacagtgctctcttttccactatcgccatgattgctcaaacgtgaattgaatgatctgatccataatctaaaaaattgagctttcatcagtaaccgaagca

SEQ ID NO: 13283 - DNA, 2614 bp, Unknown; identical to SEQ ID NO: 13278
  misc_feature (1)..( 2614): cDNA_ID_3029005_gDNA_ID_2214611_Annot_ID_187362 3000 nt of promoter + ATG

SEQ ID NO: 13284 - DNA, 3000 bp, Unknown
  misc_feature (1)..( 3000): cDNA_ID_2991470_gDNA_ID_2214611_Annot_ID_135746 3000 nt of promoter + ATG
tccctccagttacagtgctctcttttccactatcgccatgattgctcaaacgtgaattgaatgatctgatccataatctaaaaaattgagctttcatcagtaaccgaagcaatggcacggaggtctggaaattgcatgagatgtctagtgatattctcggtggtttcagcattattagtgtgtggacctgctctttactggaaattgaataagggtttcgttggatctgctcgtagcaccaactccatttgtcctccttgtgtctgcgattttcctcctcctttgtctctcctccagattgctcccggtactgttgttacatctgggttttcaatttgattcataaaataggagactttataaatctggaaatgcttagatcgtgcttggaacaatcttgtggtttctgtgatggatctttctatcaaagctacggcttttaaattgtatacataagaagagtctcaatttctaatgaagtttcattcttttgcagggcttgcaaacctctctattacaggttagatctcgttcccaagctttgaaactctgtatgtattgtttcttcagtttctctagtatctctactgatttagtatgaatgagaatgcctatctgatgatttctcactgagaacccttactgaatcgtttgaaaacctaggaatttgtgaatcagtaaccaatgggtgcaactatatctcttaaagttagactttatttgggtttcttgatcagacataggagcctaagattctcttatctgttgccaattgcattaggaatacttttaacaaatagtttttttagttatctgttgagaagatgttcctcttttagtccatggaaaagtagaatatgatatatctgttgacttgtgttatgtatcaggttgtggcagcgatgatccagagctcaaagaggagatggagaagccgtttgtggatcttctcacagaagagctgaagcttcaagaagcagtggcagacgagcatagtcgtcatatgaatgttacacttgccgaagctaaaagagttgcttcacagtaccaaaaggaggctgagaagtgtaacgctgccactgaaatttgcgaatcagctagagagagagctcaagcattgttgctcaaagagcggaagatcacttttttgtgggagcgcagagctcggcaattaggttgggaaggtgagtaagtaattcactgtttagtgacttcttcacagtctactctgacgagtttctcaatggaagcaaactagattttctcttccgtatacaactcgtgagaacatgggaatcgcttaattcgcaaggcaatgtttttgtctcacatgttctctatatatgtagttcttttttgttttgctcttggctctagacactgctaaagaaagggttggccttgtattgacttttttcttcagatatatatttgtcagtcacactggacaaagtcaccgacttctgtattttattgttcatgtttattggcaaacgcaaccatcattttctcaccaggcaaaagcaaaatatataattatgatcttattgaacttggatattgtgttttttgagatgtgcatctgattgagacagcaagcctgatttgatttgtaagaggatttgttttgcagctaatgttggatgcatctgtgattatggtttaagcataagtgtgggtcaagagtcactaacaaagacttttgagatgtttaactaacactagaatttgtgaagagggacaagagcagaggaagagacaaaattagagaaaagtcaagaaagggttgacataatgcagcatatgatctctccaggtattacacagcaccaactttcaatactcattcatgcacaaaaacagctgcttttttctgtttatttgatttgtttatttttactagtgtcagccattaataatactctctttctctcgttgcattattctaatgctcacatggacagattccttaaaggtttttattaacactttagatctaccattaaagaacagatctcggttcagtgacttctgcaaaccgtctagacccatgtgggttgtccaaactctatagcttgaggctatttgttctatattcaacttattatgtggttatgtttcttttatgttcttctctgaagcttcctttgtggacttctgctgtttttttcctaactttggaatagtttttgtttatctctggacacagagatcgcaaattcttttttcttaaatggaaggttccatgaacaagcgaggatacgaatgcagtcaagaggatactgacaagctgccagaatcaaagagacaaaaagtgcctgctttagcaaggtaacttccttaaggattttctgtcattttctagttcaaagtagctcaatggttaaacatcacaactattgaggaagaacatgctttgttgtaagattcatggaggagaatgtgttccatttgaaactaagattctttactctttctgagtgagatttgttctttgttgagaggttcttttgtaagctctcaaattttagtttttatgtttccagacctcttgattatcttgcaagtttgttgattttctcatatgaaacaaactttttctagtgttattgtggaagctgtcaaagtagatagtctgcagaggctttgctcgtctttggagccgttgtttcgcagaattgtgagtttctattctacccctgatctagccacgtaatgctattatagtaaattgtgagatgcttgtggaggtgtttactgggtatggtgtggacaaacacacaggttagcgaagaagtggaacgagccttatcaaggttgggaaacgcaaagttaacctcgaggtatttgctccattataccttttcctcttgaaatggctctatgatctttgtagcgcttagtttctgattaacccaacataaaatctccaggtcaccagaaccaaagaggatccaagaccgcaatggaagaaacctgcaacttcactttaggacgcga

SEQ ID NO: 13285 - DNA, 3000 bp, Unknown; identical to SEQ ID NO: 13281
  misc_feature (1)..( 3000): cDNA_ID_2994259_gDNA_ID_2214611_Annot_ID_135752 3000 nt of promoter + ATG

SEQ ID NO: 13286 - DNA, 3000 bp, Unknown
  misc_feature (1)..( 3000): cDNA_ID_2713369_gDNA_ID_2214611_Annot_ID_135753 3000 nt of promoter + ATG
gtcttctgagttaggaaatgtgacacacttgaacactttacattttctacacaacacaaatcccacctataatcacatcattcaagttcccagatttagataaccaatccaaagtttcacagatacattacttagcaacagtttaacctaatcgaaatttacgaaaactcacagctttacaagttggacatcgtcgatagattcgattattctcagatttcacatttgttttctgtcctttacagaaatcgcagagcaaccatcctttcccgttacaatcctcacacaaaatcacagcattgtcgtctcccttcacgaaaaatcctcaatcaattgtcagatccgatttcaacttcatcgatttttaatgtccaaatttttgtttggtacctgctgcgactgatcgagctgaggctcttgttcttgaagtggaacgcatcgaaatggcttaaagagacgacgttgttttcgacgcgacgtggatgaagccggcgacggcgctgatgatggcatcagccgtaaataacatgaaattggaggctgtaacgttatccaagtcgccattttttttttgctctttcctgaattcctcaatccaacttccgtggcggttaattcacacaaagtccgtccgctacagtaactagtgggctgataatggatcgtaggaaggcccattaatttcgattattgctggtattagtagggaccagtacagtacccacacaggctatggacagctcaacagcaactaagtggcggatacacaaatgacaaatctgtggaattaaaaatccgggacttggtccatagtttctcaaggtttgggaggtccagcccaaagtttaaattctattaagtctatttggtatactttgcagggtctttgttttgaagctttggttgccactcgctttcactatgcttcagttaataatctatcttctgtactaagatagaagcacattgtctacaacatatgaccttccctagctaataaaacttgatgctatctacaacacatttgttgtccactttttgctttataatttccaataacatcttgatttggtattacttactagtattgtggaaaattcacacaattcgtctcaaacatagtagcaattgagctctcgtaaaagataaatgcgaacaaacaatcgaagctaaacacatgtctatatgtgtattgtataataacataccgcacaagaatctgtagctgttttcttattccttatcagttgaattaagtaataccacaaaaccccaaatccccctcatgtatgtgtattcatgaagaagaatctaacccttcctagagagaacaccaagaatatattgactaattcattgaggaaactataccagatttcatttactgatccgaatgtagcggcgagtcatatctcggatttcggtaaattcaactcttcagcaaattctttagtcatcttcaagaaaccttccatgtgaagttgcttccattcctgtggaaagtacaatggaaagcatatatatacatacacaattcaaacaagtaatgatccagagagcctaatctatgaacaaattaagatagctaacctcgaaatcccatgtcccgtataggtcaggatcatctttcttggcccaaacgtaggtttttgtttgcagtttctcgtctgaactatcctgtaaacatatatatcaatatctctgcattcaaatcaaatatagagaacaaatgaattgttcttgttcttgcatctttgaatctttgcaaaaacaacaacacatttttttctctctatagaaatggatggagaatgaatctgagaatgactcactgttaacaaaacttgaacattctctctttcatactcaacatcctcaaactcatctaaaacattaagttcatcatctgtgattccaaataacacctgcacaacaacaatatcaaaatttcccaatccttaaggcatgagtaagaatctgattcggatcctgacctttccagagactttatcagacttagctggtataatcgccggataaacacgacctttgatgctgaatctatggctgcaaaaatctcaaaatcaccaatcaatttttttcaatttcaacaaagaaaatcgattttgcagagatggaatcgtacaaatcagggagggttgcggaagcggtttgagggatacggttgaggaggagacgaacgacgtcgtccgccatgagactgccgtagacgaagacactgtgcattgtcactgtaccactcatcttcttcctcttgacttctgcgagctttcgattatgtgagacttgtgagtgagagagaccaaaaacagaatcttcatgagattctttgggcctttttaagcttcgagccttcaaataattcgcaataaaaaattagcaaaaagaaatcgactctgctggggatcgaacccagaatctctggtttcgtagaccagcgccttatccattgggccacagagtctttcttgcaagtggtatgtattaacagtatataaccatgtttttattgttccataagaaaccagtcacgtgctttggaatttctggtttctccttctgtgttctttttcatttactttttttggaagttttttcttttcttttttggaagtttggacataccttatatgttacttgcgtggaaattaatctatacacaaattggtattgtaaatcgtcgaagaaagtttcagttaataggaaagagaaatcaagaggaaggagaggcggagaagaaggagaagcgttcatagagagatagagacgaaacaagagaaaatttatttttatagaaactctcttttctctgtatcctcttgtttcgctctcttaacaaaaaatgaaaaatagagaaaccatctttgaacctacctcaaaacacgtctctctctctctttcgatttcatcttctcaagtttctttattgctctgaatcttgaatcctgaaggagagaaagcgatagagagacgaagatg

SEQ ID NO: 13287 - DNA, 3000 bp, Unknown; identical to SEQ ID NO: 13280
  misc_feature (1)..( 3000): cDNA_ID_2702541_gDNA_ID_2214611_Annot_ID_135758 3000 nt of promoter + ATG

SEQ ID NO: 13288 - DNA, 3000 bp, Unknown
  misc_feature (1)..( 3000): cDNA_ID_2702554_gDNA_ID_2214611_Annot_ID_135765 3000 nt of promoter + ATG
tcttagaaggggaaaaaatacattgttacaaatttgtagtatataaaggttaataaatacaccaaaatgttaaaatactagataaccaacaacaacaaaatcttgaaccttgtgtaaatgtgtgcttggttttatttgcaagagtaaataaatttaaagtatcttacttattgcaaactatttaaattttcataagaattggtgacgtgagcgactgctcaaagatcaacaaaatgttttaactctttgttttttctaatccattaatcttcctacaaaatccaagaatctgagatgtgaaagtggctataatcagaaaaatgtttttgagtaaaaatcagtatatcaccaataaatagaacaacttgttgaacaattgaaataagatgcctttgtagtgtctttatagacttgtttatatatatcctctccaacaacgtagactctggtcctattttcatcatccacgtcaatatcagaacacactgccactttattctcctcatccaacaagaaacttgccacattcaccacgctcggtaaattaaacttatcataatccactgttaagacgaagttgctccacgacaattctatggtttcatcaatcttattggtcaaccatatcttcatctcatttgaaaattcaagaatcttttgatgtaacactgagagtttttcttccctaacaactgatagagaagcagtatcttcacgattaaaactcttaaacggaagaggaaaatgcccaaatctctcccttgtgaaatcaaaatacaacatgaacatgcccatttctttatctccagcaacccagtaagtgtttcttttcaagggcccgccacttgaaaatacaccatagtcatgagtgaagtaatcaagaaccctccaagtatcagagccaaactcatagatctcaaactcagcaacccattgtttctggtcgtttctataatagcaagacctcaagattttgaagctatggccagaagacttgctgtttacgtatcctaaaccatagtaatcatcattccgaaaacgagttctcggtttgatccaccgggtttcaccggtactggagtcccaaaccacaagtctagtgtttcccttagtagagcataatattaaaccctcacagtgggaagatcttagatattttcaaatcctctgaatcctttagacggcaaagtttaccagaaaactcgatagatggatcaacgtttttgtgaattccatggtgatcgacactaactgaataaactccaaaattactcagtaacatcaacttacttggtgcgttaccaaagttcttcttgatgaagtttggatctctgaataaagcataccatcgtttgcaattttgctagagacttggttggaaccctagagagtatttcagattccaaatcgtccggaagatcggagatcatcattgtctttctcgttgttgctgatctgatcacttgtggaagaaagcgtacagtatatttaagtgtatatagaaattagggttttcgttacaataagcccataccatttattgaaaaccttattatgtgttgttaaaaagcccattacctccactgatcttcttttatgtttttagcatatatactagaaacttgggtctcaagctcttgggttgtacggttgtaccctctttttcttttggatttgagttgttacaatttttcctatcatcatcactcctcaacaagttagatgcaaatgattcttagctattttcttttagagtgttcatcaaacatttcttcatcttttacaaatagaaagttttcttcaaaggtattgaatagtttagtacgtcatttcctttataattttttcatcctctttccttaggtcttgttcacctagtaccaaaccctttttggcttcttcataaaaatgatggcattgcaaaactcaatttgtatttgctagattcggattttcgcagaacttaccctcgggattttaaaggtagaagtgttgtgatttagccgtatttattagtaatacatacaatatttttatttttatttttttggttaaaaagctagtacattattatcaccaaaaccgtttaatattgtagtctacggacagcttccaaactgctgaatggatgacgcaattcattgcagttcagacacacgaagtctcccttgacctgaaacaacaaccatgtaaatgaaagtgatgagacagactaagcagaatgcacaaacctgtagaccgaggtactttagaaaccctttaggatctttcaagtactttggcaatcataatgtctaaatggctttaccatggaattcattatgtatagtattaaaaaaatcattatatcaataaatagaaacaactacttatgactaagctcgaacaaaggaacatcaataaaaccagaagataaagaaaaatcatgaaaatcctgatgtaaaactaagagtttttctttcccaacaactgatagagctgcaatatcttcacgattaaaactcttaaacgaaagaggaaaacgtggttctatcagttgttggaaaagacaaactgtcgctgttacatcagaagatattaaagctatggccagaagattttaaaccctagagttccgattctaaatcgtccggaagatcggagatcatcattgtctttctcatctcatccctcgaggaagaaagcgttgcgtatatgtgtataaaaattagggttttcgttacaataagcctaatcgatttatctaaaagcccattagaaagcccattagcttcacaaaatgtattttaacccgatttaaaatttcgtttgggccaaagccatcttaacccgacccatattaacatcactgcttacgcaaacacaacaagatttggagatttgtcgttaaacaaatttcgccgacctacgtatgagccgtcgcctccaatataaaccaaagccatccctaatcctcgaattcttcctctctgagtttttattctgagatagagaaagatg

SEQ ID NO: 13289 - DNA, 3000 bp, Unknown
  misc_feature (1)..( 3000): cDNA_ID_2702566_gDNA_ID_2214612_Annot_ID_135771 3000 nt of promoter + ATG
agctttttttgataacatgtgaatcgctgaagtggaatgataaagtggtgtggactaagcccaagttgcttctaattcttcttagtagcccgatagtgtagctaggtggtcattcatatcgttataactcttctctcctcctctttaatataaaatctacatcttaaatgatctgaatgacctcttgtctcaaacatagagtacgattaagcatatagctgtaatcagttaattcacattgttggactaaattctgaaaatctctcattcctcgtgatatcaatggtaaatgttcatacattgaatgatcctctccttccaacacctcactgaaatctgcacatatcaaccaagttttaccatgaaatagagcaaaactatgatagtgtcgaagatcggcctatagtgttttgcgttccatcacaaaattggatgcataaacaaatattgcaaaacattcttccttttctccttcaatcaagatcgaacatgtaatcaattgtgatgtcttgtagataggcgtgacttgcacgttatttctccaaagcaaccaaattcttcctagtctatattcttcataattgcatataaaagaccattctctaaaaactgactttgtaatcttgtatacctttctttcttttacttttgtttctattaaaaaatcaaaatcaaacttccccctattcatccaatcccttacaacatcatgcttacctcttttattaaaatatctaatgttccagaagaaaccagacattaagaatgttgtggaggtttacttgtcttcaagtagttaggatttattatcctagaattgtgcatgtttttgttgacaaaaattcgtgaccatcctttgaatacatgttcgattgattacatcctcagcgtgacaaatccaaattcacaataaatcatataagcaatacagcttttcgattacatcttaaaccaccttagtgaggttctataactaaaatggttgaattatattaaactaaacaaacaatgttttctaaaaatggtatgcccaaaaatggtttacgaaaaatagactcaaaaatacaaatgtcattggcgaaaaataaatgacaattaatgaatatacaaataatagataaaaagcaaaatgaaataaattttcaatgtttcatttagttaaagatagtgtatcttgaagatcataacgtattttagattatgtacctgatttataagtggcttataaatcacctaccattttaccagtaaccgatctaatctacacacaaatatcatcttttactcttataagattttaaccatatttttagatctcataagaatcaatgcaatttcatataaaacatcaaaataattctataaattaaaattttctcaagataatatttaattttatttataaatctcttaattagccatctttctacatttatcaaaagatattagctatctgttctcataggcaatatgataaaaaaaaaaactttttccaagttaggggcacaaaaagagtttccctgggacttgggctgagaataatgaagtggctgggaaatgattagttaaggatggcttgatgaattctcaatattctgttgagggaacaaaatatactaggaaggatgcaagtccagtttggtctaaaccattgtacgaaccaaaaacaatcaataaagtaactcagggctcacaaatggtcgataatatttctaaagtttcagttctagaggatgagcaaaaggatttgatgatgggagatgtactagaggtacaagacaagagtctcactgaagggttgaatttcagatattttaaatcacgtttggagtaacaaaaaacaaatgtgagaaggagctcaattagctccaactgaatctagtgttattagggatactttggaaactccaattcaatctttaagatgtaggattgatgaattcatggaaatcggcagatccatctatgaatttagtatggtggtgtttcctaggaattgacaatacaattttacttggtgcaaagtgtcttcggaggtgtccctttctttttcactcggaattggaagttttaatattggcaataaaaaatatcctttcaagaaggataaagtgtcaggcatttgaaacagataattattcagagtaagttttgatggtacagtcccctgaagaatgactcgctttctctaattttttagaagatcttgaattgctatgtgtctccttttcttgctttcttctatttcatgtttatgtaatactaaggcaaactatttagcacaatattctaaacttttattttctgaagttattttttaaaccctttccctcctaattggacaaccaatcatggaattagtttttacgtaatgttttaaactcactatttcacctttattctgacctgttaatggaagacaactatgactttatacattgaaatgttgtcaacctgttatatattaatgttaacatagctaatgacctatcaatgtacgtaaagcgaatgtcaatcatattcgtatccgttaatttcatttaggaaatcaggctcattgccaatccactaagaaacatctctgatagatccaaataataaaaataatataatatgaagcaaaatagaacgaaatatctcacgcggaccaaactttgaactttattataaaacaaatcagcacgtgaaagtaatggtcggttcggtccaagatgccaagaactcctccggtccatccatcaacctaaccttttttggatataaaatttagcaaattccatttccacgaccacacaacaacaacacatccactcgaattttctatttccgaataacaaaaccggtaaactcatcacaaacttaagttactttgtagtttgtgttttgtccttttatgtaatgaagaagatccaactaactactactcaatatttttgtattgaccgttgatttctcagatctgacttttacttctccttcttccagatcggcggagacatg

SEQ ID NO: 13290 - DNA, 3000 bp, Unknown
  misc_feature (1)..( 3000): cDNA_ID_2702603_gDNA_ID_2214612_Annot_ID_135777 3000 nt of promoter + ATG
acaactttgagatcaaaagcggtctcattgcaatggttcaggggaacaagtttcatggtctgccaatggaggattcgctcgatcatcttgacgagtttgaaaggctctgtgaccttactaaaatcaatggagttagtgaagatggtttcaagtttcgcttgtttccattctcacttggagataaaacccatctttgggaaaagacgctaccccagaattcaatcacgacctgggatgactgcaaaaaggccttctttgcaaaattcttctccaactccagaactgcaagactccggaatgagatatccggattcactcagaagcaaaatgaaagcttttgtgaagcttgggagcgctttaagggttaccaaaccaaatgccctcatcccggatttaagcaagcttctcttctcagcacactctatagaggcgtcctgcctaaattaaggatgctgctagataccgcttccaacgggaatttcctgaataaggatgttgaaaaaggatgggagctagttgaaaacttggctcagtcggatggtaattacaacgagaactatgacaaaagcatcagcaccagctctgaatctgatgacaagcaccaccgagagattaaagctctcaatgacaaaattgacaaactcctccaagtgcagcagaagcatgttcacttcgcctctgaacacgaagtcttccaaatccaagagggggagaatgatcagtgcgctgaaatcagctatgttcagaaccaagacggctataacaaagggtacaacaattatagacccaacccaaatctgtcatacagaagcacaaatgttgctaatcctcaggaccaagtttaccctcagcagcagcagctgaaccaacccaaaccgtttgtttcttacaaccaaagccaagggtttgttccaaaaccgcaatttcaagggggataccaacaacagcaaccaccacctggtttcacaccacagcaatatcaagcctctacacctcaggaattagacatcaggaatatgctccaaaagatcatgcaaggccaaggcgcgggggtaatggaagccgctaagaagctggctgacttaaacatcaaaattgacagatagttcgttgaaatgaatagcaagctcgaatcattgagcacaagggtacgatatctggacggcatcaccgcttcaccacctgttacaaacaacccatgccaggtttcaggaaaagcaatacaaaaccctaaggagtatgccactgcccacgcaatcattatcagacatgatcgagagctgtcaactcaacatgtctctacatcaaacactgaggacagtgtaattcaagaaggggaggcttccgttcagattgaagtctctgttgctgagatcgactatgcagctcaaactttctatcaggctcagtctgacttggaggagaaggctactataatcgagagaatggtaaaacgattcaagccagctccatcaccttcacttgctcttccatggacgttcaggaaagcttggaaaagcatatatgaatctctggcagaaaaacaacttgatgagatggaatctgtgatgcccttagtagaagtcctcaagttgatttcagaccctcacaaagatgtgagaaacctgatactggaaaggctcaacatatatcaggattcagatgacgaagaagatgtcattatgcatcaagccgctggtgagaggattattcaagagaagctggaagatcctggatctttcactctgccatgttccattagccaattgactttcagcaattgtctatgtgatctaggagcctcagtcagtttaatgccactctctgtggcaaggaagctgagattcgttcagtacaagtcctgtgacatcaccttgatccttgctgatagaacttcaaggagacctttcagcattctagaggatgtgccagtaatgattaatggtgtcgaggtgcctactgattttgtcgtgcttgagatggatgaaaagtctaaggatcctctgatcttaggaagacttttcttggcctcagtgggagcagtaatagatgtcagatttggtaagattgatctcaaccttgggaggcacgacaagttacagtttgacatcaacaaatctccaacaaggtcaccaacagaaggaaaaaccttagagatttagagagcggttccatgtgaaggccttgagatcacaatggggaaggagcaaaatttagttcaaactcagccttcgaactcgactactcgatcgagtataccctccacacttgattggctggagctccaaaggaagactgatctccaaaacgggaacattcaaaagctgaacttcacagttgaaaagcttagagacaaactgagtcaaatgcaaaaggagggttaacctcagctcaacactgataagatttcaagaaagaagatcacctcgaattgatctgaagagaaagactatcctctagaggaggaagcggcttactttaaggaaagaggaattgaatactcagctgtacaactgtcaagggaggattctgagtatgatgttgagatcagtgaagaggaggacttctcaagttctctctatcacattttctccacttaattagtgtgaggagtcaagctagagactctaaacaagctcacttgggaggaaatcccatgactatccctgtatatactttttatttatttgttacttttgatttgttatggttgtgtctttgattctctggaaatgaataacagctggagtgatcaacatggatgtgatcgagtgttcaaatgaaaattttacaaattttgataaaatactcgatcgcaacataggagtaaaagctcggaagtgcgatccagcggttttgagataacaacttcatcaacatcattttcaaactactagatcgcaaggaggagtgaaagtgtccgcagaacgtcaatgagaaaccttgctcccataaacttcactggatttcaatctccaccgaaactccaaaaagcccatg

SEQ ID NO: 13291 - DNA, 3000 bp, Unknown
  misc_feature (1)..( 3000): cDNA_ID_2713393_gDNA_ID_2214612_Annot_ID_135782 3000 nt of promoter + ATG
tgcaagaagaccgctgatgcatccaacatagccaaactatttttcaaggaggtagtgcgccttcacggggttcctaagtcaatcacttcggatagggatacaaagtttctaagtcatttctggtctactctgtggaggatgtttggaacagctcttaatcgaagttctacacctcatacgcaaatcgacgggcaaaccgaagtaactaatagaaccttgggaaatatggttcgaagtatatgcggggataatccaaagcaatgggatttagctttgcctcaaatagaatttgcttacaacagtgttgtacatgtggttgatttggttaagttaccaaaggctcttgggtaagtgcatcagctgaaactatggctgaagagattttagttgttaaggaagttgtcaaagctaagttagaggctaccgggaaaaagaacaaagtcgctgctgataaacgtcggagattcaaagttttcaaagaaggtgatgatgtgatggtgctccttcgtaaagggagatttgcagttggaacgtacaacaaggtaaagcctcgcaagtatggcccgtttaaggtgttgcggaagatcaatgataatgcttatgttgtggctctcccgaaatcaatgaacatttccaataccttcaacgtagctgacattcatgagtatcatgcagacggggtcctttatccagaagagaacttgaggacaagttcttcagaggtggaggagactgatgtaggagagatttagcagttttacatttcttttcatatttccttatttcaagttttctattttgcttagagttttctattttatgatttggtttcttctctatatatagaaagaccctaagttttttgctcgacacgttttatcattttaattaataaaagcagagagtttttctctaatctggtggatttccaaagtttcaacctttcaaattcgacgcttgcgaacttgattcatgtttaggcatagtgattgctattcctagaggttccgactccgtaagtattttaattctatataaataaatgaagaaaaaagtaatcataattacccaaataaaacagtttgtttatattcctttttaaaattttaagtaacatcgttaatgtgcttagtgttctttatgttttgcttcccgtcaatattaaataatctttacatggaaattaatcggtctcatatataaaagagaaattgaagacgattaagatgctattaactttatttatgagtatgtattatgtgaaacaccttttatttataacttcaacataatcgtttctaatctttcaaaaaaaactgcctaaatatttttaaatcgttacgtctcaaatatagtctttttaaatatagttaatttatcaaccttatatatttttggataaaaaacatgatttatatgatcaatttagatgtatttttagtattagaggttttcctaagaaaataaatcatgtttttatgaagtgtaagtttctgaggttttttcacaaacccccaccatctgttaatgcattgggtctaacttcatttgatgaccgacttcaaatgaattatttacataggcatgaacaaaattttaaattttgataattaaaataatctttaacaaagaaaaaagataattaaaataatcacagttttttttcttttgagaaatataaaataatttagaaaaattcaaaagaaaacaaaaataaaagagggagaaagagatgtggcatgagtgatgggtgtgtatgggagtgagtgagagctgtgaaagggaagagtcgcagagagtgcagaagttttcagagtttgcagactcactcattattttccctctctctctctcaaacttttttacttctattctcataaatattttttattcaaaacaatttattattcatgcatagtgtttttaacacaagtggaccgtgtacacttaattttataaatgtcgaatgtgttggagctacgagtactacgagtcgtctatctaaccaaagatgtcacattacacgatacggtttatttgattgaagaacaaaaataatgatttggtataattcaaaatttataaactcattacaattggacttctttcattttattttctaatactataatgaatgattaagagaatgttctttgtggttagctaaacctttataacgatctttgtaatagttgcaatatgcttacatgtttctttttttatagttaaaacattaagaagaatagaagagggacataaatcctctcacttggctatttacttactatatttaggatcgaatataaatgctaaaaacatcttaaatattgtagggttaaattcaagcttctttcacaaataagtattttttttttcttattttttctttctcacatatactaaagtttgagatataagttatatgactcaaaagatatcataacaacccaacattagagctgaaatttttaatgtcttattattttgtacacaactttacctcttaagtttcatgacttgttagattttttttttgtcaaccaaaaataattagaacttaatagagtcaatcccgaaggatattgtttacgtatacgtatgtaacttggtagattctcttttcggttaccaaattttctcgtttttctaaacgcaaacaaaagttacaaactcctgaatataatacgtaaataaattaaacataagttatctatgccccttgtcacaaaatttagcttttaagaaggaaaagaaaaacctgaaatggtgcttaagataaaaccaaaactaaagctgaaaagaaaattttaagaaataagaaaaaggaataataaacaagaagaggacatgaagcacagagattctgcagactgcaggtgaccaatggacactttatcaataaaaacatacctactactctcttacactttcaattttccaatacaaatcccaatctttaatctctctttcttcttcatctctctttctctttctctcttc

SEQ ID NO: 13292 - DNA, 3000 bp, Unknown; identical to SEQ ID NO: 13291
  misc_feature (1)..( 3000): cDNA_ID_3029020_gDNA_ID_2214612_Annot_ID_187424 3000 nt of promoter + ATG

SEQ ID NO: 13293 - DNA, 3000 bp, Unknown
  misc_feature (1)..( 3000): cDNA_ID_3029074_gDNA_ID_2214612_Annot_ID_187406 3000 nt of promoter + ATG
aaatccttttgctcatcctctagaactgaaactttagaaatattatcgaccatttgtgagccctgagttactttattgattgtttttggttcgtacaatggtttagaccaaactggacttgcatccttcctagtatattttgttccctcaacagaatattgagaattcatcaagccatccttaactaatcatttcccagccacttcattattctcagcccaagtcccagggaaactctttttgtgcccctaacttggaaaaagtttttttttttatcatattgcctatgagaacagatagctaatatcttttgataaatgtagaaagatggctaattaagagatttataaataaaattaaatattatcttgagaaaattttaatttatagaattattttgatgttttatatgaaattgcattgattcttatgagatctaaaaatatggttaaaatcttataagagtaaaagatgatatttgtgtgtagattagatcggttactggtaaaatggtaggtgatttataagccacttataaatcaggtacataatctaaaatacgttatgatcttcaagatacactatctttaactaaatgaaacattgaaaatttatttcattttgctttttatctattatttgtatattcattaattgtcatttatttttcgccaatgacatttgtatttttgagtctatttttcgtaaaccatttttgggcataccatttttagaaaacattgtttgtttagtttaatataattcaaccattttagttatagaacctcactaaggtggtttaagatgtaatcgaaaagctgtattgcttatatgatttattgtgaatttggatttgtcacgctgaggatgtaatcaatcgaacatgtattcaaaggatggtcacgaatttttgtcaacaaaaacatgcacaattctaggataataaatcctaactacttgaagacaagtaaacctccacaacattcttaatgtctggtttcttctggaacattagatattttaataaaagaggtaagcatgatgttgtaagggattggatgaatagggggaagtttgattttgattttttaatagaaacaaaagtaaaagaaagaaaggtatacaagattacaaagtcagtttttagagaatggtcttttatatgcaattatgaagaatatagactaggaagaatttggttgctttggagaaataacgtgcaagtcacgcctatctacaagacatcacaattgattacatgttcgatcttgattgaaggagaaaaggaagaatgttttgcaatatttgtttatgcatccaattttgtgatggaacgcaaaacactataggccgatcttcgacactatcatagttttgctctatttcatggtaaaacttggttgatatgtgcagatttcagtgaggtgttggaaggagaggatcattcaatgtatgaacatttaccattgatatcacgaggaatgagagattttcagaatttagtccaacaatgtgaattaactgattacagctatatgcttaatcgtactctatgtttgagacaagaggtcattcagatcatttaagatgtagattttatattaaagaggaggagagaagagttataacgatatgaatgaccacctagctacactatcgggctactaagaagaattagaagcaacttgggcttagtccacaccactttatcattccacttcagcgattcacatgttatcaaaaaaagctataggcactgaaaccacaactccgcaggatggggaaatggttgtagagagatatatcaattcgaacaaaggaggcatataaaaagctttgagatttaaaaaccatataatcagtggacttggaggcagcaacttacaataaatggaggagattatcagacattgaagcaggatatttttgacaaaaggcgaaactcgactgtattaaaatagaggataaaaattagaaaagtttctacaacgcagcaaaactaagaagatggccaaatagcagtcactcaaagagagaataaggctgaacctaaaagatatttaaagagttttttaaccgagaagccacaaggctacgaagaatggtcaagtgagaagttgggacatctaatggagtttaaatgtgaagaaaatgataaggcaatgctcacacaaaaaagtctcggagggaaaagtgaagaaagtattgttctcaatgccaagcaacaaatctccgagtccaaataggtcagtagtgggaaaagactttgtggtggcatttcaattcttttctaagactgttttttttgcctaaaggggccaactcaaccatcttagctttgattccaaagaaaaaagaagctattgtaatgaaggactatgcacaaatatcatgctgcaacgttcttaacaaagtcatatcgaagcttctggcaaaccgaatcaagactattctaccacgattcatttctccaaatcaataagcatctataaaggatatgttgatgatggaaaaccacctcctcaccacatagatcatcaatgactaccacaaagacactatttctcctcgatgcgtgatgaaaatagatattttgaaagcttttgactcggttcagtggagttcctactaaacacgttaagatcagagctcttgaattctgagagaaatatatacagtggatttagacatggattactacatcctcattttcagtgcaagtgaatggactaagatgatggtgacgacgagagacaagaagatgatcatctcgagaacgacaacgaaactgggttgttttctggttgtagatgtgttgcagaaagagattagttcctcgaataccttcctaataatgtagaggagcaaggagaaaaagatgacagtgccgaaagccacattcagaattccccagctataggatttcttcccgtagatgggtgacacgatggagaaagtggtagcagagcctgtcacgagcctgttacaagagagaaaaaa

SEQ ID NO: 13294 - DNA, 3000 bp, Unknown; identical to SEQ ID NO: 13289
  misc_feature (1)..( 3000): cDNA_ID_2702566_gDNA_ID_2214612_Annot_ID_187405 3000 nt of promoter + ATG

SEQ ID NO: 13295 - DNA, 3000 bp, Unknown
  misc_feature (1)..( 3000): cDNA_ID_2702623_gDNA_ID_2214613_Annot_ID_135785 3000 nt of promoter + ATG
ggaacagataagagcttatcagaatcaaacacaataacagtagaagaaagtccagaagttgacattcaagctatgaatgaagaggttgttgtaagagtaatctcgcctttggattcacatccagcttcaagaatcatacaagcaatgagaaactcaaatgttagtctaatggaggctaagttatcattagctgaagacacaatgtttcacacttttgtgataaagtctaacaacgggtcggatccattgacgaaagagaagcttatagcagcgttttaccccgagaccagctcgacgcaaccgccattgccttcttctagttcacaggtctctggtgatatataagtttcacatgatggtgaagcttttgtctattcttgtttcagtatagataactttcaggttcaactagaaatagataaaatccttttttcttttctctttcttatagtgaaaggaatccggtttaagtatattcattaactttatttagaccattgattcacatatttgtatcttgggaaaatatttcctatactttagaaaatcaaataaagtatgaaagatatttgacttctctttctttgttatggatgctttattcagttacaatttgggatccattctttttttttttcaaataaagcaatagttataacaagttaatattatccaatcaatgttattcaggtaaatatttgattaattatcttgtagaatgttcatgtacatttgaattttgaagtgaccaaatcttatatattggtcatgaatatgatatattgacatttcaagagactgagctaaaaattacttaaaaatgagaatcaattattttttttccattggtccattattttatgcaatgcagcacataataatctattttggttttggtttgggcttctggtagttctgaaaagcccagtataaagcccaactccattaatgcatcttcacctctacgacgagaattgtgcttccgattcatttcacatagggtttgtttctccgatcagatccaatttcaatccttctccgtcagattatctcctcggccacgatgtctctccgccgcactatcctcgatctccaccgtcaaacccagagagccactctctcaaagtctctacctttctcgatgagtcacatctcctccgcatccgccaccgccgccgtgagaaacccactgggaagagacctctcttcaatccccttcgcacaagcccagaaactgaaaccagattcaaccaatctcgtcaccgatcgctcgatttcgtcttcaattgggcaatctgaactcaacaaggcagccaaattctcgcgtcaatcgtcttctcgaggttacactaatggctctttcttacgcaaaatccctgtagtctttcacatacatgaaggaatggaagagattttggcggattatgttcaccaagaaatgacaaggaatttgattgtgatgtctttgggattgttccagattatcgttcttaaagatattatcttgtttcttctctgaaaccaagtaaacatcttttgggatctaaggaacactctcgatcatcatcacctgttaatgaatgaatagtgtgggctaaaaaaaaggtctttccttttatcttctttgttttatgaataagaacttgatgcaatgttgcatttttaccttcaagcttttgttgtgtgttgtttcagtttctggtttcgtgtatttgattctgtaaggcttaaaatggaattctaagcctgttaatcttttgattgaataatgacaacttttctcagctttgaggatcatttaatcactacgtttgcatttcgaatttagctttactgtaatcagaagcacgagagacttacgtgagttttgcagtagaaaagttgtggtttttaccaagtagatggtttgattatatacaacttttgaagagattttctggttttggatttggtgtgatcattataaaggtgatggagactctcaagaagtcacaaacagagaattgtcgatgttatgtttacttagatcaaacatgagattttgaagatataaagctatcaaattgaatcttagttagatgttcatgaacctggttaagatgcaactggaccaacaatattcatgttccatagcagaaagcctgaaaggttgaatagaacaaagggatatgaaacgagttaaagaagcgaattaaaaggcccatctttttatctgtaggcccatacgaattacgattgtactggttcattgattcaaatactaactctctccttatccgaagttttaaaagcatcctaatccaaaacggtgaaataatgacgattaaaaccccaaagtctctggcttggtttccactccaagggtaaaatacaaaacaaaatcaacgaaactgccgtacaccgttgacaataaacaaaggaaaagtgtacattaaagaagaagaagaagaagcttcattgtacgcgtcacctacgcgaacgaggtggagacacgtgtccttcctaccactttccttttgaaaaacctctctctctttcctctaaactcttttgacccttgtttcgcgagctgttttgtacgccattagattgaaccctaaaaactctattattggattggatcatcatcgttaaagctccacgccttgtcccaatttcctctttggttctttccttctggtaagaatccgctctctttctctctttcttttttcttcatatggtacgtcatcggcgacatcaattggctcgatttgattcacctgtagctatcaatcaatccctgatctgtttaggtttgatctcctctgttttttcctagggcttgttattgttgtttctcgaaaaagaagaagaagcgatggtattgggattttagggattattgcggtttgttgtatatatatatatagaagctgagggattttgtgttgtgaagaacatcgaatcctgtttttttccgtaagaaagttcttagatttctccaagtgaaagaagatg

SEQ ID NO: 13296 - DNA, 3000 bp, Unknown
  misc_feature (1)..( 3000): cDNA_ID_2704852_gDNA_ID_2214613_Annot_ID_135786 3000 nt of promoter + ATG
gagattatgataaacaaagaaagccacgtggcgcatgatgtatttttgccgtacttttgaatataaaggttaaaaatgtcgacctcatgtggcccattgaagcccacgaaaaacgcgtgatatataaagaagaatagaagatgagttgcgtaaacaaagcgacttatttagcccctttgttcctaaccgaattttcccaagtaacaccactttgcaacattagttttacacatattggtagctttcgaagaaaacatacgttgaatgacaaaatatatagtacatattaacatatatatactcccacggttcctttatacaaatatgttttagaaaaacaaacttgttttaagattttatgcatgtttttctatgtagtttttaaagtatagttttcgagaaaatatagaggtatataaatgaacggtaacactttttttaataagaaatagtgatacaatataaattttagtacctatattatgaattcacaatagagtcggttttgttaactcgtttttatttttggcttattttccctacattttgttgataatcattcaagttatatatcctttacacttctcaacttataaatggatagacgcgtttataattgagaaaaagaatgcgaaattgataagctgctcaaatcttctacaacttttcatctacgaaatggttagacgcgtttttcgttagaatagagaaagagaatgcgaaattgcgaggacaaaagaagtgaaacacgacaaatcatttttgcaatttacgttttcaaaaggcatatgagacaggagaagttattgtctgcaataaagaccaccgtagtcacgagtgtctccacttgaccccacattttccctatcattcgctctctgccattcgattattgagccctactcttatccgttattgtttttttattctcgttgcataatctcactaatgtatatataacactcgtttgaattttgttaaaactattttgttttattttatataaaattaccgaaattcaatctacaaattcaaatttaaattaggttctctacatatcttaaaaagataaataagtgaaattcataatgataaagccaattttgttttgtaactattattagcttcttttttcttttttttgaagcaatgtatctaatctattctcttctaacgaaagagtattaattattatagacaaaaaaaaatagtattaaacaagcctacgcaaaacacgttcagtattaggttatagtttttagtactaattaaaatatgagatatgagtttttttgttctattagaacttaagaagataaagaatttataagttggtgcgactccgaattactcaaaagacaccaatcatcgcgttatcatcctaatctacaaaacaagaggtcaaattttgcatgtcacgtcacaatattgtacattatcatcacgtttttttacaaagctttagtatatcaacgtatacatttcaatgtacgagttttcattgtactatctatccctaagtttgaattaggtttatcgaatctctttctttatttatatgcaaattttaatgatgtcattttaaattattataagaaaatatccccatacaaaacatggtgaggcttatctcatgcgataatactttaaaataggttatgaatataatcatgtaattataaaaaaagtttttaattaatggggagaaaacaattagaaaactacaaacacatgatgatagaaaagtaggttaaaagtccatcacatggtgctctctcacagaacgagaccctttttgttgaacgttactgttgggcatgagattcacgcaaatcctatgcgacaaataattttctttccataaaaatctaaataaagaaagaacgtaccattttttatatcgaagttaaggactatatatatactattgataagaataatatactcagactatactattaattaaatggacccacgttaataacgatgtctgaaataaccaaaaccccaccagacaattcagacaatatttctttgtttctttatgcatgtgagttatttttattggtagagaaaaaaataaaaacaaataattaatttagtactatttagtacataataaattttaaaatatttcgaccatgtgatctatacttcttaagtacattactataatttgaatctctcacgtaggtacatacacacgtgtgtacacaaaacactattttctctaaaatttaccaagtgcaaatatcgttgtttcactaaaatcaccatcaagtatgtattacttttacgaaattaatcggatttggagacaaattcaaagactagccagatttaggggtgagataatccatttgcaaaatagatttgaaaagagattttagattttctatctttattcggagagaaacaatcaaagtaagtgaacttaaaatcaggaaacagagttaataatcagagtaattattaaccatggttaagttgaataaccaaagtaattaacgtgcataagtaaccatggttgggtttttaaaaagagctttcatacaaacttcaattaccccagcaagtcttgtctccttctctctctctctccctctctaactgtatcttcttcttcttcttcaaccttcagacttttctagttgcaactctcattcaattgttcaatttctctgtaaaaatcaaagctttttggaatctttcttcggcgagatatttcttcaccggcgcaagcttctcttgagcgtgattcatcactgggtttgcattttttcctggtgggtattcttcaaattgttcaaagctccgaccttttcttccttagaatctgattactggaatcttgaagctggagagactcgagtttatatggtttcaagcatcgttgagtcaatcattgagttgtgtagaagaaaggtttggttttcttctccgtttaagtggttttgggtttggtaggatttggtgtaatctgggagataaagaaagatg

SEQ ID NO: 13297 - DNA, 3000 bp, Unknown
  misc_feature (1)..( 3000): cDNA_ID_3055835_gDNA_ID_2214613_Annot_ID_187440 3000 nt of promoter + ATG
aattcccattcaatgatacactttaatttagaggatttaaatgttgtttttataatgggatttgaatggatgctaattgatattggaacacatgtttactatgcaatcagatttcaaatgttagatgattaataaaaatgaaacaggataaaatatattttttaattgtttatgtgaaattttcttctagtgatgtatcatcatttgtttatgtgaaatttgatattccatatgttttagtatatccataagaaactcatatctaaaactgatgtatcattatccattaatattaatttgttgtacaagtgaatgatagttaatatcgcttatatacgtgatttcttgccgcatgtacgtgagatcacacttcatgtgcatccaaaaatttgcattttatttctagaaattaagcgacaaggaagacagagctagagagtactgtctttactctttagacgtgcatatgtctcctcgtactaattactcttttaaaatccttgcatttcattattttctgcgacaacatatttggtcggaacttgccaaatgatgtagctattgtccacgtgatgttttagtttgctataatatgttttaagtggatccttactcaacattaacaccaccctataataataaaaaaaatttaaccattcattattcaagtttgataaccaatatatatccgttgctcaaaaaaaaaaaaaaaaagataaccaatatatatcttattgctgtatttatctttatatagttttattttaatagtttttgaaaactgaaaccataacaagaaagcgtgaatccaaacgcattcctatgaattgtaaattgacaagtagcattttagaatagatggaatctaatctctaaatcgtaaccgaataaatggattggatccgttgcacagatggtttacaaagataatcatattataactaatccgaatttcaatcttgttttgatctatcttttaatagcaaagtccatgagtttagtgtttttgagattcctggaccaaagggtcatttttcgcatattaaaatgaatgagataattacgacaaaaaaatgaatgagataatttgggaaaattaaatatatacaaaaccattattatatgaatgtactaaattatttttaaatttttatatttcacctatacctaatacagaatacagtgtcattgctttgactccctccaccaacaagtgaaaaacctaataaaattttactaatagaaaacgaatagtggaagaaaccatgtaatgtccaatcaaccagtaaatcggtttaaaatatataaaaagtcagtattcttaagtagaaagataataaatttgtgcaatagtaatcaagatagtagatacgccgttggaatcaaatcttcttttcttgaatgtgttgttaacttaagccaaccatttgattctctttactgcagctatattaattattaaacaccaatgcaataaccatacatttcttcgttttatttagtctgtatattcgatcatgacatcattctcccacacttccaaaaaaaaaaaaacaattcgatgacgatatctatattagttgagacatgcatatctacaatacgaatattcgttattctcatttactgatgtggcgattatgatttatgactaaacgagtgattaactatatacaaaaagtaacaattaaaacaaaagtaatagaaaaatattgtgaaatgaaaattccagtgtatcactaatgaagcaattaagaatagaaaactaatactataatgtttatattcccatccgtgcgtttccattcactttaagaaatgatcatattcgcaaccaacaatttgaagcaaacggtcctctactttttattgttcgttttctctttaccgaattttaaaatcacgttaattatctgtataactacctttttgcgttgaagtatttacaacttgagtaaaatgtagattcgtatcaggatacaaacacacaataatactattcagagttcttagtaaattagtttccttttgcagcgatttatttccgtcaagtgtataatatagttaaccaacataacttaagttaaaatttcccaagtatagatataacagaagatcaaatatcgactcgaaactgagttataattaaattaacacgtgaaaataaatagaaaaacaagaaaatatctcgcacgctttccaaagccctagaacaataacgttcgatggattggaaaaatctctgctggtacattcacgagccaacacgtttgcctgccacgttccagacacaagctagaaagtaacggcatcgtcaaatctaacgagactcatcaaggaacaatttataaacatcaatttctttttggtttcacacgccttattatggtaagaaactatttttgcctattgaatgaaaaaaattgataagacatatgaaggatgagacctaactatagtcttaagtacataacatttactactactcaaaaccgttgtctttaattttaacggtccacattcgttctcacaataattgaccatacgtttgtttaaatacttcaaaggaaaggaaaaacagcaagacgtttgtgaggtaatggacaaacgacacgtagtttgaaagatgagaaggaagacaaaaaggcatagagaggaggaagagaaggagcggtttcgtaactgaaactgaaaaagctttaagagaaaacccggaaaaaaaaaaagagaaatattttaatcaattcttctttatcacaaagagtgcctttgtattaatgaattttgatgttgtgtaatgaatacagacataaccgtcgtgtctcgtcgttaaagaaacgagagtttttcagctctttacttaccttttcttcttacccttctttcatgactcttcttctttgatgggttaataatgctttgagcttgatgatttcgattttagtttcctgttagtgtttgttttcttctgtaaagcttggattttttttggtttcttcg

SEQ ID NO: 13298 - DNA, 3000 bp, Unknown
  misc_feature (1)..( 3000): cDNA_ID_1446584_gDNA_ID_2214613_Annot_ID_187447 3000 nt of promoter + ATG
tagtttctcaaatataattaatgattaataacatgaaaaggctgagaaaaagtgtttttgagctataatatacaacaataataattttcccatgcaaattaattattcatagaaaatgtgcaaacaaactgaaatacgtatatctccaatctctataaccacaaacacatatgcacacggatatatgcatataaacaagtatgaaatctttcacggatagggaagagagtaagagaaagataagagagaaaaaaggaagaagtagttaataggaagaagaagaaacaaaagagaagaggcaaaggaagatcttttaagcacctgtgtccacttcgtagcgtccatgacttccgacaaagagaaagccagagagagagaaagagagatgtgtgtgggttttgagtaaaggccaaagagaagaatgtttttggaggactttttttttttttttgccttttctttgtttgtgagtgatggctcttctatgcgttgcctttcactttatggatgatgagagccagcgaagaagacggagaagagaagaacccaatttttaacttattatctaagagaatatagcttatacataatacatgaattggttcgagtaaacaaaaaaatcggttctaagaaaactatatatagttcaattatgatttgttgaactaaataaaaaatatctgaatatatagttttttttatataaaaatgataagaaggcgaaatgagtggttatttgttttgccatttagattatcaacatgaaaagatatttgatttagagattatattatgttttgtaatttcataattgtcatccgtctaattcgggagaaaactatggactaaacttttaagaaatttcggttataaaaagaataaaggtagggaaaaaagagaaagttgggtttgttgattttgactagtgatgatgtctcgtgaccgctctctcttgctagctctttctggtccctcttaaaaaatatacttttctaagagaaaaaatcgtgtgtaaggaattatgtcgtcttgctaaaatataatggatataaaactcttatgtgtgtatcataatgcatagtgtgagtggaactatgagttgtatgctatttctcggcctcccattttgtgattggatactatttgttggccatatggtccatcaaatcgcctagctacatttttaaaatcccaataccatacctatttgtatatacaccacatgtcttgcgtacatgtgattagtggctttgacacctaaatttagctcgacagaacttttactatatctctatattcaatatatatatatatatattacactgatacgatctccattttataaaaccgatgagattcgttaatcgttgaaaatccaaaaaccaaaagaatgattaattatactgttctgtaaggtttttgtttcacttacacaattttaatctttttctaaaacaaaaatctatgtttagttattaaatagatttgaagactgtgtaagtgaaaaaattaagactgttcagctattaattgttttgtaaaacaaaaatctatgtttagctatcaaactaacatgttgtaatggtagtgtttttaagactgttttacaattttgcaattaaatatttctaaaatataattttatcattctattattcatatgtttgtttgattacgacattacataatgttaccaaacaataccaatatctagttacatttattttagcaatatataactttttagatgtaatcaaaggatcattacatcatagatatctaaagttaagtacgatttgaataaagcgataaagatcaacatctaattaacattgacacaaaagcatcttattcaaaacataatgtgaaatatgtatgtattagacggaaaattcacgagaagcatatagtaaaaccgtgtgaaccttctaggtacatgattcaacatgagttataaaagcaaaattaatcgtcatttaaaaaacctgatatactacttttttgtaatgaatgaattgactcctttatatcaattcatagattcatttggctacaattatacaacgaataataaaataaaaagaaatccaagtgaaaaagtttataaataataaaatacagtactaaagtaatagattgcatctataaggaattttcgaggaggagaattttgaaaaagagaaggagggaggagaagaatttagaaaagagaagaccgacaggaagcgacaaaaaggaggtggagctgggtcccactattcgtggcgtgattgtgattttattttatttttctttctggatgttgacatctgtcttctcttacccaacaccttctcccacccaataaaaaatctctttccccatcttatcgtgtcgttttactgtttcagctttaccttggctgccgttttgctttaaagacttgtcaattgccacatgtccttctagttgtttggtttagtcggttcgcacattttttcccatttagatatcaaagcttcatagatattttgggctcaatattaaagttggcccaataagatatttagtcatcacgttagaggcctaatactatcaaaaacagaaaacgacattgtttaaaagtgtggcggaataatgatctaactaatactatacagtatagtctatactaatgagattatcgggcccgggtgggcctcgtcgttagtttatcttttaagcccaaaatagtgcatcctctttgtatttatctcttgttctttgaaagcatttatcgaaagatcatcaaaaaaaaaaacatttatcttcttcctcaaatttcttcaactaagtataaggcctaatgggcctcataattagtatctcgtttaaggcctatttctttaatagcttgcttgtattcattctctttgtctttggtttctctgtaaacaatcgatcgaaagatcaatgaattaaactatcattgtttgaacaaacccaatccgggtctatcagaagtaagtgacgaagaggatg

SEQ ID NO: 13299 - DNA, 2543 bp, Unknown
  misc_feature (1)..( 2543): cDNA_ID_3029125_gDNA_ID_2214613_Annot_ID_187450 3000 nt of promoter + ATG
tagttttagtaatttttaatccaactcgggattgattattttgaatacattatttgtttatatttaattatcggtttgtttttggtttttggatttttgagttataaaatgtgtaagaaatatcatatgtttcagttttgtttgacctggatttgcagtatttaaaagtttaaatacggttttagtttggtttaaatgggatcaactagattgatcagctcgatcttaatatatgcataattgaacacggaatcatgatgaatgcacataccgatgacgttcaactggtacaactttacaggcaatcgattagtgcagaaaatgtaaagcaaaagctgataaaaataacggaagaacatttatttccagtgagtgtaattattattaatataggaccaccgtgtatgggtatggcttcaggaaatttgaaaattcccatgctgaaacattcaaagtctttttgagtccgccaatacacaccttgtataaacgaagctattcttgtttgaagagtcctccaaattacaaacaaaataaacaatgaaaagtctgcacgttagtctttagacgaaaacatatttaagtttgcatgatattaagattcaaaaaaaatctacattaagcaaaatgaatgctttaaccaaataaaaagaaaacaacagatagataaccaaataagagttatatgatatagacttataccttaacataattaaatgagtgttgatatttcttgtaccaaataacaaacaccaaacacatgcaatcttataaaaagaccacaagtgtatttactcatgaacatgacacttttcttgtaactgtaatgaattaattatgattagttgcgatattatccaaattactgagtccctcgttgaatggcggtgttttggtcgattaaacttctttgtagtaggctgatttttggtgcaagttaggaaatacaaatatccgatgctctcgctacatatcaacaataagcaaaatattaaaactattaattgttggaaagaaataagtgctgcactcatttaatggttaaatcaaaatttaattagtcgacgttgaaagcaaaatagtttaagaaaattagcataggggcataaattgtccggtctattcttctgctatataataggaagaataattatgcggctattccggaaacttatacttaattttgtttattgtaagtgttagttggtggtgggaactaaacttttgggcttaatcatgaaccatgaactatacaaagctgtcttttggccgttcgttctttttctttattcagtataagtctagtcatctctctaactaaaatgtatatattaaaatttacgagttagttaccaattcatcaaataaaacccttcaaaatgccaaagggtttcgccgcttgttaagttgagtataaattagaagtgcctaattcctcttgcgccgaccctaaatgttcttgacaaattagaaaaacatgacagacaagtttagcttgtttcttaagtgaattagctatgaagtcctgtccttgataccgattgtaataatatatatgtggaatagtcgagtaatgaacataaataatatttttttttgtaccaaaaataaaaataaaaaatcatgttgctttgtttcctcgtttaagttgactttacaagttcgtcttgtcacgatagttgaaaactaatctgcaacgaagaatatttcggttgccgtatcaaatgcaacatgtatcgcgttaccaatagattacgctgttaatcttccttatgcgtaaagataaataattaactcgacacctaacttatattaattgagaactataaagactatgcaacatattttgtggtagataagaccataatattctctcagtttttttttttttgtagataaacgtataatttttggtttatagaaattagaatagtaatagaagatttatcctaactctaatatttttccttggtaattaagttccgaatgtaaatgctttattaattactatttatctaaaattagtaaatatataattttttagaatttttttcagccaaagtatcaaaaaaatctctataaatctaatgaatattttatcttcttctaataataatattttttgccatgtggattattagctttaaaagaaaatcttccaaatcagcaatcaaagaacttgtcaaacaactaaatcgccgttacctagatttataaaaatcacccctttgattgctgagtgacctcgtccccgtcacgccttttttcttaaagaataatttaagaaaaaaataataatatctcgtcgtccttttaggctttctccgattgttcttaatattcctccaaactttctctcaatctccgtcaaaataatcactctctctttgttttttctcacaattctccgaacatgcgtttgctttctttattctctaataaacctagtaaactcttcttcttcgttactactatataatatagcggagagttttggaaccagagagaggttttacgtttttcttattttatttctctccatg

SEQ ID NO: 13300 - DNA, 3000 bp, Unknown
  misc_feature (1)..( 3000): cDNA_ID_3029129_gDNA_ID_2214613_Annot_ID_187445 3000 nt of promoter + ATG
tgttggcaacaaaccgaattgccgcccaacctcctactgggactccaatagtgttcaagtaaggaggatcctccaggttaaattttgctgtttgttgatcatagtttcctgtgccatagccaatgacataaaagctgtgtccatgaagatgaattggatgattttctgttgtgagtgtgccagtattctggaagatgatttgtatcctgctcccatactcgaaaactattgctctggtcccatttgcagcctgcgtgtcattggctatgtcattgggtgccccattgacaaagtcataggctttttccggcgtggttgggaaatctaaagtgaagtaaccttccagttgcttgtaatatgcttccaaaatcgagactttaggttcgatgaagcttatgttgttcattgaagctgctagtcttccttttctgggcccttggcacttgttgtttggattttcagagttgcatttgtttacatttagcccgattgtgataaagagatgagcgtcaatgtttcttggaacatcaactgcatttagacttctgagcccatccatgacagtcttaacagcaatattatcattgaaaataggtaacttagctggtactgttacattgttaggcaatgcaccaatgtattggaaattagctattgctgatgtgttttgaaacttgacgttctttgcagactcgtacggacccatggccatggagtatctcccaacggtttgatcagctgtgacaagaatgttcattgtctgtccaggtacaagcatcacacgctctgttgtataaggcttggtgtattcgccatctacttccactatggtcaacctgtgattagctatggtgaagaaggtctccatgttaataccagcatttatcagtcttagcaggtatatcttccttggtactatctgaatctcataaacatctgaaaaacaaagacataatacacaagaatcaggaatctgttttctcgttgtaaattaatcatatcatttttcatctgatatttattacctttagaggagcaattgtagttaggtcctggttgaccattaattgtgaatgcatctgctggaggaggaggtcctccactttccagtacatgttgttcaagctctaccacgttcttaagccaatactctcctagatttattaggagacaaacaagttcagtgataccaaatagtgaatgagactaactttattaagaataaagattacctaggagaattgtatgctcgttgaagggtttcttgaatgggtaaggaacagatgctttaggatatacaataagcggaccatatactgtagctctaagccaagaaaagtgtgcatgccataaaaatgtgcccttttgttgtgccactttgaagttgtatgtgaaactttgtccactctgaattggacattgtgtgatataagatggaccatcataccaacatgatcgtttttgcttaataccatgcctgcgcataatagaaacaagttttgttagtctagaattcgtttaaaaagcatttatattttatgtatatgtgtatatgtacatcggcataccaatgaattgtggtattatagggagtcatgttgatgactttaatgacaattctgtcatcttcttgagcagatatcgccgggccagggaatttcttgttgactgttacaatctcgtttgtttggcatagcctggtgagtcttattgtttgtacctgttagaaaaatcagtgacacaacaacagaccactgtttagaaatctgaatacagagaaaagaaaaagaaataggcatgcatgagatgaaaactgtgttcaatattgattctaatttgaataggaagttaacattttgcgttgctgataccttgaattggtagaatctagttgcagcgccaatcctgccaatattcattacttgaagagtgaacaagagaaagctaagccggaacaaggacgggacagctgaactggtcatcttgaatggaaagagacaaggagatttgaggttgaaagatactgcttaatgcaactggtttttatagcgtctgaaggcgaaaaataggaaataaaataaatagagttgaggaaaagtttcatgatttggagagttgggaacagagacattagtgattataaggtgttgggaaagcgtgacttgtttcttgaccccagcgtgagattgaaggcaacacacgagttactataaaaggagaaagatactcttagttagtgtctgctctttgattttgaatcagtaaaagctttatacattatgatgcaggattctctaccaaaccgctgactgatctggaccaacccggtgacctaatgactatttcttttgacaggtcgttaatcatcaactttaggatcagccgggattagtgaggtgcatgatttagcatgattagagagtgtttagtagggtcgtgttggggttttttagagtgttgaaagagaaagaagaagaaagagtaagaagggatcaagcttcttggtcggaagtttggatggtcttaattctttattggtcgtgtcatcatcaaaagttcgtgcacgccttcatttgccaaagagaactcttatttatttattttttttttttcttctaaattttgtttaatttctgaatttttttttccttatattgtaagaccactgatactgatatttacgtaaatttcttatttgatttttaattacgtaaatttctgatatttacgtgttttttttccattaaacaacacaacagtcatcatagttagcaaagccaacacaagtgtgttccttattatttgcgggtctcaacacttcttcttagcagcaacacttcttatttgcggatctcgtgacaatttatttacgttttggctacaataatcaaaattcacaatttctatcttcacaatacacattaaattagggaattataatttttacatcataaaaatacacatacaataaggaggcccaatgagatatgggcctaaatg

SEQ ID NO: 13301 - DNA, 3000 bp, Unknown; identical to SEQ ID NO: 13295
  misc_feature (1)..( 3000): cDNA_ID_2702623_gDNA_ID_2214613_Annot_ID_187435 3000 nt of promoter + ATG

SEQ ID NO: 13302 - DNA, 3000 bp, Unknown
  misc_feature (1)..( 3000): cDNA_ID_2713401_gDNA_ID_2214613_Annot_ID_135788 3000 nt of promoter + ATG
gttagatgattaataaaaatgaaacaggataaaatatattttttaattgtttatgtgaaattttcttctagtgatgtatcatcatttgtttatgtgaaatttgatattccatatgttttagtatatccataagaaactcatatctaaaactgatgtatcattatccattaatattaatttgttgtacaagtgaatgatagttaatatcgcttatatacgtgatttcttgccgcatgtacgtgagatcacacttcatgtgcatccaaaaatttgcattttatttctagaaattaagcgacaaggaagacagagctagagagtactgtctttactctttagacgtgcatatgtctcctcgtactaattactcttttaaaatccttgcatttcattattttctgcgacaacatatttggtcggaacttgccaaatgatgtagctattgtccacgtgatgttttagtttgctataatatgttttaagtggatccttactcaacattaacaccaccctataataataaaaaaaatttaaccattcattattcaagtttgataaccaatatatatccgttgctcaaaaaaaaaaaaaaaaagataaccaatatatatcttattgctgtatttatctttatatagttttattttaatagtttttgaaaactgaaaccataacaagaaagcgtgaatccaaacgcattcctatgaattgtaaattgacaagtagcattttagaatagatggaatctaatctctaaatcgtaaccgaataaatggattggatccgttgcacagatggtttacaaagataatcatattataactaatccgaatttcaatcttgttttgatctatcttttaatagcaaagtccatgagtttagtgtttttgagattcctggaccaaagggtcatttttcgcatattaaaatgaatgagataattacgacaaaaaaatgaatgagataatttgggaaaattaaatatatacaaaaccattattatatgaatgtactaaattatttttaaatttttatatttcacctatacctaatacagaatacagtgtcattgctttgactccctccaccaacaagtgaaaaacctaataaaattttactaatagaaaacgaatagtggaagaaaccatgtaatgtccaatcaaccagtaaatcggtttaaaatatataaaaagtcagtattcttaagtagaaagataataaatttgtgcaatagtaatcaagatagtagatacgccgttggaatcaaatcttcttttcttgaatgtgttgttaacttaagccaaccatttgattctctttactgcagctatattaattattaaacaccaatgcaataaccatacatttcttcgttttatttagtctgtatattcgatcatgacatcattctcccacacttccaaaaaaaaaaaaacaattcgatgacgatatctatattagttgagacatgcatatctacaatacgaatattcgttattctcatttactgatgtggcgattatgatttatgactaaacgagtgattaactatatacaaaaagtaacaattaaaacaaaagtaatagaaaaatattgtgaaatgaaaattccagtgtatcactaatgaagcaattaagaatagaaaactaatactataatgtttatattcccatccgtgcgtttccattcactttaagaaatgatcatattcgcaaccaacaatttgaagcaaacggtcctctactttttattgttcgttttctctttaccgaattttaaaatcacgttaattatctgtataactacctttttgcgttgaagtatttacaacttgagtaaaatgtagattcgtatcaggatacaaacacacaataatactattcagagttcttagtaaattagtttccttttgcagcgatttatttccgtcaagtgtataatatagttaaccaacataacttaagttaaaatttcccaagtatagatataacagaagatcaaatatcgactcgaaactgagttataattaaattaacacgtgaaaataaatagaaaaacaagaaaatatctcgcacgctttccaaagccctagaacaataacgttcgatggattggaaaaatctctgctggtacattcacgagccaacacgtttgcctgccacgttccagacacaagctagaaagtaacggcatcgtcaaatctaacgagactcatcaaggaacaatttataaacatcaatttctttttggtttcacacgccttattatggtaagaaactatttttgcctattgaatgaaaaaaattgataagacatatgaaggatgagacctaactatagtcttaagtacataacatttactactactcaaaaccgttgtctttaattttaacggtccacattcgttctcacaataattgaccatacgtttgtttaaatacttcaaaggaaaggaaaaacagcaagacgtttgtgaggtaatggacaaacgacacgtagtttgaaagatgagaaggaagacaaaaaggcatagagaggaggaagagaaggagcggtttcgtaactgaaactgaaaaagctttaagagaaaacccggaaaaaaaaaaagagaaatattttaatcaattcttctttatcacaaagagtgcctttgtattaatgaattttgatgttgtgtaatgaatacagacataaccgtcgtgtctcgtcgttaaagaaacgagagtttttcagctctttacttaccttttcttcttacccttctttcatgactcttcttctttgatgggttaataatgctttgagcttgatgatttcgattttagtttcctgttagtgtttgttttcttctgtaaagcttggattttttttggtttcttcgatggcgaatgtggaagctgatttcagaacatcaggtgagttcaaattttgacttcaattttctcaagttttgaattttctttttctcttgggaaaaagtcaacatttttaactctaatc

SEQ ID NO: 13303 - DNA, 3000 bp, Unknown; identical to SEQ ID NO: 13300
  misc_feature (1)..( 3000): cDNA_ID_2713397_gDNA_ID_2214613_Annot_ID_135791 3000 nt of promoter + ATG

SEQ ID NO: 13304 - DNA, 3000 bp, Unknown
  misc_feature (1)..( 3000): cDNA_ID_2702646_gDNA_ID_2214613_Annot_ID_135795 3000 nt of promoter + ATG
gaaccgatttttttgtttactcgaaccaattcatgtattatgtataagctatattctcttagataataagttaaaaattgggttcttctcttctccgtcttcttcgctggctctcatcatccataaagtgaaaggcaacgcatagaagagccatcactcacaaacaaagaaaaggcaaaaaaaaaaaaaaagtcctccaaaaacattcttctctttggcctttactcaaaacccacacacatctctctttctctctctctggctttctctttgtcggaagtcatggacgctacgaagtggacacaggtgcttaaaagatcttcctttgcctcttctcttttgtttcttcttcttcctattaactacttcttccttttttctctcttatctttctcttactctcttccctatccgtgaaagatttcatacttgtttatatgcatatatccgtgtgcatatgtgtttgtggttatagagattggagatatacgtatttcagtttgtttgcacattttctatgaataattaatttgcatgggaaaattattattgttgtatattatagctcaaaaacactttttctcagccttttcatgttattaatcattaattatatttgagaaactaatggagatattagaagaaagtcatgatttgtatttaccctttgttcttggtgttcatctattttcgttttccacgagatcctatatacatagttctatagaatatctaataaggaaaatctaatgttcatgtttcatttttctgtttaattagtgcttaaaattgcaaagcatcgtgcgaactaaccatatgttttaattagcttattatataacttatgtatcaattatggtctatacataattaatatacatgtacattgggtttcaattaagctctaattaactctttaaaattcaaatttttagggttttcaagaaatgatgaacgttaaaccaatggagcagatcatgattcctaataacaacacacatcaaccaaacaccacatccaatgcaaggccaaacaccattctcacatctaacggcgtctcaactgctggagcaaccgtctccggcgtaagcaacaacaataacaatacggcggttgtggcggagaggaaagcaagaccacaagagaaactaaattgtccaagatgcaactcaaccaacacaaagttttgttactacaacaactatagtctcacacaaccaagatacttctgcaaaggttgtcgaaggtattggaccgaaggtggatctcttaggaatgttcctgtgggaggaagctcaagaaagaacaagagatcatcttcatcttcttcatcaaacatccttcagacaataccatcttcacttccagatctaaacccgccaatactcttctcaaaccaaatccataataaatcgaaagggtcatcacaagatctcaacttgttgtctttcccagtcatgcaagatcaacatcatcatcatgtccatatgtctcagtttcttcagatgcctaagatggagggaaatggtaacataactcatcagcagcagccttcatcatcttcttctgtctatggttcctcgtcgtctcctgtttcagctcttgaacttttaagaaccggagttaatgtttcttcaagatcagggattaactcatcgttcatgccttccggttcaatgatggattcaaacactgtgctttacacttcttcagggtttccaacaatggtggattacaagccaagtaatctctccttctctaccgatcatcaagggcttggacacaatagcaacaataggtctgaagctcttcatagtgatcatcaccaacaaggtagagttttgtttccatttggggatcaaatgaaggagctttcatcaagcataacacaagaagttgatcatgatgataatcaacaacagaagagtcatggaaataataataataataataactcaagccctaataatggatattggagtgggatgttcagtactacaggaggaggatcttcatggtgaagcaaaatgatcaaaaggagattatgaaattagctttctaattctctttttatgatctcttgcctcacatgggttactttagttaaagttgtcagaacttagctaacacaacatagtctttttattcttcctttccttttttttttttttttttttttgttaaaatcaatatttattttctaaatgttttgtagtttggtttgatgataatttgggttggtttttcattttggtttgttgattaattagtatataaatcacggcgttatgtatgggtagaagaatatgtgaatacgaatctctcgagtgttgcatatatggtatatggtatgcactatgtaactatgtattcatcgcttcttctatctgtataagtgttttcataaaaggattattcatatgatcatatctattatcgatatagaagttagtgtgatatactctctagatcgatcacttggaaaaatcaataagcccgggccatcaataaggcagctaaagtaactacgtaaccattggccattgctaagatggttatgtaggcttctaacatgtcctcggtcgttggttcaaaaagccacaatgatcattttacctttctcttagcaattttatatccagttaacaactacttagttcatattttttcataatagtcacatctcaaattcagacgagaaattaccgttacatcaaatcagttaaggcttggacggagaaagagatattttattatatgtcgacatgtcgttattattgtaagagaatccaattccattgaagtaaataattgaaagacacgacggaagaaatcaagaaacgaaacttctccgaaacttaccattgtcttgtctttcttttgataacaatatatgggagtgggaatgcgtcgtattcacggcccattcgaactttccacgaaaccacctaataatcagctgcttccctccctactcacgaaatcgcattttatcttgga

SEQ ID NO: 13305 - DNA, 3000 bp, Unknown
  misc_feature (1)..( 3000): cDNA_ID_2702642_gDNA_ID_2214613_Annot_ID_135796 3000 nt of promoter + ATG
ttgtaccaaaaataaaaataaaaaatcatgttgctttgtttcctcgtttaagttgactttacaagttcgtcttgtcacgatagttgaaaactaatctgcaacgaagaatatttcggttgccgtatcaaatgcaacatgtatcgcgttaccaatagattacgctgttaatcttccttatgcgtaaagataaataattaactcgacacctaacttatattaattgagaactataaagactatgcaacatattttgtggtagataagaccataatattctctcagtttttttttttttgtagataaacgtataatttttggtttatagaaattagaatagtaatagaagatttatcctaactctaatatttttccttggtaattaagttccgaatgtaaatgctttattaattactatttatctaaaattagtaaatatataattttttagaatttttttcagccaaagtatcaaaaaaatctctataaatctaatgaatattttatcttcttctaataataatattttttgccatgtggattattagctttaaaagaaaatcttccaaatcagcaatcaaagaacttgtcaaacaactaaatcgccgttacctagatttataaaaatcacccctttgattgctgagtgacctcgtccccgtcacgccttttttcttaaagaataatttaagaaaaaaataataatatctcgtcgtccttttaggctttctccgattgttcttaatattcctccaaactttctctcaatctccgtcaaaataatcactctctctttgttttttctcacaattctccgaacatgcgtttgctttctttattctctaataaacctagtaaactcttcttcttcgttactactatataatatagcggagagttttggaaccagagagaggttttacgtttttcttattttatttctctccatggggattctttgggattcgtttctcttgttacttgtgtcaacgtttgctctgttcttagttaggatcctgttattcaaaactggattgatttacatggtcaagttatggcgtaggaagatcatcgactggtttcatgtttaccaattctacaaagtcccagaattcaacgacaacgttcaagagaatcatctctaccaaaaagtctacatgtatctaaattccttaagctcgatcgagaattctgatttcacgaacctcttcaccgggaaaaagtccaacgaaatcatcctccggttagatcggaaccaagtcgttggcgacgagtttctcggcgctagagtttgttggattaacggagaagacgaagatggagcgaggaatttcgttttgaagattcgtaaagctgacaaacggagaattctcggttcttatctccagcatatacatacagtatctgatgagcttgaacagaggaacacagagcttaagcttttcatcaacgtcggaatcgatgatcatctgaataagaagaagaagaagaacggacggtggagatcgattccgtttgatcatccttgtaccttcgacaacatcgccatggaaacggatctgaagaacaaagtcaaatctgatctcgaatctttcctcaaaggtaaacagtattataatcgtctgggccgtgtttggaaacggagttatctcttatacggaccttccggtaccggaaaatcaagcttcgtcgcagcaatggcgaatttcttagattacgatgtttacgatatagatctctccaaagtagttgatgattcagatcttaagatgcttctgttacaaaccagaggcaaatcagtgatcgtgatcgaagatctagatcgacacctctcgacgaaatcaacggctgtgaatttatctgggattttgaatttcactgatagtattctcagctcttgcaccgccgatgaacggatcatggtgtttacgatgactgggaaagaacaaattgacccggctatgcttcgaccgggtcgggtcgacgtacacattcattttcccttatgtgatttcacggcgtttaaaacgctcgctaataactacttaggtgttaaagagcacaagcttttctctcaagttgaaggaatatttcaaaacggtgcgtctttgagtcccgccgagatcggagagttgatgatcgcgaatcgtaactcgccgactcgtgcattgaagcatgtcatcaatgctttgcagactgatggtgatcggagaggaactggacgacgtttgcttttagaaaatggttcgagaaagtcgacgtcggaggatgtttctgatgatatgagtggttcgctttgcggcggtggcggaggaagttcgccggcggtgaaggagtttaggaagttgtatgggttgttgagaattaaaagtagtagaaaatctggatcgttcgatgtggctcgagagatgagggacggctagtgattaaaaagtttttaaaagtcagcagccacgtgggttggttttattggttgagagagagtctggacaaaaagcgtagactagagaaagttgttactctgtttttattgtttttgggttttagttgatgtacagaagtttataagattttgcttttgagtccccaaagtatgagattctgagttttgagcactttgtaattgaacattttgggccggttgtaaaacaaaagcccatagcgttaagcggattaataattttaacggaatgacaaatatgcccttcatggtaacagcgtcaataacacgcttttcggttcatcattataagattttgtgtcattaatacgaagctccgtcttcttcgccgagcgtcgtcgtcgtcttctaggtttatctttctcgtcgtcgtctcttcagattcttcaaggtaaattgaatatctccctcagaagatgaagatttatcgaatcatcaaagatactttgcgagctcttcgagtataaatgttctgatctttgttgtctttgtttatgttgatcacaattggtgttaggaattcgattgcttttgcaagaatg

SEQ ID NO: 13306 - DNA, 3000 bp, Unknown
  misc_feature (1)..( 3000): cDNA_ID_3029252_gDNA_ID_2214614_Annot_ID_187461 3000 nt of promoter + ATG
tattccggtctttggatcttaaaatacgtgtaaaatgtggtgtgtttgagtttgtgaagccctggtattcaattctcaacctctgtcctcttgtctctttttaggttgacgaagttgacgatgctttctctgcacttcaattatgagttttccaaattcgtttttttcagaatttgagagtcataaaggattttgtattgaacgaatcgttatcttttagcatggctaaaagggccttcttgtgccatttacttgttaaaatacaatttgattatgcttggtctctgtacgttctgtttttaaataaccaaactcagtgatcaataaagtgtgccagtgattacttgatgtttccttgaattcgcagtaattaaacataagagttaggagtcataaacagttaagaggtagaagaaagtttgagaaataagtgaccattggatacaactttttctgtttgaaatgttattgtgaccgagggacaaatcttttgaggtgtagaaacaacagagtcgattaaagagttatagtgattaatgctttgcgtagttgtctttaggaaatgttcttgatcctcctctctctctcaaaaaagatgggtcaatgttctgtttctgcgtttcgtccatatacttcaggaaatggtattcagacatttgatcattccctttaacttaaacaacaatagggctattacaccaattcactcttaaaaatactcatcatctcatttttaaagaactaacacatttaatttgttaagaaaagacttgtgatttgggatttgataatgcttaaaaaaattaatcatgagattatatcccttaatctctcgtctatccttgatggatcaatctgattgcttggagatcaaattgtatgtgatttttttttaagtttctacttcgttgtgatttatattgtttctatgttcagggcagatttcatgtagtgatcaagctcttctctctctattctagagaaacttcatacacaaacacaactttcaactttcaggaccgttcgaagaaactgaaattaaaacatggaaaggttccagtggggaacatcaccgttgatatggtatggattctaatgttttttgtgattacacaaaggctttatcttttaaacatactcgtatatatagttttacatgtggtatttgtgaaggtacttggtggaatgagagggatgaccggattacacaatcgtaacctcattgcttgatgcagatgaggtatggttataaatttgaatcatatagataatcacaagcttttgtttcaaactgggagtagataattaaatcatattattttttcaaaatttctgttatatagattgaaggctgaagaactgatggcttaaaggacgagtgaaggctgttacctccggagactgcttagtgatcacggctttgagccacaacagagctggacctccaccggaaaagaccattactttttcttctcttatggcacctaagacggtgagttttaatctgttcttttaccagatattagtgtttgaaacaaaagcttgtgatcatcccaaccaaatgctgaagctgaaaactgaaatgaaaacatgtacatgtgaatcgactgtttgcttgagagataatggtatgtgtgtggtgatggtaaaagatttcgattgtttatatagcacaaaacaaattaggttacgattgtgagtctagaagtaaataggcgctggaattttgaggatattccatattttcaaatttgatttgatttgtttaaattttaatttaaaagctgttatggtagataattaggaatagttatttgatttaaatgttatggaatattagaaggaagataaggaatgtagttaggaggacttatatttggctttgctcattttacgggatcgcatataggagagtataatttttggtttaattcattgccaaaattaggaggttatattcttgttgtgattaagactgatttagtatatattcttcaatcaaatcgggtaattgaatctcttttatgttaactacattgattatctgaataatctaaccgagatttgtgcgcttgtttgcaggaccggcaaaatttgaaagttttgaaagagaggtttgggccgaaagagagagaataaatcgatttggcccaaagatccggacaaaaaagcaggtaaaacccaaaaaaaaaaaacgacccaataaatatgggttaagttgtacttcaaaaatgttaagtagatatgaaaacttagttaaggtgtttgtttgaattatgttaaggaagacgaacaaaaggacatgatatgcttagttacacaattagctaccaaacaacatcagattaaatcatcacaaatcttcttcttcccgccctcgagatgaatcttgtgtcttcaccgccttctattgagtggttttgctgaagatgaagtgctaattgttggtcttttagcacctgtggcaaatcaagagatgacttatgagcaaattggcactaaagatctacgggagattctactgagtcgaaacaagcatctacttcatatgagatcttcatagaaatctaagtaagctttgattagagactgctatgagtgtaattagaggcaagcatatttggtttttaggacacaagtcaaagagttgatgtatagagacattatctgttaaagccttagaggaagagctagtggcaattgacatacgagacggtctggttttgcctggtggtttcaaggtctgctttggaatcttcgatggaatattagttctgcttttaaaatcccaaaacaaaacaaatataagaatctgtaaatgccttcagattgttctcttaatgtgtgatagtagaggatactaacctgtcttttggttcggttttccccattttcactgatttctcgagtttctcagaagtcatgcgttcttcaggtcgttctattatttcaagaggctaagcagtttcagggaatagagtcaactctactgcactgctt

SEQ ID NO: 13307 - DNA, 3000 bp, Unknown
  misc_feature (1)..( 3000): cDNA_ID_3029195_gDNA_ID_2214614_Annot_ID_187479 3000 nt of promoter + ATG
caaacaacaaagtgtaatggattttaatattaacagagtattctttacaatggcagacatattaggtcaagtggtcagtgtggggaaagtggatgagattatggctaaaaacaaaccgaacaaaaaactagagtttcaaaagagatctcgtgcaagtcttctcatttgtttttatataatttttgattcataataactatattttcaaataagtaatattgaaatcgtttgttactatattgaagcaatgagcgtttgtcttgtactttgtggggtgtgtttgctgagaaagtatttattgctttaaaaagtgtaaagtatttagtgctaaaatcaataattttaaaggtattcactcttcccttaactatggctaaagtaatcatattggatgtatatgtgcatgtcttagttaacatatattgtctaattcagttaactatgtgcgactagtattacaagtgcttttgatgtttcggaagtcataatcaatccagttcatgttcctgaggttgaactcttcgtgaaatcgtaagtgcaaaatatattatgaccttctttgttctgttttaattcacaaacatgttaacctgacaaatgcttatttgcagactcccaagtgatggtcttgctctcactatccaagataattatgtgaaccgtgacatcattaaggttaaatcagataatttttttaattatccttccaaaacaattgttgctttacttcaagggagagacgtaagtatatttccactaattcataaattactgtgtttagtttaagtacctataattgtgattgtattgaaaattaggttgggcaatggagaatacttggttccatttttgcctttgataccgattggggatggttctattttggatgtcctaaatgtaacagaaaactgagctggttaaaaaatcaaccagcactggtaagatggtcaggatacctatgaaacctaagttctggtgtgacaaatgacaaatgtcaggagagcatcacaaatgtggaggaaatgtaagaatgttttctgttactcttttatcttgtacaagataaaaaaaattgtttctattagtatatagaaaatataaaggtttataagtgtatattaatttgatatgtacaatacattttattccacgtacaagcttcatatttgtgtaaatgaccagacagctgaaattaaactcatggtgtttgaaaataatgcaaccaaacttattggaaaaacttctaaagagttagtggatggacaatatgaagaggtattaaatatatgttgtcattcaagtattagctatatgtctatggtagaatgaaaagtactaatgtaagacagtctatagattgaggatcctacgatcatacctgatgtcatcacaaatttgtgtggaaagacattttactttctggtcagtgttgagaaagccaatatttatggtggtaaagatatttacaaagatgcattttggaacagacatagccaaagaagaatcaggtttgcttgaagacactcagtataatccatctgaggaacaggtatgatcatattcacctaaatacaagttgttatgcttattaagtgttttgtactcatagatcaaataatatttctcaatttttattgtatagggtcaattgatgttaactaatagcagcgagaactgttcagatgctacgaacaatgaacagtctactccttcatctaagcgtggttcgacagcgttgtctaatatggctgatcaatcgagtactactaagaagttatgctctagggttagctcagaaaatggagatgatgagattggaaccaatgtgataatagaaaatgctgatgaggttaaagttatttcaaatgatgctagaagtgtacttataaaaagagtagttaaagagattgagccccaaacctcaaaagctaaaggatcaaccaaagtgaagacaaaaagatacaagaaataaattagttatatgttttcacagttttttttttatggttttggatttaaaaaaaagtctgaaccttctgactttgtttatctttttcaataagtattaaaaccattttcaatttttatgctgctttatacatttacatgtattgctatttttttgagagattttatttctggttttcactttctttgttctactatatatttatactctttatcctaactttattttcttattgaaaagcaaagaatcggtctctaaattatactgaaacagatgaaaacatcaaaagatctttggaattttagagtaaatatacttgcatggtatattaaataatttttgaaacgtaagatgtgatatatcagaaatataattgttaaatctgaattttcaaaaataaaccaaatcattggatctggaaaccctcaaaagaagctgtctaaattcaaaaaagtaatcattcattggcaaaaatttgaaattcatttctgatataattatttccaaaaaataagaagttacgtttattggaaagattaatagattctcttcttatctcattcatcttccacataagaaaaaatagtagagaagaaaaagagtttttcttcaatgacaaacttcaagaacttctctgatttgcgtcctaaaaaaacataatggtttgtctttgttaagctactgaggttgtggaattggcctcctaattacttcggggaagaacctactatgattttagttgatgagaaggtatgaaacttatattgaaagtttttatttctataattgttgttatttaccggatctcttgaatataaacatccataacagatttgatgagattttatatatgatctcagggacatcgaatcgatgcattgtctcctctacatgcatacaaagaagaaatgatttccacactaagagaaggaaaatggtatctactctcaaactttgaagtggttgtagctaacccacttgaaagattctcttctcatgtgttccaaatttagtttttacgaaagactaca

SEQ ID NO: 13308 - DNA, 3000 bp, Unknown
  misc_feature (1)..( 3000): cDNA_ID_3029172_gDNA_ID_2214614_Annot_ID_187486 3000 nt of promoter + ATG
atactggagatggatgaggagccaaaagacccattgatcttaggaaaaccattcctagctactgcaggagctattatcgacgtgaagaagggaaaaatcgacctaaacctggggaaggagatgaaaatgaccttcgacattaacaaagctatgaagaaaccaacaatcaatggacaagtcttttggatcgaagaaatggatggattggctgacgaattactggaagaacttgcagaaggagatcacctagcaagtgccttaaccaacgaaggagaagaagattacctacacttagaaactcaagggtacaaagagtatctagacgcccacataccaatggaaggaccaggagagtttgaggaattgattgttccctcagaagaagcagtatcaggatgcaccatgagcctaatcgctgaaaaaacgaactctactgagatgctagaccatggaggagagaatataagttcagatgactggtcagaactcaaagctccaaaggttgaccttaagcctcttccaaaaggtctgaggtacgcgtttctcggtccaaatgatacttatcccgtcatttttaatgatggattaagtgatgaacaagtgaaccagttgttgaatgagcttagaaagtataggaaggcaattgggtattcattagctgatattaaaggaatttcacctagtttatgtactcataggatctatcttgaaaatgaatcatatactagtattgaaccacataggagattaaatccaaatttgaaagatgtggttaaaaagaaaattcttaaattgcttgatgctgatataatctatccaatttcggacagtacattggtctctcctgtgcactgtgtacccaaggaggaatgactatagttaaaaaatgatttagatgagctcattcccactagaactataacaggacatagaatgtgcattgattacaggaaactaaatgctgcaactagaaaagaccattttcccttgccattcattgatcaaatgctagaaaggctagctaaccatgtttattactgttttcttgatggctatagtggtttctttcaaattgcaattcaccctaatgatcaagaaaaaaccactttcacctgcccctatggaacctttgcttataagagaatgtcatttggtttatgtaatgctcctgggactatccagagaagcatgacttcgatattcccagattttattgaggagataatggaggtattcatggacgatttttcagtgtatggatcctctttctcctcatgtttgctaaatttgtgcagggttcaaggtgtgaggaaaccaatttggtactcaactgggagaagtgtcacttcatggttcataaaggaattatgctagggcatacgatttctggtaaaggaatcgaagtcgacaaggcaaaaatcgatgtcatgattcagctgcaaccccctaagacagttagggatatcaggagcttcctaggccatgcagggttttactggagattcataaaagatttttcaaagattgctcgacccctcactagattgctgtgcaaggaaactgagttcaactttgatgaagattgtcttaaagctttccatttgataaaggaagcattggtgtctacacctatcgttcaagcactcaactgggaccacccatttgagatcatgtgtgatgcatccgattatgcagttggggctgtcgtaggccaaaatattaatggcaaacttcacgtcatctactacgctagaagaataatggacgaagctcaaacaagatatgcaaccatagaaaaggagtttttagctgtggttttcgcctttgagaaatttagaagctatttggttggctccaaagtgaaggtctacacagaccatgcagcgctaaggcacatctatgccaagaaggaaaccaagccaaggcttctgaggtggatactattgcttcaagagtttgacatggaaatcattgacaagaaaggtgttgaaaatggagttgcagatcatctctccaggatgagaattgaagattcagtcctgatagatgacactatgctcgaagaacagcttatgttctatgaccttgttaacaaaaacttcgacacaaaggacatgctggaagaagcatatgcagttgaagaagaaaagttgccctggtatgcagatttagtcaattatttggtaagtggtatgatcccccagagtttggatgcatatacaaaaaaaaaattctttagagacatccaccattactactgggatgagccgtacttgtataaaaaggagagtgatgggctattcaggaggtgtgtctctgaaggagaagttcaaggtatactgggacattgccatggatccacctatggtgggcatttcgcaaccttcaagactgcccagaaaattttgcaagtaggtctgtggtggcccacaatgtttaaggatactcaggaattcatagcgaaatgcgatccatgccaaagagttgggaacatatccaaaaggaatgagatgccacagaatccaattcttgaggtagaagtttttgatgtgtggggaatagacttaatgggtccgttcaaccctccgtcatatggaaatgcttatatcatagtagcagtgggttacgtctccaagtgggtagaagcaatagcagcacaaaccaacgatcacaaagtagttctgaaaatgtttaagtccattattttccccagatatggtattccgaaggtagtgataagtgatggaggctcatatttcataaacaaagtctttgaaggtctattgagaaaatatggagttaagcataaggttgccactccccatcaccctcagaccagtggctaagtaaaactatcaaacagacagatcaaagctatactcacaaaagttgttgatgtctcaagaagggattggtcaactaaacttgatgagactttatgggcctataaaaccgcatacaaaacgcctattgggagaaccccattccagatgctatatg

SEQ ID NO: 13309 - DNA, 3000 bp, Unknown
  misc_feature (1)..( 3000): cDNA_ID_3029198_gDNA_ID_2214614_Annot_ID_187478 3000 nt of promoter + ATG
cacaagtcaagtctacggaggtctcacaaccaaaacaggttagaaaagcgctatttacaacggcggatcagtcaatggtggcacaaatgggtgttgatgcggatgggccgtcaattgaggtagaaactgcaaaggaagttctccatgaagagggggaaattacagaagctacaatggtagtaaacaacatggagagttctattccattgagtaatgtgtcgggtgaggaaaatttggacaaggtgctttctaatgagcttgaacggggagaacaagtgttcatgtcaactaaagaggtggacgaagatgactcaatggtctcttctcctctgcagcctgaggatccggttgatgaggtggaaaagtttgcaaaaaaattaatggatgcgacaaggcttcaagaaggtgttggtgcagagcaaatggcgatgcaggaaactgatacgggtaagattggagatacagaggcggctcgcaaagggaaaggaactgcgctacttctggggattagctcaaaaaagcgttatgctcttcttttttcatcacctcggaaaacgtttggtatcacgagtggagagcaagtaaatgaaggaaatgtcccaacacaccatggcacggtcaagggaggtatgggtgggaacaaaccaccaaaaccaaacggtggtaaatgaaagttttaacctggaactgtcaagggctcggaaataaggcaacaatcggttatcttcgggatttgtggaaacaacatcggcccaattttttatttcttatggaaactaaacaatcttctttatatatggaaaaatttgttggtcattttggttataaaaatttgaaaacggttgatcctatcggttgtaatggtggtttagctctttattataataatgattttaatgtttcaattatttttcaaaacaatcggttaattgatattgaagctatttacaaaggtaaaaccattaatcttatctttgtttatggagatccggttcaaaaaaacagagaacaagtttgggagcggttaacgcggattggtgtatcgcggtatactccttggtttttgataggcgattttattgaattaaaagaaaacaatgaaaaaagaggtggtaaattaagacatgcatcttcttttataccttttaagttaatgatagaagattgtggactcttggaatttcctcatctcggggattggttatcttggcggggatggagggataaaaaaccaataaggtgtcggttggatagagctttagctaatgaagattggcatgaattattctgcaacttgttcattgaatatttaccgatgttagcttcagatcatacatcagtgatagctactattgtggataagataccacgtgggaagcacaactttcggtttgataagagatggattggtaaagaaggtttactagaggctatttccaatggttggaaccttgataatggttcaggagagggtaatattattgaaaaaataattagttgtagacgggctatttccaaatggcggaaagacttacctccttacgggagaaaaacaatcgaggaattgaaatctgagttagatgcggcacagaaagatgattcgagaacaagtgaggagataacggatttaacaatacggttgaaagaggcctatatagatgaagaacaatattggtactagaaaagtaggagtttatggatgaaggttggggataataactcaaaatatttccatgctctaacaaaacagagacgggctaggaatcagatcacgggacttcatgatgaaaatggaaaatggtctacagaggataaagatatccaacatatagcgatgtcttattttgagactttgtttaatacgtcgaatccccaggatattgcggaatctttatcataggttaaaactttaataacggatcaaataaatgacttcctaacggcacctgctacagaagatgaggtgagagcggctttgtttttggtgcacccggaaaaagcaccagggcctgatggtatcacaacgttattctttcaaaaagcatgggctaccataaaaatggatatgctttttctggttaactcttttttacaagatggagtttttgataaacggttaaatacgactaatatatgcttgatcccaaaaacgaaacgaccgaatcgaatgacggaattaagacccattagtctttgtaatgtcaggtacaaaaatatttcaaaaatcctttgtcaaagacttaagaagattcttccaagtcttatttcggaaacacaatctgcttttgttgaaggacgtttaatttcagacaatattcttattgcccaggagatgtttcatggattaagaactaatccgtcatgtaaaagaaaattcatggcgatcaaaattgatatgagtaaggcttatgatagggttgaatggaattttatcgaggaattattaaagaaaatgggtttctgtgaaaagtgaatatcgtggataatgtggtgtatcacaactgtccagtatagggtcctccttaatggacaacctagaggactaataattccaaagaggggtttaagacaaggagatctactctctccttatctatttatcctatgtacagaggtgctcattgcaaatatttgaaaagcagagcaagaaaaattgattactataaatcggtcaccataaggatttaaaattacaaatctgtcgtaacataaaatatttttaaggtcattccaacaatttattttattctttattaaacctttcatcaaacgacagatttatggtaatataaatttatctgtcacaacataaaacaactctgtaataacacaaaacattatattttagaaaacaattatgtttaatataatgtttggggttaagaccgagagttatgatgagaatgttctaattggtatgtatttctaaattccctatcattctcttaactcaaacaacaaagtgtaatggattttaatattaacagagtattctttaca

SEQ ID NO: 13310 - DNA, 3000 bp, Unknown
  misc_feature (1)..( 3000): cDNA_ID_2702674_gDNA_ID_2214615_Annot_ID_135801 3000 nt of promoter + ATG
gagcaccggcaatatcaatatcggatggagaagctagcttctcctcttcatgaaggaaaaagatcttgagttggctgcgtttttgtctactgattctacagaaccaaaaccacccctctaaccaaccaccacaggcacccagctaaacaacccaactccaagcacatttccaaccaccacatgcaccccagaagacaccggattaggcaccactacattagtctccacttcagctactttgtctaatagttcttctaaccattgaacttgattttctaatggttttttgaaaaactttatcttttgttgaaaacaatttaagatgataatataatgtatgagtgaatgattttaggaatgttaacttgtttcatgtttttaatcctctttatttagtactaatagcttctcaattcaaaatctaatcaggttaggtaacagacagtagaacaaagagtcccaaatcacttgagaccaacaattttcgtctcaaaactgtcttaagtaagcggcgttgctttttagtcggatatctacaactttctaaagtagtcacaaaccagtcgcttatgtgcgactgaaaactgcggtcagataatagtcgtaaataagcgaccatgttgcgactaatttatttagcgactgtttttttcagtcgttatataggtaaaaccttggtttgcgactgatttgagaccaatttgggggttgcaaatagttggttgattttttattttggtataactacgtggtttgttaatcttagtacaacttgtttaatatagttatttgaagtatccgttaggtataacttggtacgtagatgtactacccagattttgttctgtctcatcttttctctatctttaattaaaaacaaaaaaattgaaaaataaaaaatttcaaaacttaaaaaaaaacgtgggtcaaattgcaagtggatcaaagcatgtgggtcaaactgcaccgtcattgtagtaccccgcgtattgacctcggaaaagaatgaagggcaagaggaggagaggagagaaatgcgcatgaaagaatgaggagggtcgcctatttataaaccgaggaagccagagtagagcccaagtctaaaaccttggagccgaatccattcggtcgagccaacttggtgaccaagtttccatccgagccatgcaagccgacttggagcccaagtccaaagacttggagccgaatccgcttaagaccacgggttgcatttcacgcgcctcctcccatcgttaatccaacccgcaaccttagcttataaataggaccacacccccctttagtcgaacacttagaaattttctcaccgaaaggctgcccaaaaaaaacccgatcgtccgaacctttaggataacccgagagagaaagagagagagcccgagttagagatcgtcgaccaagttaggaggattcgccggtgattgtgagttccggttttagttcttgcatgtttgatttcattcttgcatgttttcgattctcccttcctttaggtttggttttgttatctttgagtttattaaggttgtcttatcgattatgtaacgcccgcgatcctcaataggatcgttggctaggacttggtccgagagatgaaggtggagtctcggacaagtgagaaggagctggccataagctcggacaaaggggaaatcatgcaggctaagctaggatcgtaaagaaatcagctgggtcagctcgcccaaagctcaagctcagctggaaggactgacggttactcaggtcgagtgacagtccagctcgggcagctggacgagtgacggttgagctcgaggtagctggacgagtgacggatgagctcgaggtagctggacgagtgacggactagctgggcggttatgggcgaagagatacaactcttcggaaaggtgcaactcttcggaagggcgcaactcttcggaaaggtgcaactcttcggaaaggtgcaaggaacggatgtattgattcgggaagcatcctttcgccccctatataaggaagggcgcccgggaccattccactcaccacaacacaccgaaaacacaagaaactcaccattaaaactctctccctcttgggagaataaatagtcttaggattcggtagccgggctgtggccggcaataaagaaggagggtcggatcgacctaacctcgagaaggaaggtaagggatcctagactttgagtctaagggttctaggatgtgagtaagtagtcggatccttgaaaggattgactagagggcttggtagtatccgggtcatgtgcatcctacacaagactcggtccgggtagggatcagctgaggcggggacacggctcgacggaggaccggcgggtcttaactgacctgccgagaatcggccggactgatgcgcgatcttcccctctctgaattctctccacggatccgagtagtgtatggcatatagagcattgcatggacttgcatatgattaagtaaatgagattacttatggctctatgactttcatgaacaaatggtgatcgtgggaaggacttggcttaggcgcgagagactcaaggccgggatgatgggtggtgatagttcggatagtctagggatcgattatatgacttgtaatagcttatatgcaaactcataggttgtatcgaatcctttgcttaatcaataaagtatccgattgtttgtttactctattcgtctcatatattgaatcacggaatcatatggaacggattagactaggaaagaacctcataaacggttagggccgagtcacttactgtcttaggtcgagagaactcgtccggactttaggcagtccggatcggggcctttcaagttggtatcagagcatgcttggttctaggactaggtgttgggttaaggggtatcaccactcgtcggcttgagaatctcgcggtagttgttctttactcttttgctattttactaggagttatgtggattaactttggaggtttcgcagatg

SEQ ID NO: 13311 - DNA, 3000 bp, Unknown
  misc_feature (1)..( 3000): cDNA_ID_3029277_gDNA_ID_2214615_Annot_ID_187512 3000 nt of promoter + ATG
cccgtgaagttccttcaattggagcttcaagttaagagctttgataagtgtgagcgagtctgaagcgaaagatatgtggatgaaagctaattcatttgcaacgcgaatcgcagtaagagttgccagtgcttcggccatgaggggagaaggaacaaaagagagcagagtcgagccttgtcggacgatgcaattttgccaatccttgaagagccaacctaagcacgctttattctcaggtttccaggaggcatcagtaaagcaggtaaccagattgtcgggtgagggggcttggaggggtgggttggggagagctctgatcattggattagaagattgagcctactaccactcctttgcctggataattgctagaacaagtgcatcctttgctgagatttgtttcttactaaaaataaactgatttcgtgaagtccatatgatccaacaaatctatggaaagagaggaccattaccaatcccagacggaggaagacaagtaaggttcttagcacacatgataccttttttgatggacactagattgtttcggttcagactttctttgaatggagcttgattccagatctgtgtcacaaatggacaggtgaagctccgtgtcagcaattccggagtgtgggcattcgatagagtctgtgactagacggtgggatagattttcgccaacagaagtgctctttgagccattttcaatagcagaagttttgtttttggggaggtagctaaggacaaaatattagatttccaactgcaatggtcttgctgcaaaaccactggggttgtaggtgaggtctcctcctcagagaaggattcatggtaccccgatttggtgctataagatccatcttttgtgggaagccaagcccatttattagccgcacatcttttactgggtttcagacttagaatatccttctcataggctggcagtaagcgttggatcagggctttattccaaacataagcatccgacaataacagattggaaacagtccaactatgtgattcaaaggtgggggtcccataggggcttgaggagaggtcatggagagccaaggacttctccagaggggaatagacgtaccagagtcaatgaggtaccccaacttgggttttaagaggtctctgccgaagcagatgctgcaccaaccatgagaagcagagttgggaactatgtaatcgagaaagttggatgaagtgcaatatttgcctagaaggaccttagccaacaagaaggaagggttattgagcagtgtccaactaattttggctaagagggcagagttgaaggtttgaatatctctgaaccctaaccctccttctctaaaggactttgtcattgttttccaagatacccaatcttcttttcagtttttgtgtcccaccaaaatctagtaagtgctgactaaattctcttacatagattgtttggatcttgaaacaggacatggtgtacgatggcatagcggaaagaactgatttaagcatagtaagcttacccgcagtggaaaggaagcgtgaggaccagctcagagctcgttgcttaatccgaaccactatcatattgaaaagatcctttttctttctacaaaacaattcaggtaatccaagatacttccctttcccaccttctttttgaatattaagtactgcctgaacccgagtctttgtttcaggagctattttagaggagaaagtaatagaggatttctctctattggtttgttgtcctgaagcttggtcatacttgtggaggatttgtttcagcttggcgcagtttttgggatcagagcgggagaaaaacatcgtatcatccacaaacaacagatgattaatatgtgggctgcgtttggaaactcttaggccaattaagttaccttggctgagggcattgttatacagtccagacagcacttcactgcagataatgaagatgtatggtgataagggtctccctgcctgattcccctttcaggtgtgactagtcgtctagcctgaccattgaggaggaaagaataggtaacaaagttaatacactgcattagccattgaatcaaacgagggtggaatcccattctttcaagagctgcctggataaagtcccattctagcctgtcataggctttgctcatgtcatttttcactaccatgaagcaacgttttattgctcctgaggttttaaagtaatggagagcttcatgggtgattaaaacgttatcagatatagcaagctggggaacaaaaggtgattgattttaagagatacacatatgtaaaactggttgaagtctcttggctagaatctttgatatgatcttgtaataaacagagcaaagagtgatgggtctgtagtctgaaaccttttgggggcaaggcacctttggtattaacctgacatgggtgtgattgattcttcttggcaggacacgtaataaagatagcttggacttcagagatgatttggtcgctgatattgtcccagttagattgaaagaaactcgctgagaagccatcaggacccagggccttgtcaggatgaatagagaaacaaggagttggcattagtatgagtttgtcattcataacttgggagatacatggttttagggttgcattgacagtggatttttttctccaggaattgaggtaaagatttgttggtaatattcagaaataacatttactattttatcctcctcataaactggaaaactttgaatttaggtactttgccagtgtacttcgaaaaagagtacttttgttgctgaaaattgacttttctacccttttgtacttttattgctagtcgttttaaatgaagttcaaatgtttattgctgggttttttttatcgcttgttgcagggtgctgatgttccagtttttgccatagctggaaagtgggaatgttcacaacaaggaaagtgggatttgtgatagaaaatgatcgatttgccaggagcatatgcgttaattctgatatg

SEQ ID NO: 13312 - DNA, 3000 bp, Unknown
  misc_feature (1)..( 3000): cDNA_ID_3029295_gDNA_ID_2214615_Annot_ID_187507 3000 nt of promoter + ATG
taccctgacattacttctccatactaaccacaaccttcccaatcgatgttcttcataattagatagtagagaccagtctttaaacactgaactaactattcaatccgctttgcctgcctttatttttgtttctatcagacatccaaaatcaaatttcccctccttcatccagttcctaacaacaccttgtttactatttttattgaagcccctgatgttccagaagaaacctgacatcaatgattatttggagtgtgacgtttttttagaaaactaggtttttgagtcctagtattctacgttttgtttgatgagacgcatttgtgactatctttagatgctctcggaagagatatcctcagattccctgcttcttcctaattattagtaggtaaagttttcccctcctgttgggattcttcttccaccacgtaatcatcccccttatcctctacgtggtctgatttctctacctctatatcagcatatacttctccttcttctacttcttctcctttgtcactaagacagaaaaaagagttggacaagatggacacttctccataacgcagttcgttggctttgctaggactctttattgttttagtaggagtattccatgtcagagcatccttggactggtgttgtgagttctcaattaactcctctgcattattattcccatcttctttattttctttcaaactctgttccagaccattacttgtctctggctctagatctgccaccttagtttctactggtttggttacctcaactctattttctgcctttttccttgataaacaatctgtacttaaatgaccccatctatcacagctgttacatcttggaggtaaccatggataaacatattcgactactgtatctcctcctttttctgacttgaaagagaaacactttggtaatttcttcgtgaagtccacttctacaaatacttttgcctcctcaaaagttttgattgcttctgtatccgggtggagtttctttggcgttcccaatggacttgttatagcacttagcactttgcaagagaaatactttggtggcacattcttcactattacccaaagtggcatagttttaatctcttcttgatccatatcaactattggagtccatttcgatagcaccacaggaactccgcacaggttccacatacctcttcttagaactcgagctctagtacgttcatctttgattctgaacctcactgttgtgtggttcaccacaaacacatcaatctttaccgatttatctccaagtgtccatatcttattcactaaagcatgaatacccccaacaaaaggagcctttgccaagaactttccaactaagaagtcttcccataatggtttagcttccttgaaaacactatcgggaattcgagccgatggtactccatcaacctcctcaataatcaaaaccactattttagactcaactttgtttttaaccaccgcagcccaactcccatgtggtttccctattgactccaccttacgagcaggtactgcttcttctccaaatcaatatttcccacctgcaacgtaatctcagtagaactcatttccttctccaaaatctgcagaaccccctcatcccgcatcaacacttgacttaagtcattccctgcatcgaacattctccgctatgctgatcgttgtttttgttgtctccggcatcggaacttgcggaggaagcttaaaaccctagttcgcccttttttcgccctcagagcaaaacgatgcgttttagtttttagcaccgatattgacaacttcactttcattttactataatatattatgacatgtggatagcctatgtcaaaatttaatgaataaatattttatcccagaatcatttcaaaatacgagattgaggatgaagatatatgtctgacggacagtgcttctacacacacaatctctaaagatacaaaatacttctcctctctccaaataaaagactctggtagaagcgtgagtactatatatggccatgcaaagataatattaggcttcggcgaatccatttttacaatgccaaggggaactccttttaaagtaaatgatgcattatattctcctaagtctcatagtaacttgataagtttccaagatatccgaagtaatgaatatcatatagagactatcaataaagttggcattgaatatctttgcataaattttgagatgcatatatatattagaagaattgccaatgttatccttcgaattatattgcacaaaaataaatagaatcgcatcaaatgttacagtaaactcgagtgacaatcactcaagtgagtttactagtatatttaagatatgacatgaaagacttggacatcctgattcagtcatgatgccaaaaattatgaaaaattctaaaaccatccattaaaaacaagaaaatatttaaatctcgtgagttttcatgtaaaacatgttctcaagaaaaactcataataagaccatcgccaatcaaaattgggagtgaaagacctgaattcttgtcgagaagtcatggtgatatatgtgggccaatccaccatggtgggtttcgatgttttatggtattaattgacgcatccactagatggtcacatgtatatcttttgactacacgaaacacggctttcgcaagatttattgcccaaataatcaggttagaggcacactttcctgattatgccataaaaaaagtctggcttgataatgttggggaatttactttgcaagcctttaatgactattgtgtatcgaggggaatcgatgtagagcatccggtccctcatgttcatacacaaaatggcatggacgaatcattaattaaacgttgcaactcattgcaagaccgttaatattgagaacaaaactcccaatttttatatggggtcatgctatattgtatgttgcggctttggttcagattagaccaagcgcagataatcaatattcccatttacacatg

SEQ ID NO: 13313 - DNA, 3000 bp, Unknown
  misc_feature (1)..( 3000): cDNA_ID_3029313_gDNA_ID_2214615_Annot_ID_187502 3000 nt of promoter + ATG
ttatttatgcaagacatattttttgtagtttgattaattcgttcgttaacaaatttttaatctaaatttggtttctaatatgttgatataactattcttattagggaacaattcatagatttttcaaaagaaatcatgaatcaacgtcacaacatattccaaaaaatattccagaagctattctagaagatttgtcttcggatcctgccgataggaaacatattttggactatcatcctaatgaaagagataaggtaagacctaaatatctgattaaaggtccttattaacctcgtggacatgattttcctaaacactatcaggaaaaaaaatgagacgatttaatccagactggtttgatctctatagtggttggttggaatacagtgtaaaaaaggataaagcttactgtttgggttgctacttgtttagagattaccttgaaaataaaagtggaagtgatacgtttgcgacgaaaggtttcgatacttggaaaaatcctcagagtttacgcgaacacgtgggattggtgaatagctttcacaataatgcattaaaaagggctgattgtttgatgaggcaaggtcaatcaattgttcatgctttttataagcaagatgacatagtaaaaggagaatacagaatcagactgaacgcttcaattgattgttgtagatatttagtacgacaaggattaccttttcgaggccatgatgagtcagtggattcagcaaacagggggaatttcttagagcttgtgaaatatactgcagggcaaaatgaggttgtaagtaaagttgtgttggagaatgctccaaagaataatcagatggtatgtcccaaaattcaaagagatatagtgcattgctttgtagaggaagtgattagatctataattcaagaagttgatcatgatgtattttgcttgatggtggatgaatctgcagatatttttgataaagaacaaatggtagtggtttttcgttttgttgataaacatgcgacagtgaaagaaagatttattggtcttatccatgttaaggaaacattttctgcatttctgaaatgtgctattgattcattgtttgctaaacatggattgagtataaaacagataagaggacaagactatgatggtgcaagtaatatgaaaggtgaattcaatgggttgagatatctaattttgagagaaaatagttctgcatattatatccactgctttgcgcatcagcttcagttagtcgtcgtggcagttgctaaaaaacattttgaaattggagatttctttgatatgatttctgtcttgataaatgtggttgaagcttcttgtaagagaaaggatagggttcgagatgaatttcggaaaaagctggaggaaggaatcaatcaaggtcaaattaagacgggaaaaggattgaatcagcaactttcactatagagacccggtaatactcgttggggtactcactacacaacattattccggttagttgatttattctcttttatcattaaaatgcttgagtggatcgaagatgatggaactgatagtaccaaaagacgacaagctaatggtcttctcaagtactttaatacctttgactttgtgttctacttacagttgatgttgcttattcttggatttacaaatagtttatcagtggctctacaaaggaaagaccaagacattctgaatgctatgtcactagtgaaatccaccaagcaacatttattcaatctcagagatgatggatgggattcttttcttaatgaagtttttcttcttgtaaggatcatgacattgagtttgtcattatggatggagaatttgttgatccaagaaagccaagaaaaaaaagcaacatgaccaacttgcatcattatcaagtggagtgtttttacactgtattggatatgcaaattcaggagtataatgattgtttcgatgaggtaaacaccgaattacttggttgtgttgcttctttaagccctactgatttgtttcgtgagtttgatcagttaaaagttatgagattggctgaattttatccacaagattttactcgtgttgattggagatcactcgagcatcagcttggtctttacattgacaatattcgggaagatgacagatttgctaatttgaagagtctaggagatcttgcacgtgttatgatcgagacaaggaaacacctttcgcatcctcaggtttatcgacttttgaaggtagttttgactttacctatagccactgctactgttgaaagatgcttctctgctactgttgtgaagactactttgcgcaaccgtataagtgatcagtttctaaacgactatgtggtttgtttagttaaaagagaactatttgatacggtgataaataaggtagtgatcaaaagatttcagagtatggaaaatcgtatgatagctctatagatatattttattataaaacatttttttatattagtatttttgaatatcattttttaaaaatattgtgcctgaggttaaaataaatcatggattcgccactgaggctaaccaatcattaccattatcttttgtaatcatatgttttaatatatgaatttttaattttgtatttttttcttttttatggtatttaaaacgttctcaccaatacaaacatatttattagaagtattataaaaaaatttaaaagtaaataaatattataaataatattaagaaaaaattattatgtttaaagaaaaactatgcttacaataaaaagttaactactgaggaaagaaagatggcgcttgcgagagcgattgcgagggcgatgtacagttacttttagatttggttggacggttacttgacttggttctcggatagtttcgtcgacgtcgtgaggcgtttctgcgactccgattgtgcgacggttatctccatgttgtggcttcccccactacgtgatgcaactgccacgatttctgaaatgcggcgtcgcaacaccgtttccttctcatg

SEQ ID NO: 13314 - DNA, 3000 bp, Unknown
  misc_feature (1)..( 3000): cDNA_ID_1397919_gDNA_ID_2214615_Annot_ID_187501 3000 nt of promoter + ATG
agaaaccactgatcatctctttttcacatgccctcatgcaatacaaatttggcgggcatcggcaatacccatccatgaactcactgattcccagatcagcttggagacgaaaatgacggctctatttgaatggcaccaagaagtacctcgagaatctctacactcacagctacccttctggatattatggcgcatatggaagagtagaaacaaggtcatatttcagcgagagagtaacacttggcaaaaggatctacgaaacgcataccaagatacagaggagtggatactgaatggccacaaccaaggggatagtcgaacaacactggcaggaacgcactctactcgtacccaacacagatggcagagaccggaggcgggatggattaaatgcaactacgatggaagctttaccggacaaaatcaaagatcaacaggggcgtgaattattcggaatgaacacgaccaatacaaaggagcggggaagagttaaggtctgccggtttcaaattcactggaggcggaatgtaaatcactaatttctgcaatgcaacacctctggggtcacgaatacacaagaataatatttgaaggagattgcaagattttggtggatgccttacatggaaaagtgaatcgatttgatattctcaattggctgcatgacatcaaagcttggaagaacaagtttgccgacgtggagtttagatggacaataagagcttgcattgattttacgattttggcgggaaaatatgattttacaattttggcgggaaaatgtgattttatggttttggcggggaaaaatattttacggttttgccgagaaaacatgattttacggttttggtgtgaaatttgcttttgcgggttttggcgggaaaacatgattttacggtcttggcgggaaaacatgagtttgtagttttggcgggaaaacatgattttacggttttggtgggacacatgtttttacggttttgacagaaaatatgattttacggttttgagataaaaatatgttttgcagttttggcggaaaaacatgattttacgttgttgtcgggaaaatatgattttgcggttttggtggaaaaattaaatacaattttaacgtaaaataatagttcgtgatttcctaatttttagatgttttggtgcaatatggaattttaaaaaatattaaataacaaatttatagaaattggtattattacaaaggttatatttgttatttattcattttgactaaacaatctccatccaaatggtccaattaagtccatccaaatgagttttaaaaatttgcctaaacttacaaagtcattcaaatggatcatccaaatgattcattcaaatgatctgttaaattgtcaaaaacaaacatcatttttcatctccacctaaatgatccatctggatggagaaacaaattgagcctcaacctgctgacaaattagccaagatacaacttcgtaatagacaagattttatgttcaagaacaaacccaaaaaaatcctcaactaatttttttttggatgtttaatacccaattatttttggttggaaggtaaatacacgaagtaataaaatcttgcaatttaatacaaaaacaattaattgttgttattttcatactcacgatttcacaataaaaataaaattccaattttacccttaccatctcaattaactattaatttttagatgatatgatattaattttctagttttggataaaaattaattttattaatattttagtttatggtctctcaaatttaaattttcatttttattataattattttattttaaaatttaacataaaaattatagaaaatcaaaaatattttaaaattgtcagtaaacattcttcttagtgagaaactctcttttcgattgtatatctttcatgaatcaaattattttcgacaaaatctcaacctgaatctcatcgtatttctcaaaatttatcaattcataaaaatggcgaattttgtttttagtagcaaaatagctaatcttaacctgaatctcaatgaattagattaattttcgattttaaattttttcaaagagaaaacgactctttggtattgtgacgatagaataagattgtaaaaatgactattttaatataattttgattttctttaatttttatgttaaattttaaaataaaatagttataaaaaatgaaaatgaaaatttaaatttttagacaccataaactaaagtgttaataaaattaatttttatctaaaattataaaattaatatcataccatctaaaaattaatagttaattgagatgttaagggtaaaattggaattttatttttgttatgagatcgtgagtatgaaaataacaacatttaattgtctgggtgttaaattgcacagttttattacttcgtgtatttatcttcaaaccaaaaacgattggatattaaacgtccaaataaaaaatagttgaaattctttttgggttttttccatcttatgttcttctattatgtccccagatgtatttcatccttaattcacactgattacatacgttctaattaatgaaagttgagttaaagaaaaaataataatattaaaaaattcttttgtgatactatattgcccatgttctaagaacggttcatccggatgagatcttcacaacgaacatcatcgtagtatgattaaaaagaagatatttttaaggaggtccaaaagttataagaggtctccaatgttaattatgagaaagattgttgctataattgatattaaaaaaacttctcaagaaaaaaggaagaaaaaaaaaaatcattcctttacgcgtttcgtatctctcaccgaaggaagcttcgtctcttctatataaaaataatctcgatttttcaactccgatcaaaggttttgctaattcgtcgccttaatttcgttcaagcttctacaaaagtcccagatttgttcacctttttcggtattgaatcatg

SEQ ID NO: 13315 - DNA, 3000 bp, Unknown
  misc_feature (1)..( 3000): cDNA_ID_3029321_gDNA_ID_2214615_Annot_ID_187498 3000 nt of promoter + ATG
aacttttttcactcatcacagttgctttttggttcaaaaaaataaaacataaagctttaaaagcaaacagaggtatcaaaacagaacaaaagtatcaaaaaacagaacaaaagtattaaaaacagaacagaagtatcaaaaccaacaaaaaccaaaagacataagagaggatacataagttttaagcaaacactactgagtaaatatgatcctgcttgcatttttccctgcaaagtcatccatcacagtcgcataatcaatcttttcaagcattgctctctcaattgataatatggctaacccattgagcctatcctgtgacatggtggacctcaaataattcttgatcaacttaagcttagaaaaacttctttcggctgaagcaactgacactagaatagtcaataatatccgaaacgaaatccatgtgttaggataacaaccctccactcttttcaaaaaatccaacactttaataggtttcgtaacttcatttggtagcacttctcgtagaacttttagttccataaacaagtcagccccatctatatcagaatgctcaccatgcttaagggatgattcaagattcacacatgatgccatcaagttttcatcatttgcatatgtcaatttttgtaaatcaaacaaaaatccaaaagtttgttcatacctttggaattgctcaaaccttgactcaagagaaattagagcttgatctatgagtgtaaggaagtaattaattctgaaatcctcctctgttgacaatttcatattcccatgatcaaaatgcttctttcttctaatgatcttcttctttttcacaggaaattcagcttctatatccatagcctctgcaattcgtatagcctcagactttgctttctcaaatcatgtctctctatatttttgtaagtatgaaactaatcctttcagctcaagaatagcaacatcaatatcaatgtcatcagcttgtaaagtcttgctcactctgttgacaacagttagaagtcataccaaataatcataccaaaaagaaactcaaaccctccaataccatgtgtttctattcagcatcacttcgtgtttttggatcgtcggtcttttctgccaagtaaagtaaagcatctctgatttcaggagtctgaaaccgtattgctttgacactttcgagatgactctcccaacgagtttgagataaggatttaagtgttaaaccttttaccatctctttaaatatatcccacctgtttgttgaagatgaaaacaaacagtataaccgctgtataatcccaaaaaaagacactgcctttgtagaagaagatgctatatcacaaagcacaaggttggggctatgacaaccacatggtgtgtaaaatgctcttggattaatttccagcaatcttctttgcactcctttgttttttcctttcatattagacccgttgtcatacccatgtcctctcacatcatcaatctctaactccatatcaattagtacttcttgaatcgtagagaacagcccttcacctgttttatcattgacttccaaaaatttcaaaaagaattcttcaaccttaattggtgttgaagaaatatccacacatcgaatgagaatagtcatctgttctttatgactaatatctggagtacaatcaagaattatggagaagtactttgaagcacgaatcgtcttcatgatcataagtctaatctcttgggccagcatacttatcaactcattttgaatcttgggacttagataatgagaatatatctcacctgcaccaatttttctgatatgctctctcatcactacatcaaactctgcaatcatctcaataaaactcaaaaaattcccatttctgtcttcaccaatctttttattttctcctctaaatgctaagttatttttagcgagagtcttcactaatgcaatgatcctcactagtacttccctccaatgaatcttttctttgtttatttcttgttggacatacttatcaatcgttgttttgttctgtagtctagactctaactcagtccaacgagtcatacaaataatgtggtcatggctgccttcatgttcttcgagtcgcttcgaaagatttctccaatcattgtacacactagttgctaagtaaccacaactcttgtcatgtctaaacaatttacagcaaaaacaaaagactttatctaatgtttttgagtaaatcagccactttctatcatgtttctctccatttttctatcataaatcagtagaatccgtgagagaaatgtcttccaattccatctttagcaaaacgatgactagttgataaccttgccactggatctttttcaactattaaaactcttaatctcaaattcatgttatcccaattcgccggataagaaatattggaaggaatgtcttcattctatcgacttttcttcttttcaaagacaacttcagcttgttcttgttgtttattctcaaattcattctcatccacttgaaccacttcatccaaattgtccactttattctctggatccacttcatcagctcgttcttgttggttattgtttccatcagaattaatgacttcagaaattgtaggattttcaggttttttcatgtacctaagaagagaattagcctgtgatcttaccaactcttctcgtctcttttgcaattttcttttatcacatccatgaggttcctttttgatccctaaaggaggcatcgttcaaagtctcaactcaacgctctaacgtacgtcggtcgcttgcttcttcacggcagatggaattaatcagatttttaatggaggaaacctagaataagagaattggttgatgggctttagaagtcttgggttgaaaatcagattttttcttctcaactctcttttaattaagcctcgttggactttaaaatttttgggccctaagccaccgcttatatcgcttacgtcacgggccggccctgcatgattgtctcaatctatttctcat

SEQ ID NO: 13316 - DNA, 3000 bp, Unknown
  misc_feature (1)..( 3000): cDNA_ID_2713416_gDNA_ID_2214615_Annot_ID_135807 3000 nt of promoter + ATG
ggggcgtgaattattcggaatgaacacgaccaatacaaaggagcggggaagagttaaggtctgccggtttcaaattcactggaggcggaatgtaaatcactaatttctgcaatgcaacacctctggggtcacgaatacacaagaataatatttgaaggagattgcaagattttggtggatgccttacatggaaaagtgaatcgatttgatattctcaattggctgcatgacatcaaagcttggaagaacaagtttgccgacgtggagtttagatggacaataagagcttgcattgattttacgattttggcgggaaaatatgattttacaattttggcgggaaaatgtgattttatggttttggcggggaaaaatattttacggttttgccgagaaaacatgattttacggttttggtgtgaaatttgcttttgcgggttttggcgggaaaacatgattttacggtcttggcgggaaaacatgagtttgtagttttggcgggaaaacatgattttacggttttggtgggacacatgtttttacggttttgacagaaaatatgattttacggttttgagataaaaatatgttttgcagttttggcggaaaaacatgattttacgttgttgtcgggaaaatatgattttgcggttttggtggaaaaattaaatacaattttaacgtaaaataatagttcgtgatttcctaatttttagatgttttggtgcaatatggaattttaaaaaatattaaataacaaatttatagaaattggtattattacaaaggttatatttgttatttattcattttgactaaacaatctccatccaaatggtccaattaagtccatccaaatgagttttaaaaatttgcctaaacttacaaagtcattcaaatggatcatccaaatgattcattcaaatgatctgttaaattgtcaaaaacaaacatcatttttcatctccacctaaatgatccatctggatggagaaacaaattgagcctcaacctgctgacaaattagccaagatacaacttcgtaatagacaagattttatgttcaagaacaaacccaaaaaaatcctcaactaatttttttttggatgtttaatacccaattatttttggttggaaggtaaatacacgaagtaataaaatcttgcaatttaatacaaaaacaattaattgttgttattttcatactcacgatttcacaataaaaataaaattccaattttacccttaccatctcaattaactattaatttttagatgatatgatattaattttctagttttggataaaaattaattttattaatattttagtttatggtctctcaaatttaaattttcatttttattataattattttattttaaaatttaacataaaaattatagaaaatcaaaaatattttaaaattgtcagtaaacattcttcttagtgagaaactctcttttcgattgtatatctttcatgaatcaaattattttcgacaaaatctcaacctgaatctcatcgtatttctcaaaatttatcaattcataaaaatggcgaattttgtttttagtagcaaaatagctaatcttaacctgaatctcaatgaattagattaattttcgattttaaattttttcaaagagaaaacgactctttggtattgtgacgatagaataagattgtaaaaatgactattttaatataattttgattttctttaatttttatgttaaattttaaaataaaatagttataaaaaatgaaaatgaaaatttaaatttttagacaccataaactaaagtgttaataaaattaatttttatctaaaattataaaattaatatcataccatctaaaaattaatagttaattgagatgttaagggtaaaattggaattttatttttgttatgagatcgtgagtatgaaaataacaacatttaattgtctgggtgttaaattgcacagttttattacttcgtgtatttatcttcaaaccaaaaacgattggatattaaacgtccaaataaaaaatagttgaaattctttttgggttttttccatcttatgttcttctattatgtccccagatgtatttcatccttaattcacactgattacatacgttctaattaatgaaagttgagttaaagaaaaaataataatattaaaaaattcttttgtgatactatattgcccatgttctaagaacggttcatccggatgagatcttcacaacgaacatcatcgtagtatgattaaaaagaagatatttttaaggaggtccaaaagttataagaggtctccaatgttaattatgagaaagattgttgctataattgatattaaaaaaacttctcaagaaaaaaggaagaaaaaaaaaaatcattcctttacgcgtttcgtatctctcaccgaaggaagcttcgtctcttctatataaaaataatctcgatttttcaactccgatcaaaggttttgctaattcgtcgccttaatttcgttcaagcttctacaaaagtcccagatttgttcacctttttcggtattgaatcatgatgaattcaatcttcggaaagcgaaaaactcccgcaggttcttatcctcctttctctcgatttcgtctcttgtcggatctgtgttgcttattgagtttgtaattagtgaaatattcgatgatcgcaagttttgatcttgtaatttttatacttgatttgaaattagatcaatttaggtttgattctgaggaatatgatctcttcgttgattatgagttcattaggttacatgttgttcaattgtttttgtaggttatatgtggttttgaatcatgtatagctcagtgtaagtaaaatggtttggagttataaagcttttgattgatttgatgattatgagttcatttgttttcatgtgcatagatcattaggttacatgtagtgcaattgtttgtgtagcttaagtgtggttttgaatcatgtatagagtaaaatg

SEQ ID NO: 13317 - DNA, 3000 bp, Unknown
  misc_feature (1)..( 3000): cDNA_ID_2713441_gDNA_ID_2214616_Annot_ID_135812 3000 nt of promoter + ATG
gggttttaaatcttttttaaaatcctttaaaacccttgttaaccatataaaaatctttcaaaaacacttgtaaatcatttaaaactcttgtaaagcctttaaaaatcttttaaaacccattgtaaatctttttcccgccaaaaaggtttttgtaggaaaaatatttttggaaaaaaactttgggcggactttttttttgaaatgttttttgcgggaaatttatttttgtaatattttaggcgggaaaaatcaatatttcgatggtctttttaattagttaatgcatgctagatttatttaattgaccaatatcacatgtaaaagcaaatttgttaatgttcgtatgtaattttctatttttttttctataataaatgaagggttggtccccctcaccctaccaaaatttttttttgttaattttcctattggttaatcaaaatattatatacatatatatagatataaaaattagtatatgtaaatttgtttacttttttaggtttttttatttttataagagaataaaaaggtaaatctttaatgacatatgtaaatatctgattattagacttgacacgtgacaccattatgtgagttagtaactttcaaaatggtactttatataataagatggtgattaaataaaactagggaaatttgcataaataaccaacaaaaaattataaattaaaaaactaacatcaaacaaaaaaaaggttgatatattatgtattttttgtattaatgataactttgccctctacactacatacaccttcttttttcccctcctctgttgcatttcatgctgattctttcattagattctcccttcttcatctaccacgaatgctaaattttatagtttccccaaaggtctcttctacctatttgactcttttatttgcaacccattgaaaacactaaacctatttataacacaatatttgggagtttgtaaattattagtattttgctctggttatttatttatcaatacatgtggatttttctttctccctttctctctagctagtaatctcatcttctatatatatttttatattaaaataaaataaaataaaaaactagtttataattaccattactaacaagtaacaattattactacactaccatcccaccgccactaccgtcattgccgctaccatcatcatgtcaccactaacaattaatattaccaccatcaatgtcatttttagtgccactgccaccactaccatcatcgttgccaccaccactattaccatcgtcaacgtcaccggctcaccgctatagtttaccttagttacttggattgccaatattgtatctcatagggatagtattttttttattagagcggtttaactcggccttttgaattatctacgttttgttctatactattttatttgtgtggtttagacaaacattgttccctaatttaaataatttgtattagattttaaaaatttaaatcatgttatactcaaaaaaatctatgttcttataaaattattgcaaaatttataagactaaatcaacaagcaaaattatttggggtgatattaatttagccatgtcattagtattttgggaatttgcatgtataacttaaaaaaaattacaaattaagaaactagcctattagaaaaaatttacactataataactgtataatatattatattataatttcgccatcacaataatcaccattaaccaccaccacaacaatcatcactacacccactaccgccgccacagccaccgtcatcaacaccaccgtcgccgtcggagctacccccgttacgagaacgaatgacatcaccagagcaaccaccccatcgtcggtgttcccattgtcaccggagcctccaccgtccctggaaccaccgccggaactatcgctggagacactgttattgtcggaattatcgccgaagccaccgctatcgccggagccaccaccagaactgtcaccggagccatcgctgtccctggagccaccgccgtcgccggagccaccgccgtcgccggagccactgccgtcgccggagccaccgccgccgccggagccaccgccgtcgccggatccaaaccaccacctatgatcatttaatctaccatttaggttagttagttaactgatacatatataatgttatattcttaatattttagtaaaaatgtgttagttttgcaattcctctttattattctctctacttttttacatatatcatcatatactctagctctgaatggatgctgatttttgattcagtttttgagtttagattttagtttatagattttagattttagttttagatttttgttattatatttttgttttaaaaaccccaaaaaatcggtttttggtttttgagaaaaataacgttgattgaataaaaactagatttcctaaattttaggaaaactaaaaaactaaaatcatgaatggaaaactacaataaaataaatttactaaattgtagggaaaccaaaattttaaaatcttaattggtataaaaataagtttttaaaaaacaaaaaccaaaaactcttacaaaatctacaaaacattcaaaacctcttctttttttttattgtgcgtgtctttcactatacaattttatcttttcactaatctaattactttcttaatatttttcaataagattttatattttttattttacattagattttgattataccgcaaattcacccataaaactatagatttaaaattttgaaaatctttttgttggttttaaaggttgatttataaaaaaaagacggcaggaggctcgggtgattgggggttgggtatccgctgaggatccgacccgaaaattaccctaaacagcccaggcaaagtgttccatcgagcaagacgaaacttataccataagtagcaaaaaaaaccaattacgagagattaaagcgattttcaagtttcctgagcaacaacaacaacaaacgatg

SEQ ID NO: 13318 - DNA, 3000 bp, Unknown
  misc_feature (1)..( 3000): cDNA_ID_3029366_gDNA_ID_2214616_Annot_ID_187546 3000 nt of promoter + ATG
ctttctgatcttctggtgcaaaccgttctgttgtgaaattttcgtcctccttgatagctagtgcattttccatcttctcaaggtcaataccatttgaaaattttttaactcttttttcaaagatccatagttgatctttcagcttcatcacccttgaagataatccttctatgactcttctttgccatttatttttttttctcatctcataccagttatcttctgtaggatattcagtctgagatagcctttctgttgctctcttcttgtggtcaaaagttctcttcagcttgctaagttgagaagtatagttgacttttggtgaagtttcagcttctgtttcttcatcaacatccatatcttgaattccaaaactctgacctcctgttgttgatttctttgaagcttctctgatgtcaaacttcatcttgatgcctttttcaaggttcagattaatttttccattcctgacatctatgactgctccagctaaagctaagaatggtctgcctaggatcaggggatccttgccttcttcatctatgtccaataccacaaagtctgtaggtatctcaacatttccaatcttgacaggcagattttctattagaccatgaggatgtgcaacagaaccgtcagctaagagtaaggctaagttgcagaacttgaattccatgatccctagcattttagctgtagagagaggcataaggctaacagatgctcgcaaatcacaaatgcacctattaaatgtcaatggtcctagagagcatggcagggtgaatgaaccgggatcatcaagcttttcttggatgactttcttcttgtatgtttcttgagtgctggcactgctaatcatctcttgattctgctcttgcttgagtttttcaattttgaacttttttccagaatgttgagtattcagcaaaggtgtgtgctctattgtccagaagaattgctgggtggcaggtgcatcaatttgagttgaatccccccccttcttgaatcatactgtcctcagtattgggagtctgatgacttggtggagattcatcttcttggtggatggtgatagaattagcagtaccatagtcctttggattctggactgctttccgtggaagttgctaaggatgcttcggagcagaagttgatgcaaattgactctccacatacttgatttttgaattcagagtttcaaacttgagattcagatcgttgtaggaacaatcgatcttgttgtgtaattcagctatcttcttttcaaaagccatggctccagtagcttgtccttggatgatttgttgaatgagttgcttaattttaggatcttgagttgctggggcttgttgtggttgttgagtgaaccctggtggtggattctgctgttggtagcctccattaaattgttgtttagggacataaccttggttgtactgaacaaatgcttagactgattatgttgaggtggatacacttgatcttgggggttagcaacattagtgcttctgtaggagtgggcttgtagttgttgtagcccttgttaaatcctccttggttctgaatgtagtacagctcttcagtttaatcattcccccctttttgcatttggaagtgctcttcatcagtgatgtagtgtatctgcatctattgagccagcaacagcttgtctaagttttcattcagagccttgatatctttgctttgtttatcctcagttcctctagttcctctcattgagtgatcatagtcttcattgtagcacccatcagattgtgctagatttttgaccaactcccaaccttctacacatccttgttcaggaagttttcattggaggcagtgtcaagtagcattctgatctttcgtaaagctcctctgtagagtgtgctcaataatgcagcctttttgaaaccgtgatgggggcactgagtggtgtagcttttaaacctctcccaagcttcacagaaagttttattgtttttctggttgaaacctgagatctcgttcctcaatctagcggtgcgagcgttagagaaaaacttggcaagaaaagctttcttacaatcgtcccatgaggtgatggagtctgggggtagagtcttctcccagtggtgtgccttgtctcccaaagagaagggaaatagtctgagcttaaacatatcttcagtgacaccattaatcttggtaaggccacaaagcctatcaatgctgtcaagatggtctagggggtcttccataagtagaccatgaaacttgtttccttggatcatggagatgagaccactcttgatctcaaagttgttgttctgaacttgtggtggcactatcccttgtctttggtgatgatttcttggggcatcaccagcaccaatgttttttggttgatcaacattaggtgggtcttgaatatcaactggtctgtaagtggtctagaatgatttacaagggattttaaaaccttacaagagggtaaaacatgatttacaatcgttttcaaagcataagtaagtgacatagaatgatttacaagggattttaaaagctttttaaagggttaaacatgatttacaatcgtttttaaagtgtttactataaaacgtgtaataatagtctctacattgtcttttattcttacatgaattcaatgtgaacctgttaatagggaacttcgacgaaagggcaaagatcatgtaaaagaaccatacttttgggcgagggaaggagtatatactcttggtgatctcgaagatcgattgtttccaaaaactaaggaaggtgaacctgctgttgaaaatgaagaaaagctgtgtcttggtgcagtattgttgactgaaggaattctattcacaccatttgaaagagagaagatacctttgttaagattgcagcatgcttctgattttgagatgtacacagcccaaccatggggtaaagaagcattcagtgttctatcaaattcaattctgagaatggacgagaaaacttgggcaaaagatg

SEQ ID NO: 13319 - DNA, 3000 bp, Unknown
  misc_feature (1)..( 3000): cDNA_ID_3029368_gDNA_ID_2214616_Annot_ID_187545 3000 nt of promoter + ATG
agaaaaaacaagtgagtttttgttagtaagatagtgagtttttttaaaaatataacagtcattggtgacagttttgttgttgtaggccactatcaatcgcagaaaatattataaatacaaagtggtttacaagcctagagacgccagggaaagcaataacaacaacggtatgtctaaaaatccttgtaaaattggttttcgaagggattttaaaagcttttaaaagggtaaaacatgatttacaatcgcttttaaagcatcagtaagtggcatcgaatgatttataagggattttaaaagggggttacatggtttataaacggttttaagagattagaaagtggtaaagaatgattcacaagggaatttaaaaagtgtttacatggtttacaatcgtttttaaaggattagaaagtggtaaagaatgattaacaagagattttaaaaatttttaaaaggggtttacttgattaacaatcgtttaagaaacataagttagtggcataaaatgatttacaaggaattttaaaagcttttaaaagtgtttaacttgatttacaatcgttaaaaacatatgtaagtggcatagaatgatttacaaggtattttaaaaagggtttgcatggtttacaatcgtttttaaagagattttctaatatgataatttttttatttttgttgtgtttagcatgttgatgcagctttggagttattgaaaacgaggaaggaaagcaatccaaaaatcttcaaaaacaaaacagttgtatttgttggatcgtttttcgtaaatgcgattgatgagtcatacatggagtttttggattttaaagagggatttcagtttccatctgaagaaatctgtaagctgataatagaggaagataccaagtgcatattggctcctttctgtatcaaaggaaaatgttgggttgccttgctaatatacttggaacagaatacaatttgtatatgggaatatgcagcttcttatttaacagaagaagtcaagaaaaaatatgttggtgcctcctctatagctatgccatacattgttcggaacatcctcaaaaaaaaagacatcgatgtctctccatttagcatcaaagtcctgaccacttttcctcaggtaacttctttaatatatcatagtcctagaaatgaagattccttaagtcttgacctctttgctcaagtaattcttttggtttttcgtggtaggctcctagaaatgaagattccggtatatatatgttgaagtttatggagtgttactcaatgtataccaaccattcaaaccttgaaggaaacattatcggaaactcaaggaagaaattggctgttgacatcatcacagaattagggtcagtcactatgcaggagtagcagattcctaatcaaaaagtagtggagtataagatagatttagcagcttttgtttcttatttcataaaactttgtcatttgaatattttatgaacatctgtatggaacaaattttatgaagtttatttagtacaactcttggttaacacaattattgtataatggttgtttgggttaacaggtgctttgatttgaatggaaagggctttaaaatgttaaacatgctttttagcaggtttttttaatgatttactagctgtttaaaagaattttaaaagtgttgaaaaagatgcaatagctgttattatgaaaagatttacaaccgtttttaaaaggatttacaaccgttttcaagggtttttgttttgaaactacaccaataaatagattgatgtttgggtttgtggtttaatttatagatcctcacttaattgatgggttaccagttgattagagttggtttgaaaaagggtttattggtttctatttttggcggctgtgtgcttttcaaagatttaaaatttcaaaaaggtctttgaaaaggattatgaaggatttttaaaaatggttttacaaggggttttaaagtccttaaaacgacttgtaatgactgtgtttatgtttcgaaactacacatgcataatagatttacaatggtttttaaaacgatattcaaaattgtgttaatttaaagactgagttaatgtatttcatcaggttttgagaaaatgagtacgaagaaactgtacttccttaaaatgacttgtaatgactgtgtttatgtttcgaaactacacaagcacaatagatttacaatggtttttaaaacgatattcaaaattgtgttaatttaaagactgtgttaatgtatttcatcaggttttgagaaaatgagtacaaagaaactgtacttccctacaagactatttcaactaggcagagaaatagataatgttacaagggtatcaaagcattcatcaaacaaaattgtcttgaaggccagggaagcattaaagccgatagagtacaagacattaatggacacgttcttgggtcctgtagtggaattcgttgaatgcaatgacatagccttttcaagccatatcgtccatcatttactcaaaagaaggatactaaccagcaatgacgaattgtggtttttatttgctgatcaacctatgtgattctccctgaaagagtttatcataacaacataacttccaatagatgatgcatcaggaagcagtccaaatgtgaagagaagaagatagaaaagtggtagatagaagataatcagactttgaagaaaagcagaaaaaagatttgtggattaatgataaaatgtgatttgtcgatcttacatccaaaaaaatgctgccagaaggagagaatgagattggggggtttgttactagtggaggggatattgctagctcaaaatccgactaccttgctgccaattgagaatctgcagagagctagtgatttcgaaaagttctgcaagtatcgatgggcgcagattgtttactcatatttggtaactgaagtgaagaaattcaatattgacactttgttaaggaaacaatatagtcgatttgtttctacaattcacatatg

SEQ ID NO: 13320 - DNA, 3000 bp, Unknown
  misc_feature (1)..( 3000): cDNA_ID_3029350_gDNA_ID_2214616_Annot_ID_187551 3000 nt of promoter + ATG
caggaaaggaagctaaccacaggtctgactctcgggagtctcagagacgtagttgtttattgaaacgttctctagtcccgcctgctaaaaacccaagtccaaaggacaaggatggcgccactagcactcctaggtctcgaagaccagctctacaacatattgtgcagttaccagttcaaacttgggaaggttacaagaagtagtcttctagtatgcacgggagcctagtcatccatctcctccttctagaccctctccgctttctgattctcatcacaccctcgctgttcaggaaagtagagttgtggataatagagtgcatacttccctcagaatgggacctcagttggattctatcacaattacggttcccgaggaaatgtcaaatacaagagcttcagggaaaagaaatactccaaatcaaaaaccaaagccaccacaaaagattggaccaaaacaaaagcctggaccaaaaccaagagtaattcgtagtccctccaaggggtaagcctaagaaagcagaaggcaaccactacttgggcctcttcctccaggaaaaagctccacgttgataatatacctgactttcaggatggcgaggcagctgtggcccttctgcaccgcgtatactgcctataatccctgctattaacagagcctcggtggattttcaaattccaccaaacactcttccttagctattgtagcttggaacttccaagggttgggaagcaccctaacagttcctagattaaaggaaattcgacgcagtctgtttcgtgatatcttttttctcatggagaccaaaaatcaagatgacttcattattaaatcttttgaggggatgggttatcacagcatgtttactatacctcctctagggttaagcgggggtttagctctcttctggaaagatggagactgcccacatcatggtttcagtgaggtacaactctttggtaccttcttcagatgagtcgattggagataccagatggctctagatgcagcgagtaatggtaacttcaacaccgttacccagctgatgctacagctctaatagagaacctcgcttgcagcaaaagtgattataggtttttagtcaattatcctaaaacaccaatcatgtcgttgtggtattttaggttgtcaatccaaatagatgtgatgctaacaatcaagatgtgatcagaagtcactaagtcaagccaagcaataacagggtttggtgtgttctagcagtcctaagtgaacatgcagaaaacagaaaatcaagcagaaacagtaaaacactcgaccaacacagctcattgttgagcactgggtgtggtcgagtgacaggtcgagtaataaatagaaaatataacaggaatactcgactgcacagtgtgttgccagacaactgggtggtcgagtacgaggtcgagtaataggagagaaatgcaaattctaagcaaaaggtaacaagatgaagtaaacgatagtagagtaaagaattaaatcaatcagataaagaattcccgaggatggggtaattgagtagtttcgtttcctcagtttataggtgattgacatgctcaatacaacaagttcattaaccaaatctaagtgccaccgcaacagagaccctcaagttaaactagtcccagactcaatcaccactgacgagagctaagctaacaggcattacgaatcaacaagttaaagccaaaacgaaccctgcaaccaataccttggtatagagccacgaatctctggaattagtggttcaaacatttcatcgaacaccttttgggcgcggaaatgtctgggctcaaattccagttgatcagaaagcaataggcattaagaacaactaattgaagggatctatcaatcaaactcaaccacctagcataccgagaattctaaacttctctaacccatcctaggaaacctattcactactcagacatcattgcaaagaacataaacgttgaatagaatgaaaacatgataacaacagagtaatagcaagatgataacaggatgaacaacagtaaacgaaatcaaaagcgaatgctgaataccgaataaattaagagaaatccggattacaaaaagtcaagaacacagtgtctgcggaataaaacttagataaacgaaaatataaagtacatgctacttatagcgaaatattccaaaaccctaatactcaaaacgacgtagtattacgacggattaagaacggcactcgacccaggtggtcgagtgagtggtcgagtgataagctggagtcttcttttcttccttctgctcgagtgtctggttgagtgcaaaatggagaagactctgaagctggcagtcgagtatgtagtcgagtgatagggatggtggtactcggcttggtggtagagtgatcgagtgaaggtgatgaaggtactcgaccacgtggttgagtagtgtgatcgagtgaaggtgatgtggtggacgtgatgatactcgaccagggggtcgagtaatgtgatcgagtggttgtccaggtggtactcgaccatggggtcgagtggtgacgtgaagtgctgaggtcttctactcgaccacggggtcgagtggtctgttgatgtcgtgaggcatctacttgactagggggtcgagtggtttgacatgatcaggtccgcttcttccaattagctggtcaacagctccaaatcacctgaaatcaacacaaatatgcaacatgcatgcaaaactatcctaaacatgcaaaacacttgtgatatgatgcaatagtgataacaaattgatgctcaaaacatgtaaaatacacacttatcaaacagtaccaagaatgctgacttttagagtaagaagattgatggagccatttcaggcaatcagatagcagaggtgaatgctaaggtggattcagttcataacttgcttacagggaagaagcatgtccactttgcagctgaggaggaaattattgagcctgagcctgagtcaggaagtacatag

SEQ ID NO: 13321 - DNA, 3000 bp, Unknown
  misc_feature (1)..( 3000): cDNA_ID_2713437_gDNA_ID_2214616_Annot_ID_135813 3000 nt of promoter + ATG
tctatcgtttctaatataaagaggatgagattgtattgttctagaagtggagacttgcttataactaagcttcaaagaattggttgaactatctattcgaaaattctctacaagaatatcaaccaatgcgtgataggtaatgtgctcatcaatgagcactaaagaagctcccatttcaatgtctaattcaaattcccaagtcatattgtttgtcaacttccacaaaccacaaacagaatactattctatcattataacctgataagataaataacaacaaaatcaatacccacaaacattgtcactacagagagaagcatggtttacaattatttttaaagcataagtaagtggcatataatgatttacaaggaattttaaaagctttgaaaatgggttaacatgatttacaatcatttttaaagcataagtaagtggcatagaatgatttacaaggaattttaaaagctttgaaaaggggttaacatggtttacaatcgtttttaaagcataagtaagtggcatataatgatttacaaggaattttaaaagctttgaaaagtggttaacatggtttacaatcgttttaaagcataagtaaatggcatagacctatcacgaaagcgtaagtaaaggggtaaacactaaatcaaaaccaaaatttatcacggaacaatataacgaattcaaatctatcacaaaacagtataacgaattcaaaaggaattaacgaattcacataatcaaccccaaaatcgaaagcaaaatagtagaatttacaaggattttaaaaacaattcaatcattaaatctcaaacaaaattcaaattcgaagcatcaacaaatgtcaaattgtcgattgaatcaatatcacgaatcacataagcaacaacaaaatcgaaaacgagacatttaggctaaaattacaaattcgaaatcgattccatgagagaaaaacaaacatggggaaaacaagagattgaaatgaagactgagacggtgaaatcgataacacgaatccgacaatctccgacggccacgacgcaatgcgacagcgacaattaaaacaatctccgacggcgatgacagacgaagaatacatatgacatcaattgaaattagatcgattagtctctgtagttcactaagggtattttggggataaaataattaggtggggtagaaataaaaatggctaaaaaatgggtaaagtttaaaaggagcatcatgaaaagggcattagaaagaattttacataattatataataaaatatgttttccttataaaaatggtttctatcactaactctttaaccatcaacaacctactattttattaaatgacattgttttttccttagattcttattggatatctcttctaagtcgttaatattcattttctttatttttgaattagtatttattttgcatttttctctaaactacaatatgttgttgtatgtttgtctttgtttgaggttagtatattttttactcatcgctatttgccaattttcataattattttgaatcaatggtggagtatttattaagatattagtttgtttagtgacaaagtatgagataatatatttttttacaaatgtgagtacttacaatttgttttcttataggattaacaactgattgtataatttttttaatcctttttctatttttcatatttttcttgtttagttagtaacttataattaaaacatttagattaattttctaaattctatagttttagaaaataaacatataattttattatatataagtatagtttccttataataatctttttatattcttcaaactgtttaaattgtataattttgttgtaattatttttttataattttttaattgttaaatacaaaacttttgtttgcgacataacaaaaatctcctatgaaaatataggtattaaaattgcattgatagatttgaaatttcgtgttttttttagttgaaatttatcctcttaattatatgattttaatttttacttattttgaaaatctgtacttttcattttttatgcatatatcaaaatagagaagcatttccatatgtacatgtgtgaaatctcattaataaatggacataactttatacttttattttttataatattttttattttttataatgcatagtttcattataattatcctctatcttttataatattgttctaaaaaatttattttttatacatgtcaaaatctaagatctctaaaattgacccgtgttataatctcctgagttactatcaaaaccgtactttgtataataagatccctttaggtagacaaatatttgtacttttttatgttagtatccaacattatattttgttgcctaaactgaacattattaaattgttaattataagatttcacctatagtataccttcccgtattaatatcgatccaaactcgtcccaccatataactatacaacactggttatttagaatttcgattgccctttaaggataacaaaagaaagaaacaacaaatgttgttttcaaatagatattccaaaaccttgtctagattaattaaaatggtatgaattttttatttatttaattacttttacatattaattattctacacaatttatgaaatactaattgttttttctttagtatgtgcaggttgacccattaacgatccgatccaacgcttcttcacctgaaaatttgcttggattctcttcgtttaaaaacaataccaaataaacaaacttttgcctgatgaaatcaatgaccgatcttggatgcaagtttaaagagtctttcctcatcgttcgttcagtttcttaatcgcttctttgtattttcaaattcgattgatattctgtaaattccctcattttggtcaattgctttaatgtaacttcaaatttgagttttttcattctcttcaaactctgtttttaatggatttgatatggtgaaggagaatacactaaacatgg

SEQ ID NO: 13322 - DNA, 3000 bp, Unknown
  misc_feature (1)..( 3000): cDNA_ID_3029433_gDNA_ID_2214616_Annot_ID_187524 3000 nt of promoter + ATG
gatgtaaaaggtcaccttttagctgtagttggaagagatggagataagaggattgttcctatagcttgggcagttgttgagatagaaaacaatgataattgggactggtttttgagacagctctctactagtttgggactgtgaaatgcaacatctagttatcatttcagataaataatcagttaattttatcatcttttgcttcagtttaatgtcttttatgaagggtttacgcttatgtttttgtgttattttacagggtctagtcaaagctatcaataccatacttccagaagttgagcatcgacaatattcaaggcatataatggacaattggaagagagacaaccatgagatagaactacaatgtctctttgaaaaacaatttgaagctacactgaagaagtgttcatgaataatatggaagagctaaagagatacaatcctcatgcgcatgccactcgcaacttactagtccaatgacatggtcgagagccttctttagaattggacacgttgcaatgacagcctcaataatcagtgtgagtcttttaataagactattaaacaggctaggagaaagcctttgttggattagctagagtacatccagaggtaatgcatggtcataactacgaagacgtatatcattgctgacaaattgaagacaaggttcacaaagagagcccatcttgagattgagaaaatgatagttggggttagaaattgcgagagatatatgtccagaaacaatttgtatcaaattgatgtgaatggtgttagctactatgttgatacggagaagagaacttgtggtcgcaggaagtggtagatggtggggatcccatgtatttatgcgacacctgtgataataggaagaagagaaacagttgcagactatgtgagcaagttttacacaaaggtaatctggcgaaaaacttataaagatggtattagccttgtccaaggtatgccattgtggcctaaaaccaataggctccctgttttgccaccaccatggacaaaaggaaatgttggaagaccgagtaattatgttaggagaaaaggaagaaatgagacttcttcttcttcaaataagaacaagatgccactgcaaaagagaatcatgacatgctctaactgccttcaacaagggcaaacaagcaaagctgcaaaaatgccactattctgattccaccaaagagaccaagaggtcatccacgaataaatcaggtttgtattcttgtttttttttatatgttttacaactcacttaatcatgcaactgttcagactgtcatatttaacttaggaggaatcacaagtgctaagatcacaacctcatcaaagttcacaatctcattaaggatcacgatctcaagtgctcgaatcgcaagagcaaatacacggatcacaacctcatcaaggatcacaatctcatattcgatcacaaggaccaagggcaacaggcggaacatcagaaagaccaagggagacaggtggagcatcacaagtacaatcccaaacagaaccacaagcacaagcacaaactgagccacatgctcaaccacaaggacttggtggatttgcatcatggtttgagtgttcaagacaagattagtcacaagtttctttttgttgttgtttgaacttaagctttctcataagtttatttttggtggttgacataatggatttgtctttatgacataagcttagtatcgatttcattttgtggtttcgacttgtctttgtgacacaagttttataatgtatgaatgagtttcattttggtgattctcattgttaaacaagcatctagtagcatttcattacaatcacaacactaagacaaaacactaggactgattatcattgccaaacaaacatttcagtaccataaaaacattttattacaaacacaaaacactagtaaccaagaacaagcttatggtttttggtcttatagaacattatgatcataattgcaatgactgttatacaaaggcacaccaagcacaatttggtcatcgatttccatatcttcaattccattttgctccacatttcatcttccttcaattcttggatcaaaacctttaattctgcaatctcgactacaacctgaaatttgacattgtttatctagctatcaatcatagagattatcagtattgcatctacaacctcttcatacacacaatcttcgactcacttaaacaaatggtcctgcatttacaacgacaactttttaccgatcaaacaccaaaaaaaacaaattcaaatctacttacatcttgatatgttggacaacagaagaaggatcttcttgggttcttcgtcgagcttgatatatagatgatgaaatctctcccccaatgacactttgaaggaaacccaaggttcccacttcctccttcttgaacactcaaattttttaaactcatatctacacaaaatggagattttgagctcaaaaaaaatatatcgagaatagttcaaattttggggattatgaagaattagggaatgaaaaatcgatttgggaattttaaggtttgtactcatcacaaaaaatcgtttggtattaacggaagacgactaacgtctgctaacgagggttatcagatccgttaatacaagttaacatttcggaaattttggccaggcaaactttatgttttgtttaaatagcggatcaacatttttatcatattttatttgatcgatctaaaagtttacatataaaatgaccattcttaaaaacatcacgtataaaacgatattttcccgttttaaaaagtaggttttgtttccgtttattttgtataattattgttcgtttatttcacgtttgggaaggtatcaaaacgaacaaacaacaaacggtgcgttttggaaaggtattaaaacgtaccgtttcttctctcttgctattcgtaaccccgtgcaaaaaaaactgaaaaccccaaatccaacctctctcactcaaaaaccatg

SEQ ID NO: 13323 - DNA, 3000 bp, Unknown
  misc_feature (1)..( 3000): cDNA_ID_2702687_gDNA_ID_2214617_Annot_ID_135822 3000 nt of promoter + ATG
atccaaccttatttaaaaatcaaaataaatagaaaccaactaaaaacacttaacctaatcctaatataacatagcctttccattactttgctaactcaaccacaaaacataactcccttatccttttttcatgctgcttcttcttctttttctggatttgttttattttttattttttatcctacatttccttttttccatcatcatcatcaacaaaactttagatctcttcgcgtttctcatcgacctttgttcttgtcttcttctccatcaccatagcttcacatatgtgagatccaacgacaaccttgatctagatttaaggttttgttgtagaatcggcaatagtaatagagataaagaaaggtcatcaaattacagtgacaggcgataatcagtaacgctgatagaaaaataacagtgctatggtttaggaattataagttgtttcagtacttaggccaagtcaaacgtcacgggaaaacgttaaaataacgtgggcatgtttactttttcactccaatcagacagtataatttgcactataatagtgtggttctctttttttgtacagtgtaacactatatttggtgtactactgtagccacgacaaatattaaaataataatttttcttttgtgttaacattattatatattaaaatagcttatttagttacaatagattatatatgatttgtaatgagatttaagtaatctaattaaggcttgtaactaaaaaataatttataagtactattttgtaatctttaatttaataaaatgatggattagtagaaaatattaaaactaatacagaagttgattgaaaatacaataaaataaattatacattgataacataattaaaaaattaaaaccacacaaacataaaaaccaaatgcaacaagataggttttaaaaacataacaaaagcttgacaaatggttaaggaaaaatattttcggttccgctaagataattataatattgggtaaaatcttcttggttatttggtgatctttggtcttcaccttgatccggttctccttgaacttgttttccatgagatggactttcttgataatgagatgctcgatattgagatccatgatattgagagccttcaccatcttcttcatgttggtttgtttgtgctcttttttccaaaattctttttctctcattttcaatatatgcacgagaggatggatcacttatagaattcaaatctgcaaataatattttattctcttctttcattctatctacctcgatcttctgcctttgaatttcatttctttcagaagtacctttagtaatagctttgataagtttatcattttgctccaaaagttgttttagctttgttttttttaaacccataggtcttgaagataaactaaaattggcatcttcactatccatatttagatcaattgaattcataccaggggaaggtgatgactcggtattgattaaaaatgatgaagatgacgtaacatcacgaccttatccttggaatgcagcgggtgtcatcatgttatcattagcaaatttctcaatacctttaagaataggccatacatgatcaaatttgaatcctctcttgtatttttcatattgagttaataacatctttgcttggtttaactaattacatattgataagaaacaaataaaaataagttagcatgtgcaaataatttaataaagataagttagtaagcacaagaatttataattgagtacttataatatcttctttggaagcaccgctaggatttttattctcaatttggttaacgcatcctctcagctttgagactgcagaaagaattgacgtcattcgagtttgtaaagatctttttggtcttcgttgaagacgaaaaggatcggatttatgatactcagcttcaactcttgtccatagttgatctcctgattggtttatttctattattggattttgggaaacatcaagatacacacgacacaattgtatatcttcttaaatagaatatgacaaagagcgacttgaactcatttttgaaaaatataagaagtaagaaaaagagttggagatgtgtgattattcatagagtagtatacatttatatagagaatagaaagcaataccaacggttagatcttggtaaattcaacggtcaagattaacttatttttttctaaagaagtgatacttgatatagacatgaaatgactaatcaatgcagtggtaagatcttgatcaaagaaattcaacggctaagatgaactcgtctttttctcatgaggtgataattgatttgcgatatgaaatgactaatcaatgcaacggttagattctcttcaaaaaaaattcaatggctaagatgaactcatctttttctcatgaggtgaccattgataaaagacatgaaatgactaatcagtgcaacggttagatcttggtcaaacaaaattcaacggttaagatcaatttgtctttttctgataagatgaatatatcaattccatgcttttctatataatgggcaatatgtttagaactaaaataaatatcactatcatcttctatttcttctcatagaagatgagttttaactacggtagtttatcttatattccgtcttctttttcttcttcttcttcttcagataataattattacgatgatatagaaaagcaagtggtatctcaaattactactaacaataattttctttgctctcaacacctatataactcagaaggttcgcatggtggatctattcatggtcatgtagttatcaatcgtgatcgagaaaatgttgctcgcaatcttttcatagattattttgcagagaaacctgtgtttcctgagacaatgtttcgacgaagattccggatgagtcgttctttgtttcttcgtatttatgatgctataaaaagacatgacaattacttcgtccaaagaagagatggagtcggtaaacttggcttgtctggtttgcaaaaa

SEQ ID NO: 13324 - DNA, 3000 bp, Unknown
  misc_feature (1)..( 3000): cDNA_ID_3029439_gDNA_ID_2214617_Annot_ID_187573 3000 nt of promoter + ATG
aagtagtggatctgattgttcatagagtagaagactataaaaatcttaccagtttaacaaagagttacttcgctgccttaaccgatcgcatgttgcttttgttatttcattttttgagtcctttgaaaatattggaagtgtaagcagtaaaagttaaataacattttaagtatcaatttcagttattgttagtgtgtatatcgtattgttttcttatgcaggaggtttacataccactgcccaaagaattagaccatatgtctgtttaagtttaccagcttcttagatgttttggtatgataaatggtcttcatttttgggaagcacaagatctcaaggggaaataacgaggagtggaaagttacattaaaatgatatggatttctaatttatatctcactcattgagataaaagagtttcattgtacgcccgaaaaacctaagttgaagttcaagcttattattattgttgatcagattttgtacaaaagttacgttaaagccagcagggatcattgtagaatggatctatgatttatcttgttgtagatttgaacaaatttatggcgatttgaattatttttttcaattaccgttttaatttctattttttttatatataaaaatattgattagttagtttttaggcaaaaatattagtaacaaagattttccttaccattccaatctgtaatggctttgattaagttgtaaattaaaaatttgaagtagattttctatttttttgaaagattttatctattatattgtatatataaaatttgtttaatgattggtttatttatcttgctatatttgttctatttataattcagttagagatcaaatagtgatttgatacctttttaattttctgaatttttgataaatatagatttgttagttttaggcaatatttaataaaacggtttgattacgttttttgataaatatatctttattgttttttattacgttgaatcagatttttatttttgttgtaagatatcgtcaatgattttatcagaaaaggtagttttaagattgatttaatggtcttgctctatttgttatattttataattcggttagagataaaataatgatttgatttgtcctctttataattgtccatgatgacttatttcagattcatagttagcacaaaactttgaacttttttgcctatataagaacaaatcaaacaagaacaccatctatatttgctagataaaaataaaaaaccaacagtggcgacttgaacatcagagacaaaagaacgacctcgatttaatcaaattgtgggtaaaataactttcaaaattgacccatttaaaacagatggtcatgatataaaaacgggaaaaatgtcgtttaatcccccaactttccaaaaatggccaatcaatacgtcaattttgtaggaggccatttaaaacatcaacttacaattgactaacatttaaaacacgaactttgcgttgactaggcctaataagaccgacgttaaatcgattaacagatccattagacgacgttaagaactgttatcatctctctgttagtgaagaaacgacgacgttttaaagcttaatagataacccgattgtttgtcgaaaatccccaaatcaaatacttcaaatccctaattccctaattctcttcttcttctctaaattctccatcaaaagctgaagaaatgagttgcaaatctgggaattctaactaatggcatccacgaacacactttcaagatcgttggagataaattagggtttgtttttgatttggggatgaattcgatttgaggatttcttctcgacaaatccctaattgggttatcaattacgcctaaaacgtcgtcgtttcttcacaaacagagagatgataacggttcttaacctcgtctaatggatctgttaattgatttaacgtcgtgttttattaggcctagtcaacgcaaagttcatgttttaaatgttagtcaactgtaagttgatgttttaaatggcctcctacgaagttgacgtattgattggccattttttgaaagttgggggattaaacaacatttttcccatttaaaaactggccaaaaaccaatgactaagattttatttgatcatcgggtcaaaactcacaagtatcgggttaggcaaccccctcgttcttcaaataaaattatttaaatgaggtttgatatcctaaaacgtttataaatttgattataaaactttagcatttgcccatatgtttgcaaattcattaagacattaaattcaattgtaacaattatttgcaaatgaataatcaacgtaatccacatatttataattttatatgcaaaataatcaaatacaaaatattttaacaacttacattattattagtatattaaaaatataataatattgtctaccacataactataactattttaaaaaaaaatcttaaacaaacttaaaaacagatttttttttatccaacactgtattatgaaagattaaataaaattgtgtactacacaacaacaccaacaattatctaactaaaataaatatttaacaagaataaaataaaaatgtattttttctactacaataacatctagtaaaatataaattcacaatttcgaatctgaaaaaaacattaattattatctagtaaaataaattagtcttacagtcacaataaatcacttacctcacttttagaaaaatagaactttaaaagttgagataagtatctaatggcccagcctcggcccatttacccaattctggatccggatattatcagcatcactttcgtttttttgcaagtagcagagcattctccatgtttgagaaacccaaagttccaaattccaaaattggtcaaagctcgataacgtgtgtattgcttctcttagtcaatggtgatttcgattcattgactgggtttaaaaaccttgctagttctcaattctcatgactttgcttttagtcttagaagtggaaa

SEQ ID NO: 13325 - DNA, 3000 bp, Unknown
  misc_feature (1)..( 3000): cDNA_ID_3029443_gDNA_ID_2214617_Annot_ID_187572 3000 nt of promoter + ATG
ttaaatacttacaattctttttctaaaagttaaaaaatgcttgtaaagactttataagagttttaaatggatttacaaatgtttaaaatccttttcaaactcttgaaaaactcttgtaaatcatgttttacccttttataagcttttaaaatccttgtaaatcattctataccacttacttatcttttaaaaacaattgtaaactatgcaaaccttttttaaaatcccttgtaaatcattctttgacacttacttatgttttaaaaacgattgtaaatcatgttaaacacttttaaaatcccttgtaaatcattctatgccacttacttatgctttaaaaacgattgtaaatcatgttttacccttttataagcttttaaaatcccttgtaaaccattccaatgtcacttacttatacttaaaaaaacattgtagaccatgctaaccatttttaaaaatccttgtaaatcgttctatgccacttacttaggctttaaaaatgatagtaaatcatgttttacccttttataagtttttaaaattccttgtaaatcattcaatgtcacttacttatgctaaaaaacgattgtaaaccatgctaacactttttaaatcccttgtaaatcattctatgccacttacttatgctttaaaacgattgtaaatcatgttttacccttttataagtttttaaaatcccttgtaaatcattcaatgtcacttacttatgcttaaaaaacgattgtaaatcttgtaaaactattgtaaaaagttttaaaatgatttacaaaggtttaaaaggcggtttaaaagtatttatctatgtttttaaagactttataaagattttaagaggttttaaaatgatttacaagggtttttggcaactaccaaagcttttaaaaaatttacaaggatttttaaaagcatttttttggttgggaaaaaaaatttacgagaaaaattttggcaggaaattttttttttggcgggaaagttttttttttggtgggaaaaaaggtttggcggaaacttttttttggcgggaaaaataaatttggcgggaaactttcagtttccaattacatgttcttattagatgagggtaatttggtcattctgttcaagggaaatgatatttttaaaaataaacaatataaaagggtattgttgcaaaagagtagtaaaaaaagggtaattttgaaaatctcccatatttttgacccaaatttattcaaaagtgattagatacctataaatattataaatatcacaaaatttatatattttgacacaaattattacaaatataaatattaataataatatattattaatatttatattgtggatatgtacagaaacccgttggaatcggatttgggtttattttttttggatttggaataaaactgggtattttgaaaatttgggttcgggttggatcaggttattattggattcggatcgggtgttgggtttggatattatgcccagcaatggtgagtactcctctcgccatcatcagtctttactctgttccaagtcttccttctttggctcaaatggggtccacgatcatcaatccaaatagattcgactttttgttctggggtttcgtcgagaattcgatttttgggtttctttcgaaacttggtcaaatgtcgaatacgcgttacaaagaacaaacctttctctttatttcgtttgtcttcgtcaacggctgaatcaaccaaatggtccctggaattaataaacctctaataataatggctttgcttttactctgatgacaagttcaaaaatggaacaaagatcactcctttgcttcctttatctgctcctactattcaatttcactctcagagtcgctggaaacgctgaaggttcttcctttttctgctactctcatgaaaagtcccttcctttttggtggttgttagatttcgaaagttcataactttttttgtttgtttgctggtttggattatgaatatgtgtacaggtgatgctttgactcagctgaaaaacagtttgtcatcaggtgaccctgcaaacaatgtactccaaagctgggatgctactcttgttactccatgtacttggtttcatgttacttgcaatcctgagaataaagttactcgtgtgtatgtttctctctctctgtcttcttttttgctctctgtgctggttttgtctgaatgaatggttcaataatccctttgggaatctactgtttgatgtttgcttagtgaccttgggaatgcaaaactatctggaaagttggttccagaacttggtcagcttttaaacttgcagtacttgtaagccatctcttcctcaatgtcgattaattctatagtgttcaagatggacttgaatttgttatgcatatcatatgcttcatcttacttgtttaatgactgtgacatagttgtgtttttgctttcaaaagagaattgtggataaacaatttttttctcagagtagaaaactatgtgtgtgcgctctcttgtggttgatgcatctgaaatatatatatatatgtcgatttatttttgatatcgttggtaatcaccaatcagtgccattttagatctctttagctaggcttctcgagccttgttactggaatcctttataatcatctttcagctagaaccatggcattatgaaagacattttattttttgaattctctatgtcaaatgttctcatttaactctattagataagtaactggagagtttggatctggtatttctctacaggtgatctcaactctacatatttgtgttgcggctgcaaaatgtttttttgaaaatattgcttacaaatatagtttccacgttcatgtatcttagctgtctacgattattatagttcttcatattaatgggtatcttgtttattacatacttcattatgttttctgtagcctgaatttctggtaaaataattttagagattttccaatcgacaataattaagcaaagctta

SEQ ID NO: 13326 - DNA, 3000 bp, Unknown; identical to SEQ ID NO: 13325
  misc_feature (1)..( 3000): cDNA_ID_2702694_gDNA_ID_2214617_Annot_ID_135824 3000 nt of promoter + ATG

SEQ ID NO: 13327 - DNA, 3000 bp, Unknown; identical to SEQ ID NO: 13324
  misc_feature (1)..( 3000): cDNA_ID_2702690_gDNA_ID_2214617_Annot_ID_135825 3000 nt of promoter + ATG

SEQ ID NO: 13328 - DNA, 3000 bp, Unknown
  misc_feature (1)..( 3000): cDNA_ID_2713486_gDNA_ID_2214618_Annot_ID_135829 3000 nt of promoter + ATG
aatttgtattgttttaatgtacatgcagaaggataaaacaatattgatgaatgagaagaaggaaatcacgattcaaattgaatcattggagcaacaggcccaacttcgtgatggtacgttatcttaatttctatcaatactctagcaaatcttttagttttgcaatctatagtaaaagtttgagttttatgggttaaagttgttattaattacgtaattgcatgaactttgtttatgacatcacccttaaagtaatatctcatttagaaacagctttatttattctagacattccacttattttgcagttagcatgatagtacttacaacaccaagatattctttatgtgcagtaatttcaatttagtaaaatagatgtaaaatatattgcataaaaaaaaattaaaaacaaattacgcgcgttcattctagattcgttaacgttttttgatatacagagatttaatggtaatgtgtaggatgtaaaataatttattattgcaatgtataaacgtttatacaaaacattttgggatgaatgtaactatcaaacgtttgttttcatttctctattgttgcagctttgactgaaaaattgcacgtagaaattgaaaggctaaaagtaataactatttcgaacgaaaaagggagtgtagaattacaaaggctcaaaatggaaacatgtgaagtattacagtaccgtcgcgagtttgacagatcaaacatgcaaggaatggacccaaacatgttcacttggtctcagccaaaccttggtttttatggacagatttaaggaagctgtggtaactttgacaattccatgggatcaatgattgaagttatagtcctttacaatgtattagtttatataatttatgttcatgttgagagtaaaaatgatagtaactgtgtgaggcttccttcagacgatatatccttttaatttcttatttctatatcaatttatgttatttttccataaaattatgtctcgttttctttaactacatgtccaatactcgcccatacatgtcaatcctacttgttcttttcagctttctttaatttaacttaatcggtttctttaacttaatcagagttgatattgttactttatatgtaaattaaccatggaattatttattctctttgtcaaacattcatatctgaattagttttcttaatctatttgtcttattcaatatgtcaaaacactataactacattgcctattcagtacgaatagattctttagatatgattaattcatagttaatttacatataaagtaacaatatcaacactgatttttttcagtcaattataaactatagtcacatttacatatataaagtgacactaaaaaaaattatgtgacttctaactaccgaatttccatatctggttgcaatgggaaatttaaatattaaagatctgtaagtttttagaaattacattagatgtcatagactataaagtatcgacgagtaattaaagggattcaagaaaaaaaaaaaatgtcaaattagacatggaagaaaatgtgcattttaggttttactcttattcgatttggagagtattcagatcatataatcttcaatcttctatcttctattaacgcagccttagatgcttcaattgtgaattatagtattgaagaaaaggtttttacctatggttccggtattacagatcaatcttactacactaatacaatatacaaataggaggcataggggaagaagcactacgccgagaaatcaacaacacaaaaactttcttaaaaatgattccctttctttcttcttctttgttgggattgggactaatcaaaatggttggaacaataaacatccatctcgttcgtactttggatacccgtataaccattgaagaatgttgaagggacaacaaacacgaatcatataactttaacttgttattagttaaaataatgtgatgtgcatcatcaagataatagccaattacaaatcatctatatgaaaataggctatctcttatcatatacttgacaagtcaaaacatgagaacttgccatgtgtcaacataaattaaaaataaatagacagagtcttctcatttaaccctacctagcaaaacaagtttgactatctgtttggttgagggaatatgaaacatcttccatgtcttttattctcttcatgtcgcaagcaatataaggatttacgtaagcgatttagagagacttagcacatgtctgatgtattcactaataaagaagatgcatcaccaaaaaataagaaggaatcaagagtgacaccgtaaagaatcgcttcttcctcttgacgtaaaccatgaagatatggtttcaggctttacaaatttctctttacacttctgaagccctatttggctactccgggatcaaaaatcgaatcgaaaacaaaaaataataattacaattagatgcatatgaaacataatgatgtagttgaaaattaggataaaacttacttgtttttgctgctcactaagtaactctctacaacgcggtgtagttgtgagagtcgaaatcaacacaatggaaattgtatcttagggttcttacaaagaaacagtcttcgcgagaatctcaaagaacaacagaatcggtaagtaaccacggatggtgttcttgatattattgataagaaacgatgatttgatcgtacaagtgtttagaaaagtaaagaataagtgtttttagccttcaaagtcatagcgttttgatagcctgaagttgagagcctttttctgtgtaccctttttgcgaagtccttgaggcgccttatataggtcttcgcaataaggagattttccttatatttcgggagctttagaaaaacttccagatttgacaatatcctcgaagattcttcattatcatttttgggtttttcggaaatggtctttggatcctttttataacatgtgcaagtctttgcttcgggcctagtgaccgcctcctcctatgag

SEQ ID NO: 13329 - DNA, 3000 bp, Unknown
  misc_feature (1)..( 3000): cDNA_ID_2713482_gDNA_ID_2214618_Annot_ID_135830 3000 nt of promoter + ATG
ctttccccttatgcatgatgcaatgcaaatgcagttagagaaataatgaatagggagttgcgatcacgtatcagtaatcgccctgaagttctcggcatcgttagcttcctcggacagctcataaactcgcggtgccacggcctgccgcttagggggaggtggcaacccattacccccgcgattgtccctttgtccggcctgcttcttcgcagtaagcttatggcactcccgctttagatgtccaaccttcccgcaatagaaacaagtccttgtctcttcaccgagaaccttggactgtcctagttccattctcgggcagctttggatcgcatggtccttgcttccacaccggccacatacacctatggccttccagcaagttccgctgtggctcttaccacatgtcacacattccctggtcttagcatcggacttggtgttatccaccttgtcaaatttccttttcttatccgcgggtttggtgtgctgattgttccggatcagagctttctcccgattcaagtacctttcttactcgatcccttcctcaatcattgttgccctttcaaccgattcggaaaccaagttgaatgtccggaccaaacaatggttgcggatctctattcttagtccgcggataaatcggcgcaccaaggcttgttcctcctcaagtttgcgtcccacataacgcctaaggcggttaaactcctcatcatattcacgtaccgtgcggttcccttgaactaggtcgaggtacgcacattcaagcctatcccaagcctccggtggaaagtacttcttgttaaactcgtcttcgaaatccgcaaaggaccggacctcgtcccctctgcattttttgacgcttaaccaccaattatgggcgtctccttcaaggaagtggactgcaatgtccctttggtaatcctcagggcagcgagtagacttgaatttcctcttgagtctactcctccactcatcggccacaatcgtattcgtattccccatgaaatgtctcgtgcctagccttgagacatgttcgagaaggctcagatagtctcccctttttcgctcatgattcacatccacaacttctgagtcatcatcctgttggttatccaccctttaaaccaccagatccgctacaacggccttggttaatgtggctagttgcgccatcattcctttcatcaaatcccactgttcttgggtcgttgaagtattgttccggttatccgtgttatcccttgcatcgctactttccggtgcttcctcatttatagacttcttcccggcctcatgtccggccgagtctgtctcatcaagcattgtcccgactctggttttcttgttgatcattgtttcctcctcaaccaaagtctccttaacaatgcccttgtccttcttgctctttcccgttttgctgctcttactcatctgcgaaaccttcaaagttaatccacataactcatagtaaaatcgcaaaagagtaaagaacaactaccgcgagattctcaagtcaacgagtggtgataccccttaacccaacacctagtcctagaaccaagcatgctctgataccaacttgaaaggccccgatctagactgcctaagtccggacgagatctcccgccccaagccactaagtgactcggccttaaccgtttatgaggttcattcctagtgtaatccgttttatatgattctatgattcaatatatgagacgaatagagtaaacaacttatgagtttgcatataagctattacaagtcatataatcgatccctagactatccgaactatcaccacccatcatcacgaccttgagtctctcgcgcctaagccaagtccttcccacgatcaccattcgttcctgaaagtcatagagccataagtaatctcatttacttagtcatatgcaagtccatgcaatgctctataggccatacattactcggatccgtagagaggattcggagaggggaagatcgcacatcagtccaaccgatttccagtaggtcaattaagacccgccgaatcaacacatccgttccttgcatctttccgaagagttgtatatcttcgcccgtaactgctcgcccttatccaccctttgggcaagtaaccgttcgaccataactgcccaagtaaccgtctggataaccgcccagctggtcgaacagtcgaccagctacctcgagctcaaccgtcactcttccaactgcctcgagcttaaccgtcactcgtctggctgcccgagctggactgtcactcggcccaagtaaccgtcactcattccagctgagcttgagcttcagacgaactgacccgcatgatttcccctttgtctgagcttatggccagctccttcccacttgtccgagtctccaccttcttttcttggaccaagtcctagccaacgatcctattgaggatcgtgggcgttacatagttgcccaaagcaaagacttgcacattttataaaaaggatccaaagacaatttccgaaaaacccggaaatgataatgaagaatcttcgaggatattgtcaaatctggatgttttcctgaagctcgcaaaaaataaggaaaatctccttcctgcgaagaccctcagtagccaacttaaagataagtagaaatcttctgagaatataggatgaggcggtcattaggcctatatatgacacataaaaaggctctcaacataggctataaaaacactccgaatttgaaggctaaaaacacttattctttacttttctataacacttgtacgatcaaatcatcgtttcttatcaataatatcaagaacaccatctgtggttacttaccgattctattgttctttgagattctcgcgaagactgtttctttgtaagaaccctaagaaacaatttccattgtgtagatttcgactctcacaatttgtcgctagaaggaggtgaaatttgagatttctcttactacaagaataaagaaccatcaaaccaagcagcaatg

SEQ ID NO: 13330 - DNA, 3000 bp, Unknown
  misc_feature (1)..( 3000): cDNA_ID_3029500_gDNA_ID_2214618_Annot_ID_187589 3000 nt of promoter + ATG
cttaagtataggatttctcggcttctccggtaatttttagctctaggccgagagtttcgcggaacaccacttgtttttctaatatcatagtttgagttcgagattggtgcgataaaaacctagctattaatcgatctactaatcatttgtttcatgagaataccataagcctaacgcttttatgatcttgtcgtacaacctcaaaatctgctattgcttactttttgtttctttttatttttattactattttacttagcttaattcgatagtcattagtttactgcgtgatctgagaactttgtgaattcgatccctaagtgctgcaactgacctctttatttgagagagtggtcttaggattaatttgacttatatcgtcgttgccaaagttctctgtgattcaacattagactaagtgtagaatttagcctaagtgtttattttctttattttgttactcacgcgttttctttcttctttttcttgtgacaagggaactacaagatggaatgtaacaaactgctggcaaatttcgacgacagtgtcgaacgacaccattagggtgtcgatcgacacaatttgcagaatagaccagctaccataggcgacttcaacagagctgatcttttctactccaatcgatcaacgatccagctacctccttttataagagaagactttgccattcaccctgcctactataatcttgtttcacgaggaaagtttcgaggtgcttctaatgaatcaccagtagatcatctagaagtctttgaagacttagtgtcctcaatcaaagcagatggtctaccagctgattatcatttttgcaaactcttcccacactctctcgcgggcagagggacattatggctgcgacaactagaaccaggttcactaaccaattgaactgacacgaagaacgcattcatgatccacttccttgattattcagtggacgaattactgagggagaagatctcttcgttttctcaagattcaacagaaggtttgaaggcagctttgatcagattcaaatcatatcagagggattgccctcaacatggtttccaggaaagccagctcatcaacatattcttccgcgcaatcgataagcagtatcggttttgttttgatggtgcaagtgatggcaatttcatgaaaaggactccaagcgaagcattggtacttataaacaacgctatcacaagtctctcaacttaggacatagaaagtgatcggagaaaagcggctgaggtttccgacaagtgcagagcagaacaaggatctacacacattgcttctccatatatcccttcttacatccaagcccacccaccaaccgttgctcagagtagaactgaagccatgctagaggaattactcagactttcaaaatcgttttttgaactgaaagcaaaagccaggaaactccaggagtctgcttatagaaatgagaatcgagttgattttgacagtgcataggtagagtcgacccacaccgaccttctacaagaaaagtcacgttgtgacaacgctatcacgaccaaagtcggccccgacagtgtcgaccgacaccacctgggtgtcgatcgacacaagtaccacacagataggctagtgttgacgtttgacagagtaggatcgatgccaaacactagtgtgacccacactcacctagtggtgatcgacactggacttagactgcaccaatatgccttgaatctccacctattactagacaagtctacacaccagaagtgtaacgtccgtgaaccggaaaatcggttagggtttgtatttaaatcgcccggttcaatcggttgggttaatgaaaaccctagagtgtgcctttaaaagaaggaaactcgaaattagggattttgttagccacttttcgttttataaaggagaaaaagagagagaaggagaaggaccaaaatcgttagggtttgggaggaaacagtttcgacataccaaatcgttgttaaaggtaacgaaatttggtagagttattcccaagtcttttatcgtcattctcctttttacagaagtggatttggatttaaattcgttgagttatttgcagtttcgtgagacacgttttctcagacgcgaattaggactagcgcggattgtaactgtgatcgtggtctcatctggtttccgatcaatacaagattttggggaagcttcatgacatctaaggatagtgtttcaacggagggatttgatagttaacggttggtctttattttagggattcgtctttgagactgtttgtttctgtttttcagtccagtttgcttcaactttgcttttggttgtgtgacttgttgtatgacatttctgaactgttttagatgcaaggagagtcttgtaacatccccgatccgaactaggatcaaggggaagggctgggacgagacttgtagagagtcgggtgagaaaactcgtcccaagtcctgaagaagggcggccaatcgggaaaaacacgaatggccaagagcccgagggaaagaagatggagtgaatagctcgggaagctaagtaggaagctagggcagctcagcaaaactcagagaaggttggggaagctcggccaactcaaagggaagctcgaccagctcaccggtaagctcgaccagctcgggagactactagctagctccactagctcgacctagctggatggggagtgaggcggttactcggcggttacccggacggttgccgaacggttcccccggcagttaccttgagcggttacccggcggttaccgggctataaggatgcgccacgtgtgtggttgggaaggaagcgcactgaaggatccagaaggacctagaggcgcccgttcgcaagaacggttactcgccccttccttataaataactcgcccttcggccaaggaaagaacacaagtccatacaccgaaactctcaccaaactcagaaaagaaacgtgatctttctaagggtgcgagagaacggaacaag

SEQ ID NO: 13331 - DNA, 3000 bp, Unknown
  misc_feature (1)..( 3000): cDNA_ID_3029509_gDNA_ID_2214618_Annot_ID_187585 3000 nt of promoter + ATG
cccgagcctcttcgatagctttttcttcagctcagcccaacttagcctttttgttgtttgcgtcgggtgttcactcggtgatggggtttctgagtttgtgcgttgccataaagcacattcgggcattcttctgatttcacgtcctcgagcgtggggtgtatcagcttggtaattttgggcctaggagaagtttcgcccctcgtgatgcacgaaggttctgtctagagcaccctttttctggctcagagtgctagattgggatttatcagcctgaggtgtttgctttgacgggtcgtgcctttttgacagcaactccatctcctcatcatgggaaacgtaatctgaggctcggtgcatggcgtctcggatcgtttgtggttttgacatatttaactcttttcggaattctaacttgtaccacaatgtcttcttcaagggagagagctctgcgacgtcgttgattccctcgacctaggctagggtcaacctaaactttgtgaggaatcctttgagtggctcatttggctgctaagatagcgaccaaaggtcagcgtctgatgtgcctggatcaatcaacactgagtattgtttgaggaaaagtgttggcagctcttggaaactgtcaacagaattctcttcaagttttaagaactaatccaaggccggccccttcaggtgctcgacaaatagatgaaagagacaagcgttcctctcctttggcttgaacttggctcgggccatagagattataaatgactttaaatgccccttgaagtactcgatattgagcttcctcgggtctaaaattattgcgttggagatcttacgagtgaaaggtgtgttgtgggactcttccagaatgtgatcgatgttttgagacgaggagactgcgctatgcagctgcgatcgaacaagcttcatctcggttttttccttggctagggagagtttgatggcatttatttcttgttcctatcatattcctcagcccttggcagcctcggctcaaggaatgtaaaactgcggatcggtttcctccacttggtttgtcgcgttcggctctcccaaagctgttggttttgctcggattccactgagcgctggcacagttcatcggactggcctcgtcgtgttaccaggcgtattgatcacgagcctcgttggattgaggtctgccgctactcgccgatcatgaaaatgtcgcacgtcaaagcgggtggtcatgatctgcccttggaaggtagccgccttgagctgctgggccaaagaccgattcgcttgttcatgatagtccaccttcttctgaagttgtgccatcatgcttttcatttctgctaggactgcgggagtggcgaccttaggagtgtttgtctggactggaggaatcgggtttccctccatgtccattgtgttagcggggacctgattgttggtcattgctgcttggtttgatggttctttattcttgtagtaagagaaatctcaaatttcacctccttctagcgacaaattgtgagagtcgaaatctacacaatggaaattgtttcttagggttcttacaaagaaacagtcttcgcgagaatctcaaagaacaatagaatcggtaagtaaccacagatggtgttcttgatattattgataagaaacgatgatttgatcgtacaagtgttatagaaaagtaaagaataagtgtttttagccttcaaattcggagtgtttttatagcctatgttgagagcctttttatgtgtcatatataggcctaatgaccgcctcatcctatattctcagaagatttctacttatctttaagttggctactgagggtcttcgcaggaaggagattttccttattttttgcgagcttcaggaaaacatccagatttgacaatatcctcgaagattcttcattatcatttccgggtttttcggaaattgtctttggatcctttttataaaatgtgcaagtctttgctttgggcaactatgtaacgcccacgatcctcaataggatcgttggctaggacttggtccaagaaaagaaggtggagactcggacaagtgggaaggagctggccataagctcagacaaaggggaaatcatgcgggtcagttcgtctgaagctcaagctcagctggaatgagtgacggttacttgggccgagtgacagtccagctcgggcagccagacgagtgacggttaagctcgaggcagttggaagagtgacggttgagctcgaggtagctggtcgactgttcgaccagctgggcggttatccagacggttacttgggcagttatggtcgaacggttacttgcccaaagggtggataagggcgagcagttacgggcgaagatatacaactcttcggaaagatgcaaggaacggatgtgttgattcggcgggtcttaattgacctactggaaatcggttggactgatgtgcgatcttcccctctccgaatcctctctacggatccgagtaatgtatggcctatagagcattgcatggacttgcatatgactaagtaaatgagattacttatggctctatgactttcaggaacgaatggtgatcgtgggaaggacttggcttaggcgcgagagactcaaggtcgtgatgatgggtggtgatagttcggatagtctagggatcgattatatgacttgtaatagcttatatgcaaactcataagttgtttactctattcgtctcatatattgaatcatagaatcatataaaacggattacactaggaatgaacctcataaacggttaaggccgagtcacttagtggcttggggcgggagatctcgtccggacttaggcagtctagatcggggcctttcaagttggtatcagagcatgcttggttctaggactaggtgttgggttaaggggtatcaccactcgttgacttgagaatctcgcggtagttgttctttactcttttgcgattttactatgagttatgtggattaactttgaaggtttcgcag

SEQ ID NO: 13332 - DNA, 3000 bp, Unknown
  misc_feature (1)..( 3000): cDNA_ID_3029528_gDNA_ID_2214618_Annot_ID_187580 3000 nt of promoter + ATG
tagataaatgtcacaaagcatgataaaaaaacaaaaaaaggacaaataataatttagtcatacaagttcacttaccttctgactttcttaggatcagatacaatctcttgaagtttggtactctttgcaatatcttgaagtttggtactctttgcaatcttattcaattcatcatcagtataatcactgctaccaaactcgagccaggaagcatcctcttctccatcaactgaacttgaagaggaaaagttacccggagaaggaggcaacttcagtaagtaatgtaacaactatccaatgaaacagtcctgtaatgtctcctcaaaggtgccatgcctttggctgctcttctcttcacacccaaagggggcaatgaaggatttttattaaccttaatggaagagtctctactctccacaggagctgacggagaaaagctcatcgatggtaatgaattgcgacggaatgttgacgaagaagggctcaatgggggcaaggaggaggaggcaagtgaaggctgagtcatagaccgtgatccggaaggagtagtgatattgtcggatccattcattgttaaggattggagaagaccaacaatggagtataaatctgcatcatataaaacaagtcatgtttctacgtataactcatttttttacatgcaaaaaaacaaaatatcaaatagaaatgggaaaatgataaaaattaatatgatcaaagatattttgttttgcaccgtgacgatatcgagattgtcatcagttattggagaaaggagaacaaaaacacaattgaaacgtttaataagcaataaagagttgagaaaaacctctcagaaacttatgtttgtttggatggagaaaggagaatattatgtatgtttggatggatagtttgctcgaccctctttttatattggttaagaacaacacttcagtctcatgtttttatccccaattataaaaatttaatgattttccttcttaaatccataagtttgaatcttatttttgtgaaacaaataacatacaaattttgaagtcaacacatttgatggaactctgtgtctttaagtaatataatgaaaatatatttatatatatctaaggtaattacgtgttgctattgactcaatcttaatttaatttatattcttggcatgttaattatttttggctagtgagtgattttagagtgttgtttacttttgctagtgagtagttattttgacatgttgtttattttcctacttagctattttggtaaaacatttatttgtatttattgcaaagttattttggagtattgtttactttttctattgaggtagtttggcaagttttttagataaggttattccgtgttatttgtaagggttgacattttttttttgcgagagatgggaggtatcgtaaaacaccgtaccaccatatgcacccaaacaaaaccacctaaagatgatactaaaccaaattaaccgactacaaccaaacctccaaaaaaatgataacaaaatattttaaccacctagagatgatacaaaaaaaacatcaagtcaaggatccttaatccacataagatggttagtacctattgccaatatttaaccacactaaatctgctcaaatgttttgccactggtaactacactgagttgcaaagagttacttagtgagtgtttttgtttttttctccaaaaactgatccaaaacagacccagattagacatttatccaaactgtatagttataagatccaaacgggtaataaactttcccacccgaagaattctaaatccgaattaacccaaaccgaatctgaaccaaagtttgaatatataggcttagatagagagtatgtctttttgccctagtcaatccattttaacgtttcaaatggttgttaacgtttaattaatatataaaataattacatatgaagttgatatataaacgagtacaatttaaaagtgaaaatattaaataatatttttcctatcaaagactatatattattaaatttattcgaaatggttagtcacataagacggtcactccagaaggagcttacatgaaaaatgtaaccttgtgtctcaaggcttttgaaccatactctaatttgaaaattttatttgtatttcaggacatacctatctttttaacaatagtcaaaatcagtattatgttgttgtctaatatacattctaatttttctgtacttttttgttcgtttatcttcatattcaaaaactttcttgtatataggctctataaaccgaatcacacgtggatgctaaaatcctaatacctttcaaattttaagttccttaccgtattatttaaaaaataagaattatatgtttacactaaaccgtctttgaccaatgttaaaatattatcaatatgagcaatctagtaaaatagaatatgaaaaaaaaattcttataatttgtttagttttaatacacttggattaagctttaataaaatagtaaatttggataaagctttaatagttttgcatatttatgtactttaggggtttagtaaagctaagcctaaatgatgcaactgaaaaacttaaatttaaaacgcatatttaggtttcattagtctaaagagacatcttgacctccaaataatcaaattgaaacgatggtcttgatttccgcaccaataacaatggcccttcggattcacttggtccgttctcttattcggacatccattggaacgatgcccttcttcgctgcagaaatagcatgtgatatatgccgtcgttggttgggtaaccacatggcaagatcgtgcgaaatgtcccaattttccacacttgtaacatgcccttggatcataatcgtttctcctcctatcattgttatagctcgcccttgttctttctcgatcattgtctctctcttgatttagtgtgaatttaggagccatcctcaacggacgagccatcatcgacggagaaaaataaggcaattgagggagaatg

SEQ ID NO: 13333 - DNA, 3000 bp, Unknown
  misc_feature (1)..( 3000): cDNA_ID_2713470_gDNA_ID_2214618_Annot_ID_135833 3000 nt of promoter + ATG
atctactcgcccctcctactcgatcctctacttgacccatttactcgatcaagggtgacaaactctacaagacttgttgagctatcaaagcgtcttcggatcctcctcattctccactcaactagacatctgagcatacggataggagaggaagaagcatctactcaaccaattgatcactcggagcatagacacaaaggcgcaaactttgaagcaccctccttactcgatccccaagatcgagcattcgaccaaaccgcctgaagtctcttgtcttctagtgaatctagggtttcaacattttactataaatatatcatttggggtttgtgcaaaggatccagcttttatcctttagtttttctttgtgtttatgaatcttcaaaacttaattactcttaatctatttcgtttttgcatttacttgtttaagtaaagttgtttagcttgtttagatttacattttggtatgatttcagtaatttctgggtttgtgttcttgagaatgttgcttgagtagtgattagggttcttgaggatggattagattagggtattctctagtttagttaggtggttaagattaagttagaacccttctggattcgcttggcccctatgcggttttcgctggctaatgtggaaattcgatcatagacgtctagagtccaaaagacgttcaaatggatgtcttatctacgagttccagagatttgtagatccgaccaagacattggcttgtatgcttattggctttggtagattgtttcttaatccctgctctgctatgtttcatcaacgacagttgagattaggaagtggtagagttatgggaatctctatcacgacagtggattgacccggtttttgaatctatcgtcaagggtatctacctctcacctattagccatctgatgaaccctagagttgcccttatcaatgaatccatccttaggacttctattagatttagttgtatcccctgttgattgcacttttatttacctgttatttgtatcccctatttgtatcccctgttgattgcattttgattatgcctgttggttctactcgacccaatgatcgagtagggcttttaagttctcatttttacttgtttgaatcctgacctaggattgttactagaaacccaccatcattataatctggcttgacttagttgtttctgtacacgtcttgattgctagcattaacagtgaactggattgaaaccccctatagctgcattgacatgttagtatttgtaggggaattgaactgaaccacacccttcagcatataagtaggcctaaaaaacctgattattaggaactcgcatactggatcaacatcctcggcttatttacaacctttgtaattgatcattcctaataatgtataataatggggtcatagtaaacatttctacccctataccctaccgaaatcatatcaatctcttgctttctttctttttttaataaggggagagaaatacttttttttttttttctcattgctctcaatatcatgtatgaacaaggaaacaaattctattaacactaaccgtttgatgaggtaaaaggaagatcagtgagattagctccggccttaatggattgtgttggaaaccaggatatcctcaagtttgttggtttgccatctggattttccaatagtcgaattgagtcgcacctgtagcattaatcaaccaggcaataatctaaagaatagagatcataattcctaacaaattttaactcaataaaacgactcaaaaataagaaaaactaggatttcacctgtggtacaccacggggcaaatgttttatttatatacatatataataatattaaattttattatttttaatttattaaaattatataattttatattaatgttgtaactaaaaaaattggtgatgataaaataagaaataatattttaacatgtgttatatcaatctaaaccgtcttgctatatttcagatcaatccaaactcgtcccgctatttaaaaataataattgtttttgactttaatgtgatgacattttttgtaaattcatactttataactcaaaagtactttaaaaaggtacttcaatttttttaatatatataatgctatttttttgaaaattattatatataaatacttagtttaatcataatttgggattgatatacttgtgttttttgactaacttttattattattttaatagcctaaatttgggcattttgttaacattatttgagtcaccaatatcagtttaatacatgtccaatttatttttaccaaaaaagaacaaaatttcataaaaatatggaaagaaatttttagggagtgataattatattgtacaattgcaaatttaaaacgaaaaaatgtggattgggaaaaaattattgtttcaaattttaaaatgttatgtaattaattttttttacagaaaatattgacgcatatattgtaatataaggtttaattaatttattaactgaaaataaatgatttaaaaggaacaattattgttattaatgctaattgatccttaaaaggaatgttagtgtgtagtatattgtagtttagatttagaaagatttaaattatttttgtgattttttcttgtagtttcctaaattttagtaacaaaatcgattttatatttagatttaaaaataaatttgttaaaacattcaatgtcagtggcatgacattgtaaataagtttcaacttgaggaattatttggtaaaatagttgcaaaaatgtatatgtagataagagtaagaataagactcaaaaaagaaaaacgtagttagtaactgcctcccctagacttaaacgtcactgtccctagtggcattcaaatccggagtaagcgagaaaaataaaaaaataataaaaaaataaaaggaaatgaaaaacaaaatcataccagtgagttgtcacccactaagcgcttgtttatagtcaataacttgactttgatg

SEQ ID NO: 13334 - DNA, 3000 bp, Unknown
  misc_feature (1)..( 3000): cDNA_ID_2702716_gDNA_ID_2214619_Annot_ID_135835 3000 nt of promoter + ATG
ttacatcaccttatcgtcactcaaacgtaattagaagacaaattaatgctgaaactttacaagatgattcgtaaaatatatgtttggattcgtcaacgttaattagttcaagtagcaattaaatcagagacaagtttcttccacttaaatatgcattgacctacttagtcaacgtccttccactaaacaagtccaatgcattctttttcttatgtatccttctcttttatttggtttctcacttctgttccatttttaatttattttatcataggctataattcaaaattttacggccgtaccttactttttcacgcatgtaaatgaatgtaacattgtgcgctaaaaatgttagttcgataatcattcttctttgttatcaaatattttaataaaataatgtgactaaaatctcacattttcggcagttttgcaccatatctcttgtatttcctccttctataaatagccaatctctaaagtttcaaagaacaccaacacaatctcttatcaaataactaacaattcacaagaagaaacaatggtacactctcgttttttaaacgttgttttagtcctagtgaccattgcttccatattctccacatttgccgaggccaataggggctttgggtggggttggggtggacactccaacaattcaagtggttcaggttcaaactcgaggtccggatggggttggggttggggtcaaggctccaactattcaagtggttcagcttcaaccccagggtcaggatggggtttcggctctagtcgaaacggctcaggctggggttggggttggggcggggttcccaacaatacacacagctcagggtctggcggctcgggttggggcatggggcctaacaacaattacagctcgggatctggcggctcgggttcgggctggggatatggaggtcattcaaaaaactataatgccacctacaatggacctagaaagatcatagtcggtggagacaaagagtggacttatggattcaattacgctgactgggcttctaagactgctccattctttctcaatgacatacttggtgagtcattttagacattatctcgcattatttaggaaatgcatatacttttgatggcggtcgagtaatctattgcgagaccacttgatttttggggcggataatctatccataacattttgtttcctaaccgtatggataacaaaaaatatatttacgtatccacacataaatacgtttaggttccattccaatgaagtagtctgccgtatacgtttctacacttatagcaattttaacaaaaatattcatgcggatgcagttttcaaatacaacccaccagccccgttcacgcacagcgtttacttgcttccgaacccatcgagttatgaaaagtgtgacgtgaagaaaggcaaaatgattgcgtctccgaagcaaggtgctggaaaaggctttgagtttgttctaaaacagatgaagccttactacatttcgtgtggcgagcatgacggtgctcattgcagcaatggtaccatgaagttcaccgtcatgcccatgctaccccgttggtaatttggtggtattaaatccaatgctaaagtatcaaacattaggtttttgttttgtttttgtgtcgtcaataaatgagattaccattatttacgtgcgttataccatattcacattttgttggaattgtttgtgcttctgctttatgtctttatgagatcaccattgtttgaatattaccatatgtttatggtaagatggcaaggtttggtatttttgtgacgaaaaatgacaaattttaatatttgtttgccgttatccgttaacaatgttagaataatggtacaaacctcaaaacatcatgcggtcagaaaaatgcgactgttgttcattagagtattattaggggttaaaatgggtcaagtttatgggtaaacacaattcagctcaacgcaacgcatgaactctaatgagctaaatttttttactcaaataattagatggatcaaatgaattgagttacaatggattagtggtttacccattaacccaccaattttggctaaattgaataaaccaacttaaatctctaaagtaatatcaatttgagtttaaccaaaacctttaaactaattgcatataactaattttttccaaatagcttatcaacccatcaatttattcattatcaacattcaacacaatatcattatcatattaccatcaccatcgcaaccataccataatcatcatactatcttcatcatcataatatcaacataccatagtcatgatagctatcattttaatctaatatataattttgaaatttatttatcctttgttgaattgaatttacttgttgatcatttactttctcctattacatgtagacgtcgatcttaatctcgtatataatttttaaatttatatacgtaaataagacttaagatggataataaaaagacattcatatagaaaactttgaagaagtgataaaaactaatttatataggatgtcaaactaagtacaacacagaagaagaccatggtggtacactcactggtgcataaagcacatgcaaaacaatgtggtatacgttgattatagttaactctttatactgactagataattaagttttgagttatacaaaattaatcatgcgatatttaaggatttcctctctttttttttatagtacaattatcttttgttggttgacaaaagaaaacatcacatagacgcaagtaattaataattactcgtagatgtgataattacacgaaatataaaaaagaaactgttgtaaattatatgttctactcccaaatcaatcgggaatatacgtcttaattaggttatctttctctataaatacgtttctcacataaccaacacagattatcgcagttcacaataagcaaagcaagagtcacacaacatatactaaacaaagcacgtaaaaagaagaaaaacacgatg

SEQ ID NO: 13335 - DNA, 3000 bp, Unknown
  misc_feature (1)..( 3000): cDNA_ID_2702722_gDNA_ID_2214619_Annot_ID_135837 3000 nt of promoter + ATG
atcttcaagcatactaatcacaggcttcttcctagcatcccttaatccgttatggccctgttgaaactctctgataagttattgcaaacatcctcacagcaagaatgcccactgaaaaaggctctacaccacgtctttggctctgttttaagcaaatcctcataagcaagcggatcataacttttcaaagctctcatgttgtatgtgtaagtaccatctgttgagctgtaggcaatggcccagaagtaactctcatgacagtagtccccgtaaaccttcttccaattggaatagatgtgcctagcacaatgcctatgttcagcctctggaagcaagtcagcaactgcattgagcaaccccttctgcttatccgaaataactgtcagtccattacccacacctaactccaaatccttctttaggtgatccacaaaccaagcccacgagtcattgtcttccaccctaactacagcccaagctatagggtagattctattatatgcatccctctccacagctgttagaatctcacccttcaattctcatttcaaaaatgacccatctagaccaatgataggccgacaacaatttttccaagttctactaagagctttaaaacatacataaaacttgtcaaactgttgcttaccacactctcttgggatggtcacaatatcagtgtggatatccttattagacctttgaagttctgcctcataatcccatagctttccaaactgaactttctgagtttctaccaccatgtctaaagccattcttcttgctttttggcatatccacttagacacagagagtgtgtacctcatcataatctcatctttgatgtcagtccatctcaaaaaaggccgccttcttgcttcatctctgaacatcctagcgatgactccctgtttcagcatttttgctttcccactcttagcatggtgatgcttatcaacataagtttatactctccatatacctgaacgcttatgagtggagcagtatatcttccactcacaattttcatggctgcagattgctgccaacttatttgcaccccatctacacaacttcacatcataattcatcttcaatacataccgcaagagttgatccttaacctcttaaccactattgaaagtctgcaacatccaaatgtatggaggtttatccttcgaaaacttctgtcgagatgatgatctttctgcttggtcatacgcatcccattcatcatctgtgtccattgcatgatccggacgctctacatcataacactgtctctcaaattcatcttcatcttcaacctcttcagcaacggtttcttctggtactgtgttaatgtcttcagctgcagcatcatcaacaacatcatctgcagcttctgtaccattgtgaatttcgtcaaagaaagcctcaaaccgaggatcatcgtgccttctttcttctactggatcttctccattagcttgtactctttcagggcactcattagtttctgctgcaggctcctcgtctatgatatcttcggcatcatcatcctcaactccaagttcctcgtcttctacaacatcatttggaagcggaaaagctgcaggtacagagacggcattgacgatgtatatgtcaacttccccaccaatcatcgcctcacgacataactcccttatcccaccatctttgtcggcaccgataactcttgctgaatagatttcctcttctggaagcttgtaccaaatcgattcgacttcaccattgactccattttctttgcaagaatcgtcgaatatagaccatgtcatcagatcaggatccatcaccatgtctttcgcctcgacccctccagagtaatcgaacccttggtccgtgaaggatacatcgcctctatagtttatgttgagtttcaaacactcgaaatcactggaaaatagaaattaaccgattagtagtggtaaacaaactataacctaactgattcataacccctaacccaatttcaaacaaacccagaaaatttcaaacttaagaaccctaaaaattcaaatcgacagacccacaacacacaaatcgacatacctcatcttttcgactgtttaccaactggatcgaacgcagatatacccgatcaaacgcttcgaatcatcgcctctttcaatttctaagttttttggagagaaattagaaatttggggagttagggtttctcaatcccaaatcgatttgggggaaaacaaatgagggtactgtagtcttttagttagtcaattaaaccgcggattgttaaccattaaccccggtttagtgattccgtcagccaaattaacgtctgttaacgcgcatgaatgatttaaccacgaacaattaaatagtgtttttcttgaacaaaatttaatattttggaactttaggttccaatcaaaaacaattgggtattaaagttttaaataaaaaatagttgggttttttttagattttttccctaaaaaaaaagaataatattttgcaaaaaaattaaataatttttaagaaaaagaaataataaaaccaaatatttattgtgtagtggccatagtgggcaatcacctactatccactcttatggaatgtacccgaagggacgagtaataaatttcttattttttaattttggcagcaagtaataaataaattaattaaaagttaaaaataaataaaaagagacaaaatttgttggaggaagaaagtgggtcctagggttttcttctatctgtcgttttgatttctgcgtttaataagagacaagtccccgtctacagtcttttagagacggaagctactgagacagagattcacaccattgttctttgtctcttcctctgattctttctctctctctctctctctctctctctctctctctctctctctctctctctctctctctctctctctctctctctctctgtctcgtctttgtttcggtttcaagaaagcaagaggaagaagaagaagaagaagatg

SEQ ID NO: 13336 - DNA, 3000 bp, Unknown
  misc_feature (1)..( 3000): cDNA_ID_3029601_gDNA_ID_2214619_Annot_ID_135839 3000 nt of promoter + ATG
catctgcaccctcagggatttctccacagtcatggatcacaacatcctgagaaggacaagactgttcctctatgctaacatgctcaatcgaccgaacaacacccattcctttcgtaacccttccaaacacaacatgtttcccatctaaatgagaagtgcgagttgtcgtaatgaaaaactgagagccattagtgttgggaccagagttagccatagagagcatccctttcctctcatgtttcagctcaaaattctcatcgtcaaacttcaagccatagatagactcaccaccagtaccatcattagctgatatatccccaccttgtatcataaaccccttgataacacgatgaaatcgattcccctgtaaacaaatacaccaaataccataagtacatcatcctatagtacaatttcaacctaaagttttgatctttacctcaccactacaaactacagtaacctaattgcaatactgaaacaaagtcagaagctattcagcaatacgagcaaaaacccattaaacctcaaatcataagcattcagaaccattctatagtacaattgcatcctaaagttttgatctttctttcacaactaattgcaaatttaaccaagttttgatctttataaaccccaatgacgaatgacccattaaaccacaaaccctaaatcacagaaacaacaaatacccatttctacatttcatacataagagagtataaacaaagatatagagagaaagagagaaccttgtaatggagaggtacaccagtatttggacctaaacccttctcaccggtacagagtaatcgaaaattctcagcggttttgggaacaacatcatcgtaaagctcaataacaatccttccttcaagctcacctccaatgctaatgtccatgaaacactttgacctacccatcttcttcttcttcttcttcctcttgctttcttgaaaccgaaacaaagacgagacagagagagagagagagagagagagagagagagagagagagagagagagagagagagagagagagagagagagagagagaaagaatcagaggaagagacaaagaacaatggtgtgaatctctgtctcagtagcttccgtctctaaaagactgtagacggggacttgtctcttattaaacgcagaaatcaaaacgacagatagaagaaaaccctaggacccactttcttcctccaacaaattttgtctctttttatttatttttaacttttaattaatttatttattacttgctgccaaaattaaaaaataagaaatttattactcgtcccttcgggtacattccataagagtggatagtaggtgattgcccactatggccactacacaataaatatttggttttattatttctttttcttaaaaattatttaatttttttgcaaaatattattctttttttttagggaaaaaatctaaaaaaaacccaactattttttatttaaaactttaatacccaattgtttttgattggaacctaaagttccaaaatattaaattttgttcaagaaaaacactatttaattgttcgtggttaaatcattcatgcgcgttaacagacgttaatttggctgacggaatcactaaaccggggttaatggttaacaatccgcggtttaattgactaactaaaagactacagtaccctcatttgttttcccccaaatcgatttgggattgagaaaccctaactccccaaatttctaatttctctccaaaaaacttagaaattgaaagaggcgatgattcgaagcgtttgatcgggtatatctgcgttcgatccagttggtaaacagtcgaaaagatgaggtatgtcgatttgtgtgttgtgggtctgtcgatttgaatttttagggttcttaagtttgaaattttctgggtttgtttgaaattgggttaggggttatgaatcagttaggttatagtttgtttaccactactaatcggttaatttctattttccagtgatttcgagtgtttgaaactcaacataaactatagaggcgatgtatccttcacggaccaagggttcgattactctggaggggtcgaggcgaaagacatggtgatggatcctgatctgatgacatggtctatattcgacgattcttgcaaagaaaatggagtcaatggtgaagtcgaatcgatttggtacaagcttccagaagaggaaatctattcagcaagagttatcggtgccgacaaagatggtgggataagggagttatgtcgtgaggcgatgattggtggggaagttgacatatacatcgtcaatgccgtctctgtacctgcagcttttccgcttccaaatgatgttgtagaagacgaggaacttggagttgaggatgatgatgccgaagatatcatagacgaggagcctgcagcagaaactaatgagtgccctgaaagagtacaagctaatggagaagatccagtagaagaaagaaggcacgatgatcctcggtttgaggctttctttgacgaaattcacaatggtacagaagctgcagatgatgttgttgatgatgctgcagctgaagacattaacacagtaccagaagaaaccgttgctgaagaggttgaagatgaagatgaatttgagagacagtgttatgatgtagagcgtccggatcatgcaatggacacagatgatgaatgggatgcgtatgaccaagcagaaagatcatcatctcgacagaagttttcgaaggataaacctccatacatttggatgttgcagactttcaatagtggttaagaggttaaggatcaactcttgcggtatgtattgaagatgaattatgatgtgaagttgtgtagatggggtgcaaataagttggcagcaatctgcagccatgaaaattgtgagtggaagatatactgctccactcataagcgttcaggtatatggagagtataaacttatgttgataagcatcaccatgctaagagtgggaaagcaaaa

SEQ ID NO: 13337 - DNA, 3000 bp, Unknown
  misc_feature (1)..( 3000): cDNA_ID_2702734_gDNA_ID_2214619_Annot_ID_135840 3000 nt of promoter + ATG
gatgtaatgggaagaaggaggattaggggaggcagagtatgagtagagaccatggcggagtagagccggaggaggtggagaagattgccttaagaagattgtgacggcgtcagccaccaccaccaagaactccattgttatcttcgtaatctctatgcatagctcgattttctttatcaccatcctctctttctttctctttctctattttgttttgcttctttttttttctttcgtctctaccgtcaaattcttactccatcttcttcggtatttatataaagtcaaacatgcatgccatgtgaatattctatctataacttgaaagaaaaactattgtataacgtgttttgacttttttttgaataaagtattctaaattaaaaagttgaaaatttaaaataattggctgactgtttctgtgggtttacaggttttaattattcgcaactataagaaaatcttattatatttcatgagttttcggaattacaaaaaatatattcattcttccaattgcattccttaattatttttccactttttgtggttcatgaatcctgacaacaagaaaatactatttgatttgctttttttgccttaaagcaacgtccctctctctctttatctaaatcttgcaccgtcctaaataggggaagacccatgcctctcgtgaattttagtcttgttcggtgcatagtttacgcgactaaatgtgacagaggaaaaacaaaataattaacactgttgcgtcttatcttttgactcttggttactttagtttaactgcaacgtaagactttctagttctattttagaagaagaggttatatttgtccccggccgaaattccaatggtatcacggcttgcagcgtttcactaccgtgatatttgttttccagaccgtagtcccggcgactatgcattaaacatggccttcatcaaccaaaacaattgctagatgtgacttgtgagaaagctaaaataaacatatataggtttttagaaaaaaaaaaaaaaaaaaaaaatacaaaggctccaaaaggagggtaaaaataattcattaaagaaattttttttaacaattataagtgacaaataacatttgtattgctaactttatccatatttgtattattttaaacagtaaatatcaaatatatatttaaaaatggaaaaattacatcgtatgccatatttttcaaaatccttatgcaatttgccatatttttctgggccttacaattcatgccacatttggatgggaaatgtcaattttgtcctcaccatttcttctctattttatctctctttcctcgaaatccgtgcactttgaccatacaccattattttcccgaagactaaacgaaatgcatttgtctctctacatataactttcaattaaatttgtctcccaattttattcatcataaattctttgttgtatctagatcttgtccccgatttcattatctttcaaaattatcatataagatggcgaaaatagatggcaaaaaatagatggtttcagcatctatgtgaagacaataacgctcaactaatctgtggaccaaaatagatggcgaaaatctaaataaaattcaaaattcttaaatgagaacaattgcatataagatgtatgattcataataatagagcaagataatgaaatcgaggacaaaacgtagatgcaacagagaatttctattcggggacaagatctggagactaaaacaaaagtcttactccaattgttttctgctaacaggtaatcatgttccctaatgcattatatattacgttgtcccccggtatcaggtaatcatgtctcctaatgtattatatattacgttgtcccccgcagaattttaaatacccaataacaacagtagaaaccagctgttcttcactattctgtcccctaatcctttatgcttccacaatgatttttcgtcctgtatcatcacatcaggcaaaagctgttatgtcaccatcttcgtcagagcgctgacccaccttaagggtaatttcgtccactgaattccacgtagaccaaaatgtggcaaattttgaaaggaatttcagaatatagcagaaattgaaagaaatagagtgaaatatggcagattttgcaagattccctttaaaaattggtttgaatgataaaatattgagaacaattttagctaacaaaatgaaattaagctgtcatgatgtgatatacaatatttgggtccacgaaaaaaaacatccaaaggagtagcttccggcattggcattaatgtatagtctcgaccagtccattagaagagtgagtgtcggcccaaactttttagcaagtaaaaaaaaaaaaaaaattagctagcccatcaattcttttaaattatcaacagtcgccgaagtaatatgtcacctgacaaaaaaaatatatatgtcatccgttaatactataaaaagttttcatattttttatttttgataaaaagttttcatatattcgatgttttttaaatcaagaaaaatatgattaaaatcctccacatatttaaaaagttgatttaaatctttaactttcgacaaaacaaaataaatatcaactttttattgagttttcaaataaatatctaacatttattatttaaataattataaatcttagttacatttatattttaagccatattccaaattataactagaaatgggtgagtaaaaaaaatcataccgctctacaagtaaattatttaattagaagttaatatttaataaatttaaattgtagttttaattggtaattaaaatttaaattagagttataacacacaaaaaaactaacgaaaaattaattttgtacaacatgtcaacaagaaataaactttcaattttagtttcgaacatgaactatacaaaaattgaaacaaccttaaaaataaattttaaaatatgaagaataaaaagtaagtcaaataaaaaccaaaataaaagtagattaggcaatg

SEQ ID NO: 13338 - DNA, 3000 bp, Unknown
  misc_feature (1)..( 3000): cDNA_ID_2702746_gDNA_ID_2214619_Annot_ID_135844 3000 nt of promoter + ATG
cggtataccgcgggttaaaatctagtatatatatatacatacatatacatatttagatatttttgttattattgaaattacactgcaccgtacatttctacgcgaaacatgagtaaaaatgtcatgtttttcttcgttctctaattcttttgtcatttataaaaaattttagactgataaatcttatatttttgagtatttataataaatgactatagatttgaaaagaatgtacaaactaaccttgagtcacagtatcttgtcggaaacatgttggaaaatacgtgtaattacgtaaatgtcctttgtaacatgttatttttccgaaatacatgcgataacataatatcctctttttatcttgttattttctcttattacatagtatttataaaaagcacatggtattttttagaaaaaacattctattcagtttaatatctctttttatcatgatattgtagtaatacacgttttttattaagatcacacgtgatttctttaaaaatatattcttatttttttagtaatacatggtttttattaaaatcacatatatatatttttcttaagattctgttcatgtaaaagaatttcataataactttttttcttaaaaattcataacgttttttgaaatagcatgtttttaaactaaatataacatgtgaaattttaatgttacatgctattttgaaaaattatacggatgtatttcgtttactgttcatcttacaacaaatgaaagatacctttgttatttcctttcttccgacaacgtggtccatagttattttgtaacaaaaaactttctctctactagtttcttaatttatatgttttatttggttatttactaatattaccctatatttttcttcttcatccctaaaaaaatgttcaattttgggattgttttttcttctttcgccttaagtcaacgaaactaaaacttaatttcaatcttggtgtgtttgatttttatctgtttgatcttatcactttcaaaagagaaaacaaaagtttaagaaaatgaaaaacagtagtgggagctatcttcattcttctggcccaaagtgtaccaatctaagatattttacaatcttatctaaactatacacaaattatttaaatcaacggcgctcatactatgtgccatcattgatatcatcactcgaataattcactttataactatctccgtcactatcaaaaagtgttcaaaattaaaaaagaatatctcaatccttatccacttcatcattcctagcttccaagttattattatataactcaatttttctggcttaagagttttgaaaaatatcttcactagagatgataaaatcagtgactcttcgttcgtttcatctcccaattgagtttaacgacaccaaattcgtctcacggccttgtttcctggcgagatccttcccggtggttcgttgttcaagcaccagagacgtacctaagcttgaactcttcagccgcggaaaattcgaccggattcttcaagatccgccacttattgaaaaagccgaatccgaactctcaggtacaacaatttcattcacttcctatacatagacgaacactgattcagataagagtatcaacgaatcatgtttgattttgatttcagattactgttcgacgcttgaaggtgatgactcttacagttgctggagagcttactttgaactcaaagatctcgaagtaagtaattctatagttttttttttcaatttgagaatccaaagaatttagtgatagtgactagatttggttatgtgattgcagagagagaagccaaaggttgaagttgagaatttgattttgcaaacaggtggtttgaaatcgttaatcgggtgtttacatggagttgcttcaatggagaaagataacaaaaccaagaatggtttacatgtaggagaagaatcagatagagagaaaggaatgaatttgcacattcatattcctgatggtttaccaaaatctgaacaagagttggaggaagaagagaaatcgaaaatgccggattcagctttcactagattgcttagaagtaaaggaactatccctgcttggttctctcacgctcctgaccacgaaaccgactgaaagcggattacggattacggtacctttagaaagttgttatcttatcacagttatatgtaaatatagttcttggttttgctttagttcatgtagtctatcttttgttaagatgtgatcatattgccatagaaatgtggttgttattacttgatgttcgccaatgttgaatttgtttaatgctgtgtgcctattatagtactacgcggttttggtttacgaagagatttctattcttgataactgaagtggattactacggtacgacctatagaaagttgttttcttatcacatttatatgtaattatagttcttggttttgctttagattatataatgtctctttgttaagatgtgatcatattgccagagaaatgtggttttattgcttgatgttcgccaatgttgagtttgtttttaatgtcgtgtgcctattatagtactacgcggttttggtttacgaagagatttctgttcttgataacggaagtggattactacggtactacctttagaaagttgtttcttatcacatttatatgtaattatagttcttggttgtgctttagatcatatattgtctctttgctaatatgtgatacatattgccatagaaatgtggttgttattgcttgatgttcgcgaatgttgagtttgtttttattgtcgtgtgcctattatagtactacgtggttatttggtttacgaagagatttctattcttgatgatgtttgttctccggatgtgaagctaaatctttgaaaggaaaacaagagttttctaaatatagggaaaagatttgtttggtgatgcaaagatgaaaattgtttgacattattaataataaccctttggtgttttcatcgaaaccttttctatg

SEQ ID NO: 13339 - DNA, 3000 bp, Unknown
  misc_feature (1)..( 3000): cDNA_ID_2990239_gDNA_ID_2214619_Annot_ID_135845 3000 nt of promoter + ATG
ataatatcatcattataaaaaaataattagagttttttcgcatattccataattagaatttttttaaacgaatatacactattcaatacatgaaaaaaatattataacgggtgaaaaatagatttaagaaaactttctactgagtaacgggtcataatttgaaatatttatattaaatttcatacatattatattgaaaatttataatcttatatactataataattaataacatattagatttttttatgtgtatgatgtaattcaatttttaatacaagctggaaaatcctagaattgacgggtttagatcgatattaatacaagatggtatactacaggtgaaactcttaaattaacaatcaaactacaagtgtataatcttaaacactaaacaatatagataatatcaacaaaacatatacaactcacagtttactatacatttaaaatcaaataaaataatatcatatatttttaaatcatctttacaataaaagtttttagtttaactaaaatataagcttacatgcggtatactacaggttaatatctagattatagggcttattggatctaaagacgggtcatcaaagatttcctaaactgaagcaaaatatactgaatactcaaatatctatctgttaccaaattataaacaaataagttcgtaaaacaatttaatattttatatacaaaatcaattaaatcttaatcacataaaaattagcacaaaaaaaagtattcaacaattaaaattttatcaaatctctgtgttatataagttttgatactatattcgaataaagtgtaatattccttttcgatttgtattttttaactaacttaagctaactaatatatttactaatcttatacctatcaaaaccgactatcgtttcttatctctatagtatttttgcaagacttttttggtggatttgggtaaaagtgcattcacattcccctattaaataaatatggtgtactcctatgttattagctaaaatatttaaattataattcagagtcatatcattagtaaaattaatattaataaaataaatggctttttgcaagacagatttggagtgacgggtttttgaatcaacattaataaaaaagtaaaatataattaatccatcgtttcaatacgggttaaatctttaatttattattttttaagaccactaatattaaacatatcaaatcatcctaatttagaaaagattatataaaaccaaaaatgttatgtggtatgtataatgttactatatataaaattaaattataaaatataaatgtattagagaatgatataatttgtaaaacttttatatataaaaaataattcttaaattttaaaaattactactttaaaaaaaattcacaggacgggtaaataaattatagaacaggttttattttggaattgggttatatggtggatgtatttgtatcaatatttataaaattgtaaaatattattaatatgttgttttaatagggattacaacttcagttttttaacaattgtctcatggattcgtggtatagcgttacttaataacaattataaactgtaaaatataaatattttataaaaataaaatttgcaaattttaatatatattacttttaaaaaaagaaatcgtcccacggtataccgcgggttaaaatctagtatatatatatacatacatatacatatttagatatttttgttattattgaaattacactgcaccgtacatttctacgcgaaacatgagtaaaaatgtcatgtttttcttcgttctctaattcttttgtcatttataaaaaattttagactgataaatcttatatttttgagtatttataataaatgactatagatttgaaaagaatgtacaaactaaccttgagtcacagtatcttgtcggaaacatgttggaaaatacgtgtaattacgtaaatgtcctttgtaacatgttatttttccgaaatacatgcgataacataatatcctctttttatcttgttattttctcttattacatagtatttataaaaagcacatggtattttttagaaaaaacattctattcagtttaatatctctttttatcatgatattgtagtaatacacgttttttattaagatcacacgtgatttctttaaaaatatattcttatttttttagtaatacatggtttttattaaaatcacatatatatatttttcttaagattctgttcatgtaaaagaatttcataataactttttttcttaaaaattcataacgttttttgaaatagcatgtttttaaactaaatataacatgtgaaattttaatgttacatgctattttgaaaaattatacggatgtatttcgtttactgttcatcttacaacaaatgaaagatacctttgttatttcctttcttccgacaacgtggtccatagttattttgtaacaaaaaactttctctctactagtttcttaatttatatgttttatttggttatttactaatattaccctatatttttcttcttcatccctaaaaaaatgttcaattttgggattgttttttcttctttcgccttaagtcaacgaaactaaaacttaatttcaatcttggtgtgtttgatttttatctgtttgatcttatcactttcaaaagagaaaacaaaagtttaagaaaatgaaaaacagtagtgggagctatcttcattcttctggcccaaagtgtaccaatctaagatattttacaatcttatctaaactatacacaaattatttaaatcaacggcgctcatactatgtgccatcattgatatcatcactcgaataattcactttataactatctccgtcactatcaaaaagtgttcaaaattaaaaaagaatatctcaatccttatccacttcatcattcctagcttccaagttattattatataactcaatttttctggcttaagagttttgaaaaatatcttcactagagatg

SEQ ID NO: 13340 - DNA, 3000 bp, Unknown
  misc_feature (1)..( 3000): cDNA_ID_1008994_gDNA_ID_2214619_Annot_ID_187621 3000 nt of promoter + ATG
aaagtgtaaaacagattgtccactttcgtgtcaataacacaattatttgaaaacaccaatcaaacttgtcatggttttgcaagtccaaaagaccaaaaggccctattctttgtctacataaagctcacatgcatctctctctctctctctctcgttcataatgagatattaagatcaacaaaaggaaagaatggcaaaagctatggagctttgggtgggagagatgaagaagatgagtgagaagataaacactagaaatccattgatgcaaaggaagaattcaacatctgttgtgtccaaacaacaacaaggatcagaagaagaaagaggacttattaaccaaaagattagagagaaaaatgaagctgtaactatgtctgagctcactgtttgtcttctcatggaccgttttgttccttggtgatctttccatacccaactacttctagatctcttctttggtgatgtgtatatatatatctagaaactacatgtagtatgtctatatatcagattttgtttgtgcagaccatgtttttaagtttccttgtaaacctgtgaaagtaatgtgtttgagaaacatatttttattactttaatcaatagtgttcaattattattaaccgggatttatatgaagatggaactttctattcactctgtaattaggaacattcgcatcattcagtaagaaataaaacaagaaatgattataatttttctaataacgtaggaattctgagggaacccaaaactaaaatttgattgaaagattttgaagtggccaatcatgaatgagattgctggaagatatcatcaatattcaatacagataacgatttttttttttttttattgataccaaatgagctttcggcttttggcccagacggaaacaacggttacaaaaggtttgggctttgggctttgggcttttgatccacatgacgatcatatagttctttccttcaacacaaaacacttgaagtgtatcttatcaactaaactctattccagcaaaattatttcaaaattagatatatgggagaatttttacaggccattctagattttcattaacgctgtgatttatccgttaataagtacgattaagagtaaaacgacgtcgtttgcaattgaaacaaaaatccccaattcagaaataagaaaccctagatcctcaaatctcttcttcttttcttcttcgaattcactcctgtattttgaaatcaaagtgaattgcaaggcacaaagttcatgctttaaagcactgcaaatggcgaagtcatgatttatatggcatttttcctgtttttgtttcaattgcaaacgacgtcgttttgctcttaaacggtctcattaacggataaatcacatcttctaattgctctgtttattcagttgatgttgtgactaatttggctctgtcaacgaaagttagtgattttatctgaagtcaacacgtaattgatgattttaatcacaaagtacaaagtttatgtttaaagcaccacaaattgcgaagtcgtgatttaaatgacatttttcccgttctggttaaactaagtttctattatttaatatggatattgtggagcgtagtgtcagcactcagcagcttatttaacgtgatactctttaaccgagtaacaactagtgaggtcatattcaggaccgatccaacaatattgagggttttactccaagtaaaattttagttttatttttaattatcataaacgacataaatataatatggaaagatcacaaatactgattaaaaactaaaatcatcaaaacgaaaaagaaaaaagaaaaaattgggttcaactctcatgagttattaaacattttaggttttaggcttaaatctttaaaaaaaatcagaactgaaaaacgaaaaattctaattttattttggactctgattcatagcttatgtcgcttatgtagttatgctagggatgaatctgtatttcgttaccgtaatgagagttcgatactctcttacttgttacgattctggagcatgttacatttttttctttccgtcaacaacaactttaatatggtaaaacaaaatttatttttatttggctggtcctactcaagacaaatcttctgccgacatcacataatcatattaaaaaccataacttctgccactctgtttttttttttttttgtaaccattaactgattggattttgatccatctcatctgattttttagctcaacaatttacttgcacattttctatttggttttatttatacttagttacatatatgattatcgaactagtatctctttataattaagtatttttctatttttttttaatttagatttttgtgaattcatttacagtagaaaactgtaaaaccatatggtctaattatagaatgaaaacttcaacgaatccatacaacttattggctaaatataataaatctgcttgaagcatattgttattatttagttggatttgacgatctctgactttaatgtataccgacataccctatgatttagatgttgatttttcccattcttaatatatccatgttaagagattccaccataacatatctaattatttgcattgtaataaatattatcattaaaaaaaaatacaactggacagctggctcgtcccattgtttcttacgtccaccaattacatttgttaaagcaaacttattagaacgttcatgtgtgagaagttggtgtcgacatgtgtctaaggtctatgtcagaaatcggattagcttattaagtaaactatactatatcattgttaatatagataaaatatctagttcgtccaaattaaactattttcataactgccacgtggcgtaaacgtatccatcgagtcacttgtaatatctttataaccaaagtcttccaacacattcatcaccatctatctactctttactctcttctcttctcacatcaattattcatagttctctcttctccggcaagaaaag

SEQ ID NO: 13341 - DNA, 3000 bp, Unknown
  misc_feature (1)..( 3000): cDNA_ID_2702754_gDNA_ID_2214619_Annot_ID_187615 3000 nt of promoter + ATG
agctttgaaggtgtcctgttgataaggaaaacagttgttaagacacattcacccaatagagaaagtggtacctgagattgaaacatgagagcctttgccacattaagaatgtgctgatgtttacgttctacaaccgagttctgttatggagtctctggacaagaatgaaaagccataatccctttctgttgatacaaacgtgtaaaacgcagttatggagcattgtcagatcttacaactttcactttaaccttataatgattctccacttgcttaatgaaatcagaaaatattgtaagaacttcagacttagttttgagcaaataaatccatgttgcacgagaatgatcatcaactattatagttgtcaagaaatatttataaccatccactatttcaactgagaaaggccctcaaatatcaatgtgtaacatctcaaaaatctcatttcaaacattattctgagaagggaaagacaactttctctgcttagctagatgacaaacatgacaataatctgatcctttattcttgtgtttagtagttcccaatgattctgaaataacatccagtctttgtagagaagcatgaccgagtctgttatgccacgtactgatatccacaattgcattcactgaaacatttgtatcttcaacatccatgacataaagattagccactctcctaccgtgaccaagcatccggcccttgataagatcctgaatttcacaagcatgttgattaaatatcactcttgaaccaatatcatctgtcaatgaacttatactcatcagattaagacaaaattcaggtatgaataaaacattcttgagaagattatcatcattgagtctcaaagtaccaactccactaatcttcacagtgggaccagctggtaaattcactgagctcaaaacagatgtattcaaagtcaacaacagattcacatgatgtatagctcctgaatctatcacccatgttttagaggaaagagtatgttgagcaacagtcaaaatcccaataaaactataggtggaaggagagaaagaaataccaatgttatcagcttgagatgagctagctactgcagaattactgtgaggttgaggctgaagttgagagctaaacatagcaatgaactgttgaagttgttctttgctcagattgcccaccaaactctttagaccagaatgagtatcattagattctgtcgtagccaaagcaacattagaagcaacaggttttggtttctgtgttttatcaccaaccttacccttaggagtaaaacgtggaggaaatccatgcttcttataacatctctctgcaatgtgaccaaccctattacagaaagaacacatcgatctccccttattaggaccattctgaacatagtagatagtgggatcaatgctattagtaatagtgacttcagacacttggaaagcagctggtcgagcaaccacatttgaaaatccttgttgactattgtcttgatccacaatgtgatacacctctgctaaactcggaagtatcttcttagcaataatctgtctgcgaataatagcataagactcattcaaaccagctaaaaacttcactatcttagctcttttttgccttctgttgcagacgaagagctttaccacacgtacaaggatcatccaactcctctgtactatctaattgatcccacaatgtcttgagacgagtatagtactcggacaaagacaaagtaccttgacgcaaatcctgaatctcttgagtaagattatatgtacgtggaagattagtcatattgaatcgactattgagatcacgccatatatctgaagcatcattcatacgaagaatacttctacagatctgaggagacacataattgagaagccaagattttaccatgctattacatctagaccatagacaaaagttcttatccgtttctaaaggacgaggcagagttccatctataaatccagatttgttcttaacatctaacgaaatgagcattgcaacattccaatctccatagttcgtttcatcaagacgatgagagatgatattcaaacctggatgatcggcactgtgcaagaagaacggtgattgagttggatcacttgatttcggtgaaacgatgactcgcgaagctctagaagtcttggatctagcaacttgaggagaattcagaggagaatcatcaatgccggtggatcgcgactgtttgcgagctgaacttgttcctgacttcgatcgagttgattttcacgtcactcgagctactgtcaccattggatcttgagcttgagcaatggagaagacgatcgtgagcttgaaaatgaagaaatcagatcgagaaacaatggagtttgagcgttgatggctctgataccatattacgattgagagagatgagagagtttgttagagattgatgaaaatattttctcattaactctgtaaaatgtatttgtacaagtatatatactatgactatacaacctgttaacataaccgaaatacataatcaactaaaccacataaataaaccaacactctctgatagaagcggaagcgtttggaagcgtaaaagcgagtttttgaaaaaatttaggaagcgggtacgtgtttgaatcgtaattatatatacatatcaaaaataaaatcataaattagttgaaaactaatttcaaaatctaaacgttagggttatataatgtaattaatcgaaattaatacaaattttatttgttgtgtagtggtactagaggattttaagacttcacaggtggccagttcgaataactccgcacgaattagttttttatttacttaaaacgaataggggtaaatttgtaattttcatcgaggagtcatcttcttcttccccctaaaaaaacctaatcgccgtttcctcctgtttttttttcccgaacatagctaacgctggaaacgcttccaatctatacatacaacgcttctcaatcggaagcgtaagcgatg

SEQ ID NO: 13342 - DNA, 3000 bp, Unknown
  misc_feature (1)..( 3000): cDNA_ID_3029569_gDNA_ID_2214619_Annot_ID_187614 3000 nt of promoter + ATG
ccgtctttagatccaataagccctataatctagatattaacctgtagtataccgcatgtaagcttatattttagttaaactaaaaacttttattgtaaagatgatttaaaaatatatgatattattttatttgattttaaatgtatagtaaactgtgagttgtatatgttttgttgatattatctatattgtttagtgtttaagattatacacttgtagtttgattgttaatttaagagtttcacctgtagtataccatcttgtattaatatcgatctaaacccgtcaattctaggattttccagcttgtattaaaaattgaattacatcatacacataaaaaaatctaatatgttattaattattatagtatataagattataaattttcaatataatatgtatgaaatttaatataaatatttcaaattatgacccgttactcagtagaaagttttcttaaatctatttttcacccgttataatatttttttcatgtattgaatagtgtatattcgtttaaaaaaattctaattatggaatatgcgaaaaaactctaattatttttttataatgatgatattattttttcgcaaaaatagaatcatataaagatgagaagtgaattataataattaataaaaaattaatatgataatttagatatcaaatctaatttgttgattttaattggttactttttttgaaattaataatgtatttcatttttctaattatatcaaattaattaaaaattagatatcaaatcttatatgttgattttgattgtttattatttttgaaaattaataatatatttcgtttttaaattaaatttaattaattaaattagtatttgactttttaattcttaaagagataaattaatttactctttaaaattttatttctaatggcatacctatgtaattacttataaaaattaaggttatatttaaaatgtacttcccaaataatatagtaggatatatattaaaagtatttaaactgcactgcactttatccaaagttgagcgacacatttctatttggagcattattttcttagtagtaattaatcggaatcgaaactaatatatagttttttgacaatttttttcttttcttaaagaaattaataaaaatattatcatcatcaaaaaataaattgtattcttctttttaatatccaagtacaaatcaatcataatcttttttagctaaatatttaagttatcaagttataagtttgactcatagtgttcacttattagatttctaaaagtaagttaaatagcaaacaattcaagtgtcttataaaggattaaaagattgagcaaaaaaaataatatatatatatatatatatatatatatatgtagttacagcatgaaattatattaaactcattaattaacaatagatagatatttagaaccagaatataaaatggttttatttaatcttaaaacatgcagctaaaaaggtcagaacatttaatattaccttctacattttgtttttatgtaaacattaccaatttaccatatactttccttgtacatatttagctaagaaatcgtggactcgaaattgtattttgattttagcaaattaattttttttctcccttgattgaattaaagtttacatttttttcttataatcacttgtgtgataccactattaagtcaaaaccagattttgtttttcaactgaaaattacttatatattttttattctaataatttggagagcatgatgatcgtctctgtccgatctcttcaactactgcttcttttagtgatgttactgttttgccgacgctatcactttacctcctcaaaagttttcccatgtatgctcttgctcttcaccctctaattcttatgagatgggaagttggtagagtttatggctctggttttgaggattttgatgtagctcattcggtttcgatgggcttggatacttgtgtttctacatttgtgttcctttgcttttatcgttttgatgcgatcatttatagcaatattcggattatgtatttatttgcttatgttaaaaattgtctcgttgcagtttagaaaagttttttgagtttagacaaccaaccacttatcctagtttattgaggctttcaatagccatttctgctttatagatcttgttatccttctaaatactttatttgtgtttagtgataatgttataaggagcattgtgtgcaagactattctacttgaattagaagcgggcattgttgttcaagactgttcttgtccaacatttattggccatatgatgttgatttgcttcctcctccttatggttttgacaaagacttccaaactaaaaagtgtatgctttattgaatgttcttggttagatgatgttttggtagaacttgtaagttcacccctattccgaaatctcaatttgagtgttattatttatgttagcttgtgcttatgcttattcttaacctctatgttaatcgatgttttgatttatttgactcttcgtaggcataatgtatcctgtcaggttaaacttctttctaccagaggataagtttgtcaaaaaaattgtttttttgtcgaaggtgcaactagagaacatgtaatcgaatccgagacaaaacgacatcgttttggtgtccgtgctatgtccaggacaattgtctccgcagtctaataagaaaaagaaaaaaaagattccagcccaaaaaaaaagccagataggttgaagaagaatcctccatgtttgatcatcatcattactcttgattcaaatctctacgatcttttgcccagcttcacttcaaatctcccaattctagcatttcaatttcatccccagtagctagggttttcaagacgtcgaccttctgagattgagaaagctaaatttggatcaaatttcctgactggtaatttcgtttgattagtctccaatttcggcgttttagaacgttctaagaagaattgaagacgaag

SEQ ID NO: 13343 - DNA, 3000 bp, Unknown; identical to SEQ ID NO: 13339
  misc_feature (1)..( 3000): cDNA_ID_2990239_gDNA_ID_2214619_Annot_ID_187613 3000 nt of promoter + ATG

SEQ ID NO: 13344 - DNA, 3000 bp, Unknown; identical to SEQ ID NO: 13338
  misc_feature (1)..( 3000): cDNA_ID_2702746_gDNA_ID_2214619_Annot_ID_187612 3000 nt of promoter + ATG

SEQ ID NO: 13345 - DNA, 3000 bp, Unknown; identical to SEQ ID NO: 13337
  misc_feature (1)..( 3000): cDNA_ID_2702734_gDNA_ID_2214619_Annot_ID_187602 3000 nt of promoter + ATG

SEQ ID NO: 13346 - DNA, 3000 bp, Unknown
  misc_feature (1)..( 3000): cDNA_ID_3029601_gDNA_ID_2214619_Annot_ID_187600 3000 nt of promoter + ATG
tttaagtacctggccttgtcgaaacaatgctttaacattgttatcttcatcacgcatagcaaattcagtgtccaacaacgctccttttgcatctccgaatttgagtttgcaggcctgccacaacagccagttacaatacaatgagataacatagtaaaaaaaaatcggttatacaggcacaacaaagcaattaagttggacaagtgaaaacactggcaacgtaaacagagatgcaaacaataattcatatgagcaatgtatgtcccacaagcataatctcagagaatattatcctgcttatgtcaaggtcaacctaccctactttttcccaagaaattaatcaaacagcagaaaccaacataaatgacaggtctgcagtgtagagcacttcaaattaatttttagttcacaatcaattgcttatcattctatcgacggtacagctcatccgtaagaattaagcagattcaacaaaaaaaattgtaatgttaaaaacccaacagagtaagaaatttaagttcttttggaaaaatcaacgactccaaagacaatcaatcttcagatggtacgtaaagcacacacacatataaggtagatatgttcaacttacaagaaaagatatcaacaaggatgtatgtagctttaaaaaaggtgtaaaagcatgatgaacttacagcactattagtgaagatctgcgactttgtcttacgcaaggcagtactcgtctctacaagatcccaagtagagagtgagtgggaacattggtatggatagtataaatattttttgagatgaagtaagtggaaacatatatagagagaaaaactgataaaccaccttcatcaatgccctctttctcccagcaaatatccagatagcgtaaagccttacggtactttctaagagccatcttatagtcttgtttctgagagtaaatcaaggtcaaaaacagatcagactcacagaaatgaaaatatggaacagacaaacgtatatattcaatttaaaacaatggaaaaagcaccttaaagtgctcattcccatgagccttgacaaaatcaacagtctccatccaccaagataactcagctgggctttcattcagatcaataggccagtcagggtacacatcaccatccttgaaaaagtcacaaatcccatcatctgcaccctcagggatttctccacagtcatggatcacaacatcctgagaaggacaagactgttcctctatgctaacatgctcaatcgaccgaacaacacccattcctttcgtaacccttccaaacacaacatgtttcccatctaaatgagaagtgcgagttgtcgtaatgaaaaactgagagccattagtgttgggaccagagttagccatagagagcatccctttcctctcatgtttcagctcaaaattctcatcgtcaaacttcaagccatagatagactcaccaccagtaccatcattagctgatatatccccaccttgtatcataaaccccttgataacacgatgaaatcgattcccctgtaaacaaatacaccaaataccataagtacatcatcctatagtacaatttcaacctaaagttttgatctttacctcaccactacaaactacagtaacctaattgcaatactgaaacaaagtcagaagctattcagcaatacgagcaaaaacccattaaacctcaaatcataagcattcagaaccattctatagtacaattgcatcctaaagttttgatctttctttcacaactaattgcaaatttaaccaagttttgatctttataaaccccaatgacgaatgacccattaaaccacaaaccctaaatcacagaaacaacaaatacccatttctacatttcatacataagagagtataaacaaagatatagagagaaagagagaaccttgtaatggagaggtacaccagtatttggacctaaacccttctcaccggtacagagtaatcgaaaattctcagcggttttgggaacaacatcatcgtaaagctcaataacaatccttccttcaagctcacctccaatgctaatgtccatgaaacactttgacctacccatcttcttcttcttcttcttcctcttgctttcttgaaaccgaaacaaagacgagacagagagagagagagagagagagagagagagagagagagagagagagagagagagagagagagagagagagagagagagaaagaatcagaggaagagacaaagaacaatggtgtgaatctctgtctcagtagcttccgtctctaaaagactgtagacggggacttgtctcttattaaacgcagaaatcaaaacgacagatagaagaaaaccctaggacccactttcttcctccaacaaattttgtctctttttatttatttttaacttttaattaatttatttattacttgctgccaaaattaaaaaataagaaatttattactcgtcccttcgggtacattccataagagtggatagtaggtgattgcccactatggccactacacaataaatatttggttttattatttctttttcttaaaaattatttaatttttttgcaaaatattattctttttttttagggaaaaaatctaaaaaaaacccaactattttttatttaaaactttaatacccaattgtttttgattggaacctaaagttccaaaatattaaattttgttcaagaaaaacactatttaattgttcgtggttaaatcattcatgcgcgttaacagacgttaatttggctgacggaatcactaaaccggggttaatggttaacaatccgcggtttaattgactaactaaaagactacagtaccctcatttgttttcccccaaatcgatttgggattgagaaaccctaactccccaaatttctaatttctctccaaaaaacttagaaattgaaagaggcgatgattcgaagcgtttgatcgggtatatctgcgttcgatccagttggtaaacagtcgaaaag

SEQ ID NO: 13347 - DNA, 3000 bp, Unknown; identical to SEQ ID NO: 13342
  misc_feature (1)..( 3000): cDNA_ID_2702750_gDNA_ID_2214619_Annot_ID_135846 3000 nt of promoter + ATG

SEQ ID NO: 13348 - DNA, 3000 bp, Unknown; identical to SEQ ID NO: 13341
  misc_feature (1)..( 3000): cDNA_ID_2702754_gDNA_ID_2214619_Annot_ID_135847 3000 nt of promoter + ATG

SEQ ID NO: 13349 - DNA, 3000 bp, Unknown; identical to SEQ ID NO: 13340
  misc_feature (1)..( 3000): cDNA_ID_1008994_gDNA_ID_2214619_Annot_ID_135852 3000 nt of promoter + ATG

SEQ ID NO: 13350 - DNA, 3000 bp, Unknown
  misc_feature (1)..( 3000): cDNA_ID_1838125_gDNA_ID_2214620_Annot_ID_135856 3000 nt of promoter + ATG
tttatagatcaattaaaaaattacaagggggagaaaaagaaaatagctcttatagatcgatcaatcggatcactaagaattgtcacaaataatataataaatgaacacaaatcataacatatatggtgttatatacatctacttaaagtagatgaccggactattagatctcaaatcccacattccactttctttaaggtattcatggtatctagagaactccggtttagccgtcgctttcttcttgttatggcggcgataaccatcaaataaactgaagattggatggcttaatttgcttgtcaccactgttttagttggtttttggcgtggaagcttttccaaaatcacaggaaaatctccaccaagccttatcgatggagcatagtatggaacgctcgttgacctccttagctttgctccaagtaggctgaaggtggaatcatcgcttacacgctcatatccgccgcgacgactcctcgtcctcgtgcttaagtttcttagcatttgcatttctggattagttgaaggtttaaattgcttggaagagagaagtgacgaaggtaatggtggtggtgagaaagagataggcgtcaagagaagtgtattgttgtttgtggttattgtaacgagagagtctttgattgtctttatatagtttttttctatagagagtctttatatggttttattgataatataagaattgtaggtttaatgattttgcattatttaagttaggttgccattttggaaaattcaaacttcgtcggtcgtatcctcttttctattagtaataatatattttatcttccgttaataaactaaacatagactaagacttgcattgcatgataaacgttgtgttaacaatagaataaacacatacttattatatatgtgtttataaacacaattaataaacaaaagaaatgacgacaagcacatggttgattggtttatatattagtccatcacgtaaccaaatgattgaaaatatttgtaattcatgaatagctacaactgtaaaaagaaaattctgaattacacaaaaagaatttggttaaatttaaaggatagtatatgcacagagaccaatcttttgcattttcaaatcggtcaaagcatcagttgctttcgaatcgttggaacttggaagctgctaagcgctaactagagaaacttgtctttcgaccgataaaatttaaaggatatgaaattcgtgatacacacaaatttataaatagctgttaacatttactgaccaaaataatataagttatgtgaaaaagtttgaaaaataacacaatatttttttttgttcactaaaatattataaattatgcgaacattgagttttttattttgccatttaaaatgttcacagtggctaacatgattgaaatcttagtagtaagactcaaagttagtcattcaactaccatagtgaatcttttaaccacgaaaccaccataatcagtcttcctgtaaataatcacctaatcggatgttgctacctaataaaaaattattcatttaactataaaatttatctatcacaaaacgaaattatatatccgtttgggtttactagagaggattaatgattatattttatgattaaacaaaattagctatctgtttggatttataaacgagtttatattttacaagtaaatgaggttaaatgtcagttaagatttataaaagaatttagattttataattaaacgagattaaatatcggtttgagtttagaaaaaacggttagatttaaattttataattaaacgagtttaaatatcggtttgaatttaaaaaagagaattagagtttagattttgtaatcaaacgagatcatatatcatgtttgatttatgaaaaacaattagaccattcacattgcataacctctcatgtatgtcttaaagactaaccatagttaaaattaaagacatttccttttggatgtcaaaaatatcttccttaagatattttagacatctaaaaaataaaatgtttttaattttaatcatggttagtctatttttaccatggttggtcttggagacattaataaaagattatgcaatgtagatgcttttagtatttagaatggaagtgaaaaaaagaattcatcgtaaagatgaactcaagaattgttcgataatatatgtgttattttcaaaaatactttaatttataaataatgaatatttgatatcttttaagtaaataaaaaatgtggtaaaatgaaaataactaaacaaaaaaaaacttgaaatatacaagggattgggaaatgtcatgcataagatactttggggtttgatgacatagatgaataaagattttgaagaacacatgccggttaaagcctaaataattcggttaaacactcgcaaattggatttttggttaaaccaattggtagacgtgtcaaacctaaaccttccattgcgctaagacgtttcgaaactcacaaagataaaccctaaaacaataaacttttcctcagacatcagcctcggcgaccacgacaacaacttcattttttctcgtcgagtttttttctgggaattgcaggtaatctctcgttaacgtgcccctctggtttctcaaatttgggaactctgtttttgttctgttctgggaaagtagaacaattcgaattacggttcgaccgaagtcaaaccgggttttgtccggttaaataaattgaaagaaaaaacaaaggaacactgtaataaaaaccctctcctaaaaccctaatttcttcttctctccgtcttccttcttgttgttcccggtgcgatttctttcattttgatttcgatagtttattcttctccttgttttcactgtttgtgtgattgattctctccatgaattgataattcttacactattgtcttttagctcgactcttaaactgatttgttcttgttaccattgatggttttaattgcaggtggatttatcagagtgttgtgctaacaa

SEQ ID NO: 13351 - DNA, 3000 bp, Unknown
  misc_feature (1)..( 3000): cDNA_ID_2702784_gDNA_ID_2214620_Annot_ID_135857 3000 nt of promoter + ATG
tatagtatattttactttgatatccttagtttgtatcctttcttgcttcgcctatcaccacgtcgagatcagtacctgatctactgttcgcatctaatcttgtttttcatttccctgagatgaattgctgctgctgggcctatcatctccaccatcacccttctgtcaaaaacatcagcacaatctatgttcagcactcttaactttctaaagcagagattcaagactatccaaaagaaatcgaatacaaatcaccccgttgcacgatttaccttgagtcttaaaaaggtcaggacactgtttacaagaaacttgagcagcttcacaggctttcttacatcgaaaggaaagtatctatacttgaacatgtgcacgattaagcgtttcatagttaaagaatacaaaaccaaccagtaacacaacaagatcggccagaacacaggcacatccaggaaagagaagaatgtcatcacaaatgcaacaacaaatgctttagtcgctgcatacctgaaaatcaaaattgacaaactttcatgagaattcaaaccctaaagcagaccattagacctaaatcagttctcatacgaattcactatcataacaatcatcaatcaaattgtctcaaaagaagaaatctaccagaactttaacaatgaatggtaaaaacacaaacttttcgacaaacctaaatcaaaatcatccatcatcaaaagtaaaagagaaattttaccagaacttgaactcaggaagacgacgaacaaagggcttatactcatcagactcatcaacaggtaaagaatcaggatccaaagcttcaagttcaggatcaactttaggggaaaggaaaccaatcaagagatttaagatataagtagctaagccataagagataacgaagtatccataaacagagtaaaccctatagatatagatcactgcagcgactaaagtcacaagccatcttcgaacaatgttaggagcagatctgtctaagtaattctgaaacgatttcgagaattcgattctccattttgcaagtggtgaagcaactatggtgtctgcttcattttcgcttcctggttcgtcttccatggaaattgaacacaaaatctgctttttcttcacctcaaaaactgggtctggttataaattctaatcacaatcactgaacttcgaatcaacttcaaaaatcgattcaaaacaatctactcgatttaggatgattttgaaccaattaaattgaaagtttctcagtttcgtctgaatttttcttagtcgtattaaagtcttggtttttctggaaagaagaggaagaaactgaatgacgtggggagaaggaacatgacacgtgtcgcaaagtaagatacttttgttaaacatgttgggcttcataaaatatttgtttaagcccagtagggaaaatatgttgaactttttttggtttttacatggaacgattcgatattctgtgaggcccaaccagaaagaatccaaaaccgaatcttttttgtttctctgggaccttaaaccgaattttaacgttttgcgtatgattctctagacttgtaattctagttgacagtcaccaaaaaaacactgctcgatggtcacatccatacgacacagtttttttggttgtggttaaccccacagctcaataatgatcattttttcccatttgacatattagatacttatgaaaaaagaaaaatatcaaaagtggtaatttgttattcaacttgtttttgtgacagaataatgaaaacaaaaaagaaaataataaatacacagaataatgagtgactgattttgagtgaaaacaaaaaagaaagaaagaagaatgagtgatataaattcatttctttatcctaagaaaataataaatttgtttgccaaaaacagacaaaataaaataaggaattcactgaaagaaattgcctaattttcaggacacgcgtcatataacaatttgttagtcggatacttttttggtacatcactgtcgtctctttttcttttcgttcaattaaaaggtacactaactatttttttaagaaagatattaaaatcttgaaaaaccatggccgtcagatccattaacctttcaaattcaacggacacgattcatcgtacgattgacgatgaacaataaccgaggaaaaagtgacgtcagcgtcttcttcctcctccaacgtcccataaagaagcgccacacacacagtcacacgaaaactctactgtaactgcaaaatcttgttgttttcttaaacgaagagagaagaaagaaagaaaaaaacgttacggattctctgcttcggtttcgcgattgaagcttgagatttcatctgtaagatcatcttcttcttcttctctcgtttctttttttccttcgaaatccgtcgattaggtcatttttagtttatcttctcctgttaatggtacttgttttgatcacttcttgttgaatcgaagcgatttcgtttgattttgctattttcttgttggtttcgtttcgttttgagcgccgagtacttggattggtcttcacagatgatcgattcgtcgattatctttcatttgtttggattagttctgtttttcgattctatttcagtttccaattgatgtagcttagactagttggtgatttgagtgttttgatgtgtatttacatgaaatcgatgatggatctatgttcttcgcatatctctgatactttagcctttcgcgttgttagatatttgcctaagatgatattgagttgcattagaacagtgaaccatcgtagaaatgtgtgcttcatttctctgctcggatttgaacagtcattttttatggtttataagattggattctgctggaatgttgaaggatttgtctggtggttattgtatgaaatggttaagtagtgagaataatttatatggcctgttttgagtttggtatatgattgaatgagactctccttttgtttgcatattatagtgaacatccgatatg

SEQ ID NO: 13352 - DNA, 3000 bp, Unknown
  misc_feature (1)..( 3000): cDNA_ID_1807296_gDNA_ID_2214620_Annot_ID_135858 3000 nt of promoter + ATG
gacggtgagggggaagctctttgatgtctctgtagtgacggaactcgggatcatcagcacatactgcaatgatcttgtcgtctttctcaccctgcaagtttcagaacaaggtgattcctggtttcttactaaggtaatacattacatagaggtagaattgggtttaagagtttttgttacctgatcaatcatgggcattagaccaatagcacgggcacggaggaatgatccggttagcacaggctcctgcacagtattttatctcaagtctgttatttcactgcctgtttacatcaagtttgtatgaacatgaaagctaagatgaggcgagagaaagcacctgcatcagtaccaggacatccattggatcactgtcttcacagatagttcgagggatgaaaccgtagttgtgggggtacacaatggatgagtagagaacgcgatcaacctagagaggaaaactttcagtgatcagagtttttcttcatttcgactcttacggtgaaggatatttagttggaatgcataaaatgtgacttatgatatatctagcaacaaagaattcctcatataaccgcataatcagactatatattgagggatcagaagacaggttatactcaatcaaagcatatatgatgcaagcagagactgccaaagaacactgtaccttaataaggccactgttcttgtctagctcgtacttaacctttccacctttgctaatttcaacaacctgacaaagaattcaagcacatttaacaatcacaagaccagcactaactttcttaatatgatctaatcttccgcaatgtagaagaagataaaacttacacagttgaaaacagtaggagcttctggacctgaaagattcaacaaacaaaacacttacatcaaacaatcaacacttgactcacatgactattcaaagtaacaaagacaaggattcttaccaatctccaagtcatgccaaggatgagcagcagctgatctgtgagtgaaggctgcaaagtttctctcattcagcgtaacattagggttcctgagagggaaagcatagcccttggcgcttccttcatccttgatttcagccatatcggatgttcactataatatgcaaacaaaaggagagtctcattcaatcatataccaaactcaaaacaggccatataaattattctcactacttaaccatttcatacaataaccaccagacaaatccttcaacattccagcagaatccaatcttataaaccataaaaaatgactgttcaaatccgagcagagaaatgaagcacacatttctacgatggttcactgttctaatgcaactcaatatcatcttaggcaaatatctaacaacgcgaaaggctaaagtatcagagatatgcgaagaacatagatccatcatcgatttcatgtaaatacacatcaaaacactcaaatcaccaactagtctaagctacatcaattggaaactgaaatagaatcgaaaaacagaactaatccaaacaaatgaaagataatcgacgaatcgatcatctgtgaagaccaatccaagtactcggcgctcaaaacgaaacgaaaccaacaagaaaatagcaaaatcaaacgaaatcgcttcgattcaacaagaagtgatcaaaacaagtaccattaacaggagaagataaactaaaaatgacctaatcgacggatttcgaaggaaaaaaagaaacgagagaagaagaagaagatgatcttacagatgaaatctcaagcttcaatcgcgaaaccgaagcagagaatccgtaacgtttttttctttctttcttctctcttcgtttaagaaaacaacaagattttgcagttacagtagagttttcgtgtgactgtgtgtgtggcgcttctttatgggacgttggaggaggaagaagacgctgacgtcactttttcctcggttattgttcatcgtcaatcgtacgatgaatcgtgtccgttgaatttgaaaggttaatggatctgacggccatggtttttcaagattttaatatctttcttaaaaaaatagttagtgtaccttttaattgaacgaaaagaaaaagagacgacagtgatgtaccaaaaaagtatccgactaacaaattgttatatgacgcgtgtcctgaaaattaggcaatttctttcagtgaattccttattttattttgtctgtttttggcaaacaaatttattattttcttaggataaagaaatgaatttatatcactcattcttctttctttcttttttgttttcactcaaaatcagtcactcattattctgtgtatttattattttcttttttgttttcattattctgtcacaaaaacaagttgaataacaaattaccacttttgatatttttcttttttcataagtatctaatatgtcaaatgggaaaaaatgatcattattgagctgtggggttaaccacaaccaaaaaaactgtgtcgtatggatgtgaccatcgagcagtgtttttttggtgactgtcaactagaattacaagtctagagaatcatacgcaaaacgttaaaattcggtttaaggtcccagagaaacaaaaaagattcggttttggattctttctggttgggcctcacagaatatcgaatcgttccatgtaaaaaccaaaaaaagttcaacatattttccctactgggcttaaacaaatattttatgaagcccaacatgtttaacaaaagtatcttactttgcgacacgtgtcatgttccttctccccacgtcattcagtttcttcctcttctttccagaaaaaccaagactttaatacgactaagaaaaattcagacgaaactgagaaactttcaatttaattggttcaaaatcatcctaaatcgagtagattgttttgaatcgatttttgaagttgattcgaagttcagtgattgtgattagaatttataaccagacccagtttttgaggtgaagaaaaagcagattttgtgttcaatttcc

SEQ ID NO: 13353 - DNA, 3000 bp, Unknown
  misc_feature (1)..( 3000): cDNA_ID_2702769_gDNA_ID_2214620_Annot_ID_135859 3000 nt of promoter + ATG
atatagcaatgagagattactggagagactctataagacagtttccgaggaagtgcagtgcgtaaaaccgcagactgttgtccaattcagatatgttgtactctttgatccgagaaaaagatggtgtaaaccaaaatggaacatttcaaagtctgaaaagagagattgaatcagctccaaggcataagggaaacccgctaattcagcaagactgtttaatttcctataaatattctatttttattttcttttcagatatttattcatcacttatcagcgatttgacgagaagagctttttggtttctgcgaatcatccaaaatccgccatggaagcaactacaagaatcttgagtacttcttctgctctcaatcgtcttcttcttctcagtaagctcaatctaaaatcagatccccgtaatatcaattccacaaatcagctactacacaatgccgttacccgaaaatcctctatctccgccgctcgtatacggtgctcttcgctccctgcgaatgcgaatctcttcagatcactcttcttcctaacgtcaacgtttcgtctcgagaacaccgccgttcacgctaatccattccgatccgaacctaacgacggcgtcgccgtctggaacagagctccacggatcgtgaacggaggtggaaacgcggcgatattcggcgggaacgaggggaaagagacgacggtggttctccttggttggctaggagcgaaagctaaacatctaaggagatacgttgagtggtacaactccaggggaattaacgccgttactttcactgttgacgttagggatttgctccggttagatcttggtcggcggcttgaacgaaggatagctgaatttgggaatgaattggttaattgggtatcggagaaagaagatgatggtagagagaaatgcttggtgtttcacagtttcagtaacactggttggcttgtgtaggttgatgaaaccaaaatccttcaaaatcctacattgtgattgcgattgtgatttagtgttgatttgaattagatgatgaattttaagcatggtgggcttttttacttttggtagatatggtgccttgctagagagcttcattggtagacaagatttagtagaaaggattaagggttgtatcattgactcgggaggagcagatcctcttgatactaaggtttgttctctctttcatgtaaccaagagttttaaatgctattcaatggtttctccactgcttcaagatcttgtattggaagtggaaatgtcaatattgttgtgaagtgaaaaattctatttgagctatgttgtcctctttttcaataatgattcattttatgctagtgtgaaagctttgctagtttgagttctatgttgaagaactttgtatcgattacaagcatttgcagaaccatggctaggggacttttgattttgatatctaagcaattagctttgtagatagataactcagtacttagaaaagactatatagctatgagttaaaaccgctgatttcttttggttacgtagccatcactcacaggtttatagtacatcggcctatatatcttgtgaatgtgatcttgttctcttgcaagatatgatgtcttaggcatgtgaacaagataaaatgagcttcatagtatgtgcctgagtttgttctgaagccccttttgttgaaaattgcttaatcattgcgtagtcctaataagccatcataatcattcatcttgcataagattagcaatgcgtacacctgtgcagattttatagatcaacaattgaattctgttcttttgcagatttgggcagcggggtttaccgcggctatactgaagaagcgtagctccaccataaccacagaaccaaacagtcccataaaagaagaggatgcttcaacaccacaaaagaaggaacctttaggaatcgaaaacataatgctatcatctctggagaaactcttccccatcttcttaaaccacccagacgtcaatacgtaagcttcacaccacacagtagacaacccatctgcttcttctttgtatattaggttgattaatctgagttattgtttgtatcgcaggaggctaacaaaaatcattcaaaaactatatgagaaccatcctccatgtcctcagctctatctttacagctccggggacaaagttgttccatctcattccgttgagctccgcatccgagaacaacagaagattggaagaaagatacattctttcaatttcaagtcctctcctcacgtggatcattaccggaactttcctgacttgtattcctcacagcttcaaaacttcttgcaagaatgcttcacaccaacaaaacaacaagctctgtgactttggaacatctttttttgcagaatatttgtagccttggtttgtttgtttgttttctcctcaaaagttgtttattattgatgatagaacaagataatccgaaggagacagaaactccaaactgtgtcgacgagctactgagcagagatagtttctgaaactcttagattgttgttgctagtttggcttcatatgtgaaacttgaccgatgctcggacaaagaaaaaatgtaaacctatttcattcccttgttcaacggtgtggtctaccccttcctcaaacggctcgtcttatattaccttaaactacgtcgtgttggattctttaaacggcgccgtcttgccgtaccataacacgacatcgtaatagctttccttaaaacggtcgtatcaactttccttaaaatgtagtcgtaggaatattttgccgttttgtttgttgaaaaactacattagagaaagaaaacgacacacatgttaaagcagaatgggtttagaaatggtcagaggagagttgaggattttgggagtgggaatcgatttcttgtgtgtctgtagctacggattcgattcgagtgaccaaaggaactcgatttattggttctaaagtctccaaatcagaaaattcagagacgagccctaa

SEQ ID NO: 13354 - DNA, 3000 bp, Unknown
  misc_feature (1)..( 3000): cDNA_ID_1974419_gDNA_ID_2214620_Annot_ID_135866 3000 nt of promoter + ATG
tttataaaaataaaacttgcaagttttaatatattacctttaaaaaataaatcgttctgcggtataccgcgggttaaaatctagttaacatataacggagaaaatcactcatatgataagtgataacagttgattgaagaataaaatcattgaaagaatcgttattaatatacactcttccgtttgatttgttgaatcaaatgtgttaaacatccgttcaaaggacaaggccataagcgcctgttcaagtcgaggatcgcaaggtaagtttcctataccgctacatgtgtacgtgaaataacatacttaaagtatgaggttatatggtctgcgaatgcatgaaccaaaaccaatgaatgatggtcattatcgacgacaatgattttgaatcataagcgagcaagacatgacctcagaggtggcaaggagatctgagtatccgaacattgcgagtcttaatgacaatgtgagatttcacatggacacggtttctcaaaataattagtatttgttttcgtgtttttttgtcgttatatgttttcaatcgattatgtgtcaaactcatacagaaatatgatattacaatgcttagaacatggttataagtgataattataaaatatcattaaaaataatttaatattatttataatatttgtttaatagattttttttttttcctttttggtaaatgcgaccaatcagaggatatcacgtcacatgatactggtatcaaaaacatcattgagctgatcaagttcattttaattattttattaatataaaaataatttttggacttgtgatactatagaaatatcactcatgtacatggtcttagtttccccaaatgtacacttgtattattgaaactagaaaagaacccgtgatactagtaaatcttttatttattatgttgtaatttaaataaatatatatttagatattcaattcaacaattaatatctcttgcatttttatttatcaaaaaaaaaagagtacaaagcaaaatattcagagaaaaatagagtccataactccatatatgtttgttttcttaatgtcatttactcaattatttttcatatataagtaataaccaacatatagctgtcaaaaaaaaaaaacaacatggttggaaaatggtcacaaataaaacactgctaagtttgccaaaaaaaaaaaaaaaaaaactgctacatgcaagtggagctaccacgcaaagttagaggcttaaacacatttactaaaaagtaaaactttaggtacgaaagttccataacttctcaccttctctgtagtcgaagaatctgaggattgataaatgttttaaacaaagaagcacaacaagcgtaagaaaggcgcagaagatctctcgaagataagatcccaagatttggagaactagtccgattctctaaccatgttcaaaggtgaaaattaaaaagaagacaagaacacctgaatattctttgataaatgtacttcttttcacatctctaggccagccagtaacttcgattcaagaactcaatcatcccaagagatcaaagagatttacacaagatgaactagtttacaagaggctgcacaaaagaaaagaaaaaaatggtttggttagtgaggaatcatcttgattaatttttcattttaataaatgaacatatcattgtcaaagaatgttattccgtggcacccacgaatgaacatgttttagagggctaaaatctctgattatgccaaagtacatcttttttagtactgtgtgtcgtctgagatttgtcttattgtctaataattggaatcatgttctgacgtacacctactagctaaaggcaccagacataaatagtgtttaatattcagcaaaatcatcgtccttttctatagatgctcaatataaaccagtaaatgtatagattacccaagttgctcaacgatcttgaagccaataatggcatgattcgctttttgtcacactccggtgattaaagacttcaacagagctaatcagatcgaaaagacatctatcactgcaaagaagtacttaactatatacttttctcgatcacacaagatggaaaaattgcaagaaatattacacacaagcttaacaattcacctacaactacaacactacaacagatactcaataaatttcagtaaatataagattacctgaagttgctctttttttatttattgaataccatgaggttttaagccgaaacccgtaattctccaaagcccgaaatcacatcatgtaatattagtttcatctcaaacgtcactcgaaccggcgacctctaagcatgtaaattgcttaacgatctttggagccaagaatggcaaaatcacaatcccacaatggaaacaatataaaagttaactaagctaatccaacaatgcaaagaggaactctatagagattatattattttcaatcatacaagaaaaaaaaattgcaaaaaatattaaacacaagcttaacaatcacatgctttatgaatagtatcggatacgatagggggttaattcgacactaatgatgatgataagatccaaaatgctgaaagaggtaagggagggtccaatagttattggtaaactttacggacactagcaagaaaaaggaagcctcctaatttccttatagcaatggtcaagagaatctcattccactaaaactattaaacctttattatgtcctttaagggactagactctaatgatcattatcatatcaaagcttctatcaaaacttttgtcccttcactaaaattttatgtggtagctaaaagaatggtcattctaaaaatctctcatttcaaagtatatattcttccaactggcttataaccccacacattgcttttctcctcctacatataaggagctccacactccctcaaactaaaccaattcaagtcatctctatccgtcaacaatacaaaccaaccttctcaattcctctcttttcatccacattttcactagcta

SEQ ID NO: 13355 - DNA, 3000 bp, Unknown
  misc_feature (1)..( 3000): cDNA_ID_2713501_gDNA_ID_2214620_Annot_ID_187657 3000 nt of promoter + ATG
ggtaatccggacgatgattttggcactgatgctaataatacattcgagaacaaatggagagaacgctggacagctcaatctcagaaggcttcatattcgaaagactcgacagcgggatttgaatggagagaaggctggagctggaccactcaatctcagaggagcaaaagttggaataaagagtcttttgatgaacctttgaacgttgagtttaggtctgagaggattgttctaggattgcctcttgatggtcccatcaaggttgatgatgttaagaatgcgtaagtcttcaaattgcttccattgctcccgagaaaccgaaaaagagtgttcattgaaggtttcttgttttgcagcttccgatcttctgcgttgaagtggcatccagataagcaccaggggccttctcaggtatggttttttaaacaaatattggattgtttcagtttttttatttgaagttcatgtgttgataaattgttttcggtaatgctgtggaactcgcaggtggcagcgcaagagaaattcaaactctgtgttgatgcatacaagtccctctgttctgcactcgcttgacgttacacataggcattgatgcaccattttagcattagttgataaggctgcttctgaaacgttttcgagagatacaccggtttttagatgatgggtttgatttggttcatgagaatccaccagctacaagattgcacacggcacaccaatgtgtctctcgtccttttccaacatttgataacaaaaacatgtatgtgaaagatttatgctagtgcccaacttttagctgactgcttctttttttaaaacacactgatgtgaaagacaataacttgagaatacatcgtgtatacaaaacactattaaagcaatttattttgtacaaaaaaaaaaaaaaaaaaaaagagaacatcttttatgtattttgtctatgtccaagctaaaactagacttagacaaacatctccaaactctaaaattccaaaactttccaacattcttgtataagcaaaggttgatgtcagttagccagagagctccaattcagatttgatcgttggatcaaaactatgattcatcgacttcacacaggtggcatggcaaaggttccaactactgacctgtgaatagtctctgagtccagagttgttagcatatgtggaatcgacataccacccgagatgacgatttctgttgaaaaaagcaaaaatagagcaatgagatggatttgttaaggcaccaggggcgttttaagagttgctagatcaagtcacaagttacctatgccttcccggactgagagattaggtcttatgatgtcctttgagctaatgaggaaaatgtctccaaggtaaagatggttggtgggaacatagacacaacatagttcttctccaccagcacggcctcgaagaatcacagtcgatgtaatgaaaccaaaagcgtattctcccatatgaggatgtctgataattgctacctccttgaatgcacctgagctttgatctgatgaaaaaaggtaataaggttagtcttatgactcttattagtacttgttggtaagtaaggttggtaaaattatacctggtgagattgctccactaatttgtttagaagctgagtagatgtagcttacgagaggcatcttcttgataaaccattctccgatactgagaactgaagctccaagccatgaagacatgaacacaccaaccataaatatgaatgtgatggatgttacaaagccaagacctgcaaatattcttcaattagactgaagaaacaagtgtgtttaatctcaatgcagctagagtgatgaacgaaactaaccgaacatattgattccgagatgagtatagatcggggagaagaatccatcaacgaaatgtataaaccaccacgtgaagtagaatgtgacagcgattggtagcagaatgacactgtaacaagagatcaagcacaagattaaagcgttttcgaaaatctttgagaataattaacctagaaacagagaaatttctgaatctagttagcaacaaacccagaaacagagaaattttaacgagaaacttagagattaccatccggtcatgaactttttggaggcccagcttctaatgactttgtaaatcgcctgtttgtacatgaaacattgaataacttaacatacaagtaacttcaaactataggtcaaacttgcagaacatttcacaatgttgatcaaattgtgtgatccaaatgtgggaaattagcgaataagagaaatcctctgtaatagttgttactatcgcgagagagattaggaaatgaaaaagagagagagagagagatatacctctttgccggcgacgtggatcggagaagcgagaggagacggcggaacagacaaaacgacgtcgcgaggagaagctccggatttatgcatcgggatcaatcgttctagatctctctccctcgtttccatttacccaaatctcaacaccgatctctccagactctctcagaaagtaacactacagaagaaaattgctatctctctctctctctgaatcgatttgtcgatctccgatgtgtcttctccggcgtgacgtgagtgagcaacgaacctacctgaagttaagagtgtcatgcatttctgctgctaatgcataccgaagtatttcactgctgcaacattatgggctttataaaccccatttacttataaatgggcctcgtacgaatcatccgatgtggcgtttcgttgaccgttgaaatttttacacacttcgttacccggtgtaggggcaaatttggaatttcatgaacattttcaaattctttataccaaattggcacgttgagagacttctcgtaaaccaggtctagtggcaatttcgaaattttgcagctacattttcaaaatcttaaagccaatttatataaaacgactcttcttccatttttgggttaacaagttcgtggtgagtagtggacggagagatg

SEQ ID NO: 13356 - DNA, 3000 bp, Unknown
  misc_feature (1)..( 3000): cDNA_ID_3029658_gDNA_ID_2214620_Annot_ID_187656 3000 nt of promoter + ATG
aaaacaaataaaatgtgataagaaacaataaaaccattttgaccaaagttcttatagttttaatattctttaattgtcatttgttagtgactaataatattacattaaacctaatgtataaatagaagccccatcttctacgcctttataattagcaacaaccaaaaacattcatttgtcattttgtctcctcttttgttttctctgatcactagtatggctgtattcagagtcttgcttgcttctcttctcatatctcttcttgtcctcgacttcgtccatgccgatatggtggtacaattttaacaaccaaatatattttcttatttgattttattttttcacaacttttgtctacgttctaatggaatttttttcaaaatattcatgcagacgtcgaatgacgcccctaaaatcggtaatatctctatcatataaacacgtacgttgaatttctatatacgtgtgtttaattgaagttttggttggaaattgtatgtatttgtagattgcaacagcaggtgccaagagcggtgcagtctttcgagtaggccaaatctttgtcacagagcgtgcgggacttgctgcgctaggtgcaactgcgtggcaccgggcacatccggaaactacgacaaatgtccgtgctatggtagcctaaccacccacggaggacgcagaaagtgtccttaaaaactctgtcgctgtttgatttgatttcgtttataatactttacttttatgagagtaattgtggttattttcttgggaattattaaaaagcaaaagaaagagaatgttatacgtcatgtgcaactcttcgatctttgttttagtgtttatccaatttgtacttgttggtttggttcctggttaacattaggtctgaaaaggtattgtttttcattatacaattcactaaataggcatcgtacttgcatataaaataaagaatgaagagagaagtaaaagagttttctttttttactcatggaagttaggcaatgggtttaaatatggtaacaacagaattggaggggacttaatgaactatgacgtaaaactgagagcgattgaatatgtaacgttaccaacaataccaataaaattatgaaagatagtatatgaaattacgtttaattaatgtttccgggttgaatgtattatatatagaagtaacagtacgatttttattacatttttgtacaagattcctagaaaggtataacctctataaagttaataatagtcttgagtcttgactcttcgaggcaaataaattcaccgcataattaatcgttcaactattattctatattctatataacatgagcttcaacaaaagaagcatcaatcatatcttcaacagtatactgcagtgtaatgtaacatattcaagatcaaaccggacaaaaaagcaagataccgtcgaaacaatcaaaccccatgtatcataaactcccatcttctctttcctaaattccccgtcgcttgcacaatccgcaattcaaaagcaacacaacactagtcacgttaagcaaatagtacatcttccagagttcagtgtgggacaatcctgttgatcacaaagagcaataaaaaaggttgtttcaagcaggagggaggatattgaaacaaatggaagaagaaaatgtttctgttctttgaaaattaataaattcacgtaataataggagaactatcagtcgaagggtaagagaaaataaattaaatataatcatcatttcaaaagttgaataacttagtttattttaaaaatgacgaataaccagaactgggtggattcgaaccaccaacctctcgtccactagaagaaaacgagcgctctaccaatttgagcttacagatctatatcacgaataccctaccactacggcccacagccaataggaccaacacttgactctttaactctattttaatcacatattaaaaatatttctgtttttagagaattcaatatttaaacaacttctaattgaagaccaaaagatgaacttgactaaacatgaacggtgatgctaaactgttttcaagacacaatttcacgagaacaagagactagataggaaaattgcaataagcttttctcattatataaaatgttataatgattgttctcttccacaacaggccacaataaactaagaaaataaaatgtaatgaactataaatatcaggaatttttgacttagcacataaccagatactatcttttgatcaagatacctttcaagaacaaatcaacttcagaaaaaaccaacgtcagctttgcatagcttcaattccgtcgtctaccagcttcatagttactacaggaactggtggttacagacatatacaaactacgagcaaataaaaatgttctttaccatattctaaaaagcttctaaacggatagaactaataaaacaataccaatgatacatacaaagaacccgcaaaattgtttaacagcaattcttaataccatcattttcaatagattaaatgacaacttgtaaaacaataattgatcaataagataaataacaaaaccaataaaattaaaatttcatgattcgcataagcgttgatacaagttaacaattagggcaaccggattatggtttatttaaatccagaattcctcttgcagattatgtttaccttattatgctaattaagaattcgatttaatatggatatgagtacctgatttaactctcgaggttgttgggcaagaagatttgtaatcgcccactgctccatattggttacaaactctgcttatgatcggtttttgagtgtatatgagcatttaagaaagatatgaaatgtgaaagagcagggagagagatagagcagaggcaagacgacacacacagaggagaagagatcccgggaaaaaataataacccgtgcgacctcctctccaaaacccacaaaatcttttttttattgaggatcagttttttgacctgccatgcaagcgcacctgac

SEQ ID NO: 13357 - DNA, 3000 bp, Unknown
  misc_feature (1)..( 3000): cDNA_ID_1010524_gDNA_ID_2214620_Annot_ID_187652 3000 nt of promoter + ATG
gggaattgaaaacagtagatctaatattgaagcttcttagacataaaaatgtatatatgaaaatatatatgttaagaacttaagatagtagaattattattattattttttaaagatgatagaaactaaggtgaaatagtactgtttaagctaagaacgaaaataaaaagggtaaagttaaagagaattacgaagtgagattcttggcaatgatcaaaagcaacatcttgtgttctttctttggcttggggagcgagagattcaattgatcagtcaaagaagcaaactccaactcaaaatatttttaaagcaaaaaaagtacaaaagcgaataaactcaactggatatattacaccaaacactcaattgctacttctttttctttttttcttcttccttttcccaattttgggttatatacttagttcgttcctctcttaaagtagatgatgttttcgccaagacaagaatattagtaaataactaaatatcaagtctttgataagcttaacacgaaagcaagttggcttaaacgtaaggtgatctcttcaaatagtttttctaatgaaatatatatgcatttttggttgaaggaccaatgattaaaggactcgttctaaagttagagaccaaaattcgagttataattacaattataggtggtcaccgtatattttgccgtaaatatgaagaatacctttactttgtccatttcttattttcttgtggcacactccaaatatgaaatgaaattatactttagtcaggaaataatatgatcaaacaagattcaaagaatgttaaaagattcaacagatcgacctaaagagaggaagagtcaggctttaagcgaacatagagaatcaaatcggagttgctattggtgatctcttttgtttaactaggaggactaccgcttttaattaaagaacacatgcactttgtttcatgaaacaagaaacctaaataacgattaccccaagacattaagtattcggctttggcaataacgccgtttataaatcacataattatattgtttttttgttaaagaacgagataaatattttttgaatcatctaatattcaaatatacaatttttatgcacaaatgtgattaaaatgcatttgatgtcttacacactaatcatctgggtctgggatcggaatttacaaacgttaattttgtatttgaatttacttgttaaaaaaagaatttaaacattatacttaatatttcttcactttcattcttacaaaacatgtttgcaaaataaaaattgaaaatgtcaaactttcatttagttgcattaacaatcaataaataaatttttataagcatattaaaattgtgaatttagttaaaatatacatattaaattcaaacataaacacaaacaaacaatgaactcaaaaaataaaataatatgtactttattttgtacgtatatatcaaagatgcatgcatgcaaaaagaataagagattaaatatgatctaaccattaattatgttttttgtttgtcaaattactgatgattaactcgcatcttggatccgtactttatgatacggtccgtctccaacactcaaacaagaagaagaagaagaataaaacaaagagaatgacagcaaaacaacaaaaaagaaaaagaacaaaacattccctcaaaaggatcaagatcggattggtacgtgtttctttttctttgtttcttaataacgtttcattctcgagtttgaccgtttcactttctagatgacgtatggtccacttatcctcttcaggtgtatgttctacttctcgttttctaaacctatatgtttatagatgatttaaccttaagtacacaagagaaaaccaacctctaatccacaaagtgattcaaccgtagagggatcgaatctatatataatctgcaacgatgagtgttatattttaacagtttttaatgtataaaagtactctacgagattcaaaggcagagaaagaattttaccatctatgaaatttgtatataattaaacactatgtaaccaagtgattaattatatacggatagcttgagaaatcattttggtagattgagaaacttttgtctcctggttacggatagcttgggaagggtctctactttatacctattctggtttctggcttaaaagaaatttacaaatttctaccaaaacaatcatctctaattacgaatatgtagtgtgtttaatgtactgtatatatatttttttgagttttagaccaaagatcagattctaccaaaaatgactgtgattcttttaactatattgtagatgccttaaataaaagaaattcaaatacttttgagattagtctaacatataccccaattatcaaagaacaaacatattttctgcgcaattggcgtagctactcctttaggttattttgaaaattatcaaagaacaaatatattttcgttctaaagtttaatatccatttgattattttgaaaatttggttcggtttcggttcggttccggttctttcagttttaaaatttagttaccatttagttattttgttttgaatatttttggatattttgttattttgggatattattggatattttcggataatttttgcttatttttgagtattttattattttctatttcggttcggtacaaatttggtattttattattttggtttcggttcggtacattcagttcggtttatttgcccaggtgaagacgtagccactaaaccataagaacaaggcccatacttatcgcacatgggcttttaactgtttattatatataaaaagcccatcatgtggttcgttacaattttctgttaaaatgtttggcccattgtcgccgtagattgtcttctccgttcgaaatcgcatccatcgccgtcgtcgtcggtgacgaaaaccaccgcgtaaaaccgtttcctaaatcagatgttcaatcttagaagtatctcttagaagctctcttgtatgaaaaa

SEQ ID NO: 13358 - DNA, 3000 bp, Unknown
  misc_feature (1)..( 3000): cDNA_ID_1034834_gDNA_ID_2214620_Annot_ID_187649 3000 nt of promoter + ATG
ttgagatatgtttaggtacttattcgagttcggattcgggtttttcgggttttgaagtttagacccgttagactattttaaaagttcgggtctaggttcgcatcaggtttttcgggtcgggttcggatcggttcttcgggttcgggtattatgcccaggcctgaccaaactgattcttaactaatgattaggagttcataaatataagtttttgcaaaattaataaataaaaggtctcggtaggtataaagttaaatataaaaccacataccaatttttcttttttcttttacaaacatatatatatgactaacttgtctatcttttgtcgttagagtttgtaaaacaaagctaaaacgacaagatagctactagtacttacagctatactatagtctgattccatatttactatttatttttaaattattattactggaatttgtaatctagttatgacaagctctttatcgagctccgggatcaatttcgtgtccatatttgaccatatggatacttaataaagttgctaaatatgtttttaagaaaaattatactatagagagccagtggcagagtttgagtaggtatatacctcaatgaaatccttgaagagccgtttcgggaaccacatgggtttatgaacagcaagggtgaagagagtcttgagccctttaaccgaagttggtaacaaaagatccgccgacgacttaaatcctaactggttcaaattagactcactgatcgtatcagtcatcgcgagtatcgaacctgataaagaaaaaattgttcttagtgtatgtaagttttaataatgaaattacaatgtataaatataaaaaaaaaatagacttttagaataatttacggtatcttgtaattactattattgatatacgaaaagaggagtgttaaatgtgatcttgaactcgcggtatgggagtaatttccaagaccatggttttaggaaaaccgacacaccaaaactcgcaaaacattgtagcatgttttaaccactcgcaaaatattgagtcatccaaaatatagtaatcacctgaaaccaccatggcttgaaccatctcagggtactcctcggcgatcttgaaagcaaccatgccaccgtaactaaaccctacaagagtaaacttttcgataccgaggatacgaagagacttgactaaacagtgggcttgaaacgctggtgatcgatccgcgttgtcggagtaggacccaccaaagaagaggaggtctggtatatagactgagtacttcttggctaatgatccgacctggaactgccacgtcacgatcccttcggctgcaaagccatggatgaacaataggactggtttcgtaggtttttggggttccacggcaaagtttttgtcagattttttggttttttttagggtttcttttgggatccagaagttcatctttgtccctggttcaagctctacggtgtaaggaatgacaccggccaatttcatgaggcggtacaacaatggtttttgtaaatccacaaagttcaccattgtatgtactctttttcctttcgttcttgtttggatatatttagagggagagagatgtaagaagatgatcaatagcaaatggaaggtgaagattttaaagcttcttgagttgggattaattataatgtatctggtgttgggttcttgtttatattcaaccaagcatttattgttttacacattttatatacatatcttgtttgacgttttgaatgataagtgacaacttgccaaatagcataataaactcactagtaactagaacattttaataacaaaagagaccaaaacaaaaactgtttttcttcagtcttttatgtaaatatttaagttttcgaagtataagaataagttttgtaattgtaataatactatcattctattacacctgtatatacaaattttgtttgaagatttcacctttttctaaagttaccaaccaaaactaataaactattaaagtattaattatcaagggaaatcttgcctcattttaaattaaataaggaaaaattagagatgatggagttcttaataacttgctttgcatgtaatctctgaatctagtcagaattggaaatctgcacttcctacttgtatcggtatgctgtaaacaaaaattattgttctttttggggttaattactagatagtcaaaaaatgtttttgttaaaattcacaaaaaggttgtggctaaatcgtaaataatgtgcttattctcttcatttttgtttattttgttttctatgaaaagtgtgtataacatataaaaaataaaataaattataaatgctttattactcttttgtaaaataattatttacatcattgtaatattgaataaatatctgaaagacatatatcatctacattattcatcttcgttttgttccggatgttattggtccctttcttactactgcaaagaaagcccacgtcccatacctcctatgatttttatattctcaattggttttctgaaaatattttattataattattgagctatacgcaattagacaattacgcacatctaatttacgtactatataatttatctaatctactcctctgtgattaatattaatgaaccatttctagactaacctccaacacttaagtaattaaacacgtcatctttgagtgttgtagatgtagtcaccaattgtacctaaaacgattataagttgattgaatatggacaaacccaaactgacaagaaatctctataacctaactacctagatcaaataatatttatttttaagtatatcataccaaaatgttgaaacttatattttcatttcactccatcaacccaaactaacatctactaattctcttattttaatataaatttcctagtccgccatatatataaacgcttcgtctccactctacatatttagcaacaacaaagaaacccctaagatttttatttatttttttctcaatttcttcaacg

SEQ ID NO: 13359 - DNA, 3000 bp, Unknown
  misc_feature (1)..( 3000): cDNA_ID_3029670_gDNA_ID_2214620_Annot_ID_187648 3000 nt of promoter + ATG
aatttcaaactcctaatgaaatgtttttctatctacaatcttggatactataattgttgaaagagcttgtagtaatggtaattatgtctttggtgagtataaaataaagtcaactgcttcagaacattaacatgttcttgacaaataacataaaaatatgcttcccacctcagcaaatatttacccaaaatctcttgcaagtcgttctgtttttgggttttaaaaagattaaagaaaataacacggcgaagcttagaaaatgattgtgaatttcgtattactaaaagctgagttcgaaaatgattgtgaattttaccacgaatctattttatttgttaaagaaattttaccacgaatctaggccactcgaagtgacaaagagcagaccattgacaaatcgcctttcatattgagaaccgaataattgatacagtttatttttagtttgtgattcaacatagagccctcgtaaaatattcaacatcaagaaacgctgtgttttcatgactcatcagttcacaacactgtaatatccaaaccaccggggtaaatgattgcattgcatgcacaaatgcacacaaagacaactacacaatacacatgtacatgtacatacatgaagaaactaaatgaaccttacaacatgtgtacattcgcctacatatattatacggcgcctttattgatataaattgcgtacttaattaggacaagatggaccattgatcaatgttgagaatttctcaaccaacactgcaaaaacaaaatcaacaatgtattatttatttcagcttttataaagtttagaatttaaattaaacagacaaaattcaaaaatgttaaatattataagtgcataagagatacaaattatatcaaaattgagtaaaagcatattgttctaaacaaagttatggtaaacaaagtaaactatcatttgtttaatctattcttatactacctagagttagtatttttttttaaatagataaatcaggaaattagtcataacaacagataaaagtttcaaatataattatattcgttaacattatgttcaccttaagttcttcactataaagatagtatctcaaactttaatgcttgttagtttctatataaagttgaactaaaacacaagacactagacaactaaaacaatcagacacgatcatatcattcaaaacgtacgtagtgcagtcgacagtaggagaagcatcaacgggcaagctcgcaccacaattgctagcaagggcttgagccaattcaggcttcacggtaacactattagccactgacttgatgcattgacaagctgccttcttatcggcagatgtggtggttgccgccgctaaactcttaactccgtcgcaacaagtctccggagggtttccacttccgctggtcaagtagctcacacatggctgcaaatcctgtaacacaacactgcaagatatagcggattcagaataacgaggtatgaagaatattccgagaacggaaatgatcgctagacatttcaatacattcatcgttgaagaaattgagaaaaaaataaataaaaatcttaggggtttctttgttgttgctaaatatgtagagtggagacgaagcgtttatatatatggcggactaggaaatttatattaaaataagagaattagtagatgttagtttgggttgatggagtgaaatgaaaatataagtttcaacattttggtatgatatacttaaaaataaatattatttgatctaggtagttaggttatagagatttcttgtcagtttgggtttgtccatattcaatcaacttataatcgttttaggtacaattggtgactacatctacaacactcaaagatgacgtgtttaattacttaagtgttggaggttagtctagaaatggttcattaatattaatcacagaggagtagattagataaattatatagtacgtaaattagatgtgcgtaattgtctaattgcgtatagctcaataattataataaaatattttcagaaaaccaattgagaatataaaaatcataggaggtatgggacgtgggctttctttgcagtagtaagaaagggaccaataacatccggaacaaaacgaagatgaataatgtagatgatatatgtctttcagatatttattcaatattacaatgatgtaaataattattttacaaaagagtaataaagcatttataatttattttattttttatatgttatacacacttttcatagaaaacaaaataaacaaaaatgaagagaataagcacattatttacgatttagccacaacctttttgtgaattttaacaaaaacattttttgactatctagtaattaaccccaaaaagaacaataatttttgtttacagcataccgatacaagtaggaagtgcagatttccaattctgactagattcagagattacatgcaaagcaagttattaagaactccatcatctctaatttttccttatttaatttaaaatgaggcaagatttcccttgataattaatactttaatagtttattagttttggttggtaactttagaaaaaggtgaaatcttcaaacaaaatttgtatatacaggtgtaatagaatgatagtattattacaattacaaaacttattcttatacttcgaaaacttaaatatttacataaaagactgaagaaaaacagtttttgttttggtctcttttgttattaaaatgttctagttactagtgagtttattatgctatttggcaagttgtcacttatcattcaaaacgtcaaacaagatatgtatataaaatgtgtaaaacaataaatgcttggttgaatataaacaagaacccaacaccagatacattataattaatcccaactcaagaagctttaaaatcttcaccttccatttgctattgatcatcttcttacatctctctccctctaaatatatccaaacaagaacgaaaggaaaaagagtacatacaatg

SEQ ID NO: 13360 - DNA, 3000 bp, Unknown; identical to SEQ ID NO: 13354
  misc_feature (1)..( 3000): cDNA_ID_3029686_gDNA_ID_2214620_Annot_ID_187644 3000 nt of promoter + ATG

SEQ ID NO: 13361 - DNA, 3000 bp, Unknown; identical to SEQ ID NO: 13353
  misc_feature (1)..( 3000): cDNA_ID_2702769_gDNA_ID_2214620_Annot_ID_187637 3000 nt of promoter + ATG

SEQ ID NO: 13362 - DNA, 3000 bp, Unknown
  misc_feature (1)..( 3000): cDNA_ID_3029708_gDNA_ID_2214620_Annot_ID_187636 3000 nt of promoter + ATG
tctttatgggacgttggaggaggaagaagacgctgacgtcactttttcctcggttattgttcatcgtcaatcgtacgatgaatcgtgtccgttgaatttgaaaggttaatggatctgacggccatggtttttcaagattttaatatctttcttaaaaaaatagttagtgtaccttttaattgaacgaaaagaaaaagagacgacagtgatgtaccaaaaaagtatccgactaacaaattgttatatgacgcgtgtcctgaaaattaggcaatttctttcagtgaattccttattttattttgtctgtttttggcaaacaaatttattattttcttaggataaagaaatgaatttatatcactcattcttctttctttcttttttgttttcactcaaaatcagtcactcattattctgtgtatttattattttcttttttgttttcattattctgtcacaaaaacaagttgaataacaaattaccacttttgatatttttcttttttcataagtatctaatatgtcaaatgggaaaaaatgatcattattgagctgtggggttaaccacaaccaaaaaaactgtgtcgtatggatgtgaccatcgagcagtgtttttttggtgactgtcaactagaattacaagtctagagaatcatacgcaaaacgttaaaattcggtttaaggtcccagagaaacaaaaaagattcggttttggattctttctggttgggcctcacagaatatcgaatcgttccatgtaaaaaccaaaaaaagttcaacatattttccctactgggcttaaacaaatattttatgaagcccaacatgtttaacaaaagtatcttactttgcgacacgtgtcatgttccttctccccacgtcattcagtttcttcctcttctttccagaaaaaccaagactttaatacgactaagaaaaattcagacgaaactgagaaactttcaatttaattggttcaaaatcatcctaaatcgagtagattgttttgaatcgatttttgaagttgattcgaagttcagtgattgtgattagaatttataaccagacccagtttttgaggtgaagaaaaagcagattttgtgttcaatttccatggaagacgaaccaggaagcgaaaatgaagcagacaccatagttgcttcaccacttgcaaaatggagaatcgaattctcgaaatcgtttcagaattacttagacagatctgctcctaacattgttcgaagatggcttgtgactttagtcgctgcagtgatctatatctatagggtttactctgtttatggatacttcgttatctcttatggcttagctacttatatcttaaatctcttgattggtttcctttcccctaaagttgatcctgaacttgaagctttggatcctgattctttacctgttgatgagtctgatgagtataagccctttgttcgtcgtcttcctgagttcaagttctggtaaaatttctcttttacttttgatgatggatgattttgatttaggtttgtcgaaaagtttgtgtttttaccattcattgttaaagttctggtagatttcttcttttgagacaatttgattgatgattgttatgatagtgaattcgtatgagaactgatttaggtctaatggtctgctttagggtttgaattctcatgaaagtttgtcaattttgattttcaggtatgcagcgactaaagcatttgttgttgcatttgtgatgacattcttctctttcctggatgtgcctgtgttctggccgatcttgttgtgttactggttggttttgtattctttaactatgaaacgcttaatcgtgcacatgttcaagtatagatactttcctttcgatgtaagaaagcctgtgaagctgctcaagtttcttgtaaacagtgtcctgacctttttaagactcaaggtaaatcgtgcaacggggtgatttgtattcgatttcttttggatagtcttgaatctctgctttagaaagttaagagtgctgaacatagattgtgctgatgtttttgacagaagggtgatggtggagatgataggcccagcagcagcaattcatctcagggaaatgaaaaacaagattagatgcgaacagtagatcaggtactgatctcgacgtggtgataggcgaagcaagaaaggatacaaactaaggatatcaaagtaaaatatactatagccatgctggtggaataggaaaacaaagttcttgaagcttaacagaactaagaaatctctctgagttttgagtaatctcctgcattttccggtttttgcattgtaatgtgtaacagtgtattttacaattatacgtttaaatgaatttgggaatcacaagtaggaaaaagtattctttacagttccaggacttggatactactctggacacaactaatcacacaaagctgtgttgacagcctccaataccaagcactggtccaaatctctttgcagaaacagatacagattggtcatcatactcggagaactgtgtggactcgagtgtacttacttgacttcctaggttagtatacttctcaagcatttatgtctcttgacttctattggtttagatatcggtttggcaaatattcatagggtttatgcacaattacatttgcaacaacaacaaaatatagtgaaggatatagcaatgagagattactggagagactctataagacagtttccgaggaagtgcagtgcgtaaaaccgcagactgttgtccaattcagatatgttgtactctttgatccgagaaaaagatggtgtaaaccaaaatggaacatttcaaagtctgaaaagagagattgaatcagctccaaggcataagggaaacccgctaattcagcaagactgtttaatttcctataaatattctatttttattttcttttcagatatttattcatcacttatcagcgatttgacgagaagagctttttggtttctgcgaatcatccaaaatccgcc

SEQ ID NO: 13363 - DNA, 3000 bp, Unknown; identical to SEQ ID NO: 13351
  misc_feature (1)..( 3000): cDNA_ID_2702784_gDNA_ID_2214620_Annot_ID_187634 3000 nt of promoter + ATG

SEQ ID NO: 13364 - DNA, 3000 bp, Unknown; identical to SEQ ID NO: 13359
  misc_feature (1)..( 3000): cDNA_ID_2713515_gDNA_ID_2214620_Annot_ID_135869 3000 nt of promoter + ATG

SEQ ID NO: 13365 - DNA, 3000 bp, Unknown; identical to SEQ ID NO: 13358
  misc_feature (1)..( 3000): cDNA_ID_1034834_gDNA_ID_2214620_Annot_ID_135870 3000 nt of promoter + ATG

SEQ ID NO: 13366 - DNA, 3000 bp, Unknown; identical to SEQ ID NO: 13357
  misc_feature (1)..( 3000): cDNA_ID_1010524_gDNA_ID_2214620_Annot_ID_135872 3000 nt of promoter + ATG

SEQ ID NO: 13367 - DNA, 3000 bp, Unknown; identical to SEQ ID NO: 13355
  misc_feature (1)..( 3000): cDNA_ID_2713501_gDNA_ID_2214620_Annot_ID_135877 3000 nt of promoter + ATG

SEQ ID NO: 13368 - DNA, 3000 bp, Unknown
  misc_feature (1)..( 3000): cDNA_ID_2713545_gDNA_ID_2214621_Annot_ID_135881 3000 nt of promoter + ATG
cataaacggaaccaaaatctattatcaagcttgaagatccgggtaaattcaccataccttgctcacttggtgatttacaacttgatgatgccttatgtgattcgggtgcaagcgtgaatgtgatgtcacttgcgatggtaaagagtctagcgattaaagatatgaaccaccacacctcctccatcatgtttggagatgcttcttcaacaactcctcttggtttgattgaagactatccactcaaagttggtgattgcatagtcccaacggatttcatgagagtggagatgaaagacacacccacaaggttcctctcattctaggaactccatttctcaacaccgtgggagcaaacatcgacttcccaaacaagagagttactcttctccacgtgaatggtaaggtctcatatccaatcaagcctttctccacaaagttttgtggaacaatcactaatgaagaagtgaaaacaaagaaagagcctaaaagtttgaaggatcaacttgagatcaaagttgtgaatgtgaagaatagagaggctttaatggttgaacagaaaatcttggatggtgaatgtctacactttttgtttgatgagcaagaagaaagtactgaaaagaaggagttgagtaaagctaagttgggttttgagaagaacaagaggatgatgaaaacaacccaccctcccacccttgacaattcaccaaatcctacctcttctatgactttaacacctttgaggtataatgatggaattttagagtatagagtcaagtgcaagggtcgatccaaccctttttcatcggttaaagagattctcacaccggagttcaaagaaaaaggttcaaaaagtgttgaagaattgatgaaagaggtcctcacacttgcattcaagggctctacaaggagtttcacaactcctcctatcactctactccctaaggttcacaactagggccaaggtatggtcctatctatcttttgtatatactattttctttcattttgtctttgttttctgttagtttttttttccacggaattatcttcacaccgagacggtgtgaaataagtttgggggagagactaaccatctaatgttgtgttttgttttgattttatttctttgagtcttgcatagtcaataattaagttttgagaaaaatcaaaaatattttgaaaattttgaaaaatccaaaaaacaatcatgtaggtttgcatattatttttctcttttaggattgagtctagtagcatctagtttacatttgcatatgcataggggataatgatttaattaccttgtagaaattcaagtttaggattgaacttaaagcccttgatcacagttaatcgttgcttgatcatctttgaaaaaatggaaaacccatgcttagacttttgcgtttctcgaaagcaatttctacttgtgtgaagcttacatgacttttgaaatatctctatgaatttggacttaatttgatattgatttctcgcttatggatcctaaatgcattctcatggtagtctaaaagactcattcgggttatcttatacgttttgccaatcttttgttaacccgaatggccattctcacctttagaatggttttccctacccttaaccttaaaaccttttgtttcaagcctatgtattatttgtgagtgaggcctcttgtatgaaaatgctatagattttgaaatcttcaaagtattgagaacgacaaggttttagctcttgtttttagctagcttttggaacatctttggactagctattaggttgggaatgaaagatttaagtggttagattgaatacttgggattgggtttggaaaaaagaaaaaaaaaagaatgaatgaaaagaaatgtgtgatcaatggttttataggagtccctaggaaataagttataaataagaaagctctaaatctctaagtgtaaagagaaagtttaatatcaagctagttccccaaaagaaaagaagcttgcaaagctataagtatttgagaacaaagataaacttagaaaaaagattggaaaagagcaaagtgttaaaagaataagtcttccctaggtgactaacaaaagaggatttatcttgaggattgtggttcaaaaagaccaaagtttctaatgattggggttgaaaagaagaagaaaaaaagtttgcaagaagggtagaaataggagtttacatctaagacgggtagaacaacaagagctagactttgtatgcataaattgttcttggtcttagatggatttcatgattgtctagcattactttttttttaaagaaacccaccaaaatgtaaatcttttgaaaccacctccaaaagccttcaccaaaaccgattgagaatgatttatcttccatttgcgagaccgcgccaaacacttaaatgaatgttaaagagatgtttcaacttgattgtaagtctttgctaatagttggagatttaaaatagagctatgcactaagaagagtatggagaagtacaaaagagtatgatgattgattcaagcaaatttgaactatctttaaggactttgagttgaatccttcgtttgatattttgtggctatgaatccccaccttcaaacctctttctcttcttatctcttagttcttgcttgaggactagcaagagataagtttgggggagttgatatctagtgtttttggttgttttaaaacccctttttctcttagtttttgttgctttgcattcatattttggcatatagtattgcatttgcatttgcatttggttttcttaggtacatgagtggagtttaaagttttggaagtaaaatggagcaaatggagcaaacaaaggagctaaaagaatgcaaagtgaccaaagaggagaagctagcaggacaatagaccaagtggtcgattccgtggtcgattggtcaggaccagagctacggaggaatatgaatctaccaaagtggtcgattgcgtggtcgattagtcaggaccagagctatg

SEQ ID NO: 13369 - DNA, 3000 bp, Unknown
  misc_feature (1)..( 3000): cDNA_ID_3029728_gDNA_ID_2214621_Annot_ID_187674 3000 nt of promoter + ATG
aataatatgtatacccataataggtatctatttgttgagtcaacgtttataggtgtgcaataagaatcagcctatctacttaggtgaacttatcgaatttgtttagcatgcatgtcttaaattagggattcactggcacatcgctagggatctttagctttaggcatagtcaacagcactacacatcaccggttactctataattagggtttgagttcaggaacggttcgatcgcatctagctatttctagatctactatcatctatttcctgagaataccctagacctaacgtttttattatcttttcttacaaccaatcaatctaatatttgcttacttgctctctttttacttttctattatcatttagcttaatcttgacacttatgccttttgtgtgaacaaaagagctttgtagaattcgacccttaagtaccaacgacgatctctggtttgagggagtaaactgaaggcaattttacctacactatcgaccagccatcaaagcatgtatggtacaagcatgtaaaacaccagctgatcttgcctctaagatcactcacatgaaagctaagttgataccgaataccacttatggtacacaactaagcaaaacttactatgtagtttgatattggcattatcttatattcgaaacaagttttaagcatcttatttatatcatctcaatttcaagtataatgcacttgattttgtctttgagtgctagtgatggtacaagttccaaggagaaatgtgatgataaaaaagaagccacaacaatgttactctcggatcaaagcaaacaagaaattgatttcggtttaacacataaaaaggttcaaagtaacttaattaattatgtttatgaacgttccatgactgccttagtacacttgtcttgtgccaaaattgttgaaacacatgtagatcctaaggaggcacatacggatccacattaccgatcaacaatgaataatatttggcaacaatatctcatatgactattgtcgggcaagactcggaacttgaaccaacagagcagcttgtagcggaggaggagcttgtagccgaggggcagcttgtagcggaggagcagcttgtagcggagtaagctttggcggaaccaaccagtcctatgactcgttcgaagactagacttctcaaccaagctgttaaaggaatacttaaccacttgggcaaacatccaaacgaagtcattcaaaccgtttggaactcgatagcagcccaagacgattgggaatgggctatgtgttacttgggtactctttttcccttctaaggttttgtcccaatgagttttccttagtaggtttttaatgaggcttgagtaacacttccaaatcccccattatcattccggcccaagcccaataagaggagcaagaatttggaaggtcaagggtctatttttgttcacactttcatttatgattttttcttttccgagttgtcttggaacttgttccaagctaattcttccccttctcttcttctctatttaaactcttgtattttcctttgttaactcatctatcgtttcaatcaaaaacctttttaagttagatcaatctcttgttcttctctttggtgtgtaatatccaactatgagttcaagatcggtaaatcaaaggcctttccgcaacctttgtgtgaccattccccccacatcctttgatcctcataatctcccgattgctttggatgcaaagccatccactgttcaacctcaagagtgtcgatcttaggaaagtcatattaggtggtattagagcacattatagtacaagaaaacacggtttttacgactacatctggcgattgtataagtagtcgtaacatttagcgactattaaatgactattcagcgacagatctacgactaaaataaaaggaacgttcaatagtcgctaaatgacgactgtaataaatagtcgtccaaatagtcgtcaggtaacgactacgttacgactataagtaagtcggagaattaagagttgctaataagtcgttaaaattgtaacaataatcaacgaatttttatagtgttataattttgtgtatactaagtaaaattagatatgctaaagttagactgttagttttgtaattgtcaagatacaagtaaaaattctaacatatttcagtttaaagctttattttaaaaatgcattctttaaacaattgtacaaatatatatatcactctaattaattaattaaaagggataaagatcaatgaatatatagtgattgaacattattttggtatgaagggttaatcacataaataattaaaacctatgactttgtgtaaaaatgcactatctttaattaaaaaattgtacaaagtatatattacactctaattaaataattaaaaagggatatatattaatggatatatagtgatggaacattgtttttggtatgaagggttaatcacataaataactttgttttggatatacaccaaagttatgaaaacctatgattattaaaaaacattaatatacattgcgactgattaacgactaataagcgactacaatcaaaaaattgtgctgaattaaaacccgagaaaattatcgcgggccaaaattaacgaggcccaaacaaagcccaatatttgtgttgattagcgactgatgaagaaccctaattcatttgtcttccgcctctctctctctctctctctctctctctctctctctctctctctctctctctctctctctctctctctctctctctctctctctctctctctctctcgtttcttcgattcaccctaatgaatcttcatctctctctttcgtttcttcaatccttcctctaaatcttcatcaattgttctccttctgctttcttcttcttcgaatctctcggatctctctcacattgaatcgtctcctctagggtttgcaaacaagttcgatttgatgcctctagctaagcgaggaaggaagagaaaaatg

SEQ ID NO: 13370 - DNA, 3000 bp, Unknown
  misc_feature (1)..( 3000): cDNA_ID_3029726_gDNA_ID_2214621_Annot_ID_187675 3000 nt of promoter + ATG
ttgatcacgagtttgttgatgtcttttctctaatgcttcaacaaactccattgtgtggccatgaatatgccgtggatcaggagaacttgttaaatcaagaggactgctataaacaacttcaaacgggctgaatccggaattcctattagttgcatggttatgagcgaattcagcttgatacaagccagcttcccaagctcgaatgttatctccaacaaaccagcgttagatattaccaaaagcccgatttgtaactttggtttgttcattattttgcggatgatatgtcatactcatataaggactcgtatgtaattccaaaaagaatgccaaaaatgacttcagaagcttgtatcccgatccgatacgatagatgtgggaagaccatgaaatcggtaaatctcttggaaaaaacagttgagctatatgcaccacatatgttgtcttctttcaaggcacaaaatgagtcatcttagataaacgatccacaacaagaaatatagagttgttacctagttcagtttaaggaagtcccaaagtaaaatctatactccaatatgtcgtgggttgggtgagaaccagtctcgagaggtataaaacggcattaaaagctgttccttttgccaactgacacgcctgacaacgctccacaaatctctcaacatcacgttgaagtgtagaccaaaaatatgaagcaaaaacaagttggcgagtccggtcacgaccaacaagttaaagaaacccatccgcgagcaaaatgtcggaacaagaaccatctttaacttcgccaaagattggactaaaaatgtgtttgtttcataaagatccgagaaagacgcaaaacctcgaacaacaacgtgcattatagtcaacaaagaatgacgcctactcaatgcgtcggctacgcgattcaaattgcccgacttatggttaatagaaaatgtgaattgatgtagatatgctatccacaaagcaggtagatgagaccttgacttggctatctgatgcggacatccaaaccaaaccaaatcgggagcacaccaaactagccggtacatgtatcataccaattaataaggagcattatgcacgactcttgtccaattggagtctcaacaagcataaggcctagggttaattattcaccagcaaattaaccctaagaagtcaaatgatggttcaagtggagtcaaagaccaacgagccgagtcaccatattgtggaaatatgactgttgcattctttttctcttatctagtgtttgtcagaatgggtttacctagaaaggcttttaacgagacaacatcaagtcatcaaggaatcatttacaaaataattgattcgaagatatcacaagtacatataggtgatgaacttgttgacagaccggctcaactactcgctaatctacttgctgaaccacttgctaatctacacgctgaactaccttttgttgtaccataccaaatgaagctatacacaaggaaatcttacttattgtacattttgatgtgtctcaaagctttgtttggcagcctagagagtttctagatcacttagatgcttcactacaagctctaagatacaccaaaccacacttgatcaggcagatcaattaggagcaataattaccaaatttggacctgtttgtcatcattgtctcatggcactttccccttttgtttgagcgtctacttaagacattccagagcatcaagaatcgtccatggcgtcacaaatttctccccaagttgacaagatacaaggcacatctcacttgccttatttggacagatcctacaataatttccaacgaccatatttcattaaatattgcgatttgtttcttgttttagtgtagtagaatggtttatttgagcctatttaagctcattatttcgttcattgtaaaggacccttgatcatttaaaaagtatacaaacgttttctagtcaaagttgagtctttgtcagttgtttgtagttctttgtgagtgagtcactaagtactttagtaatctacggattaaatttgttgagttattcaacatctttaattagttcattgatagagtgtgccgattaccccactgattgagcgagtcaatcacccttctatccatctattccccttgaatgggtcccacacgagagaagtgatcgccatcgtgtcagatcaccaccttcattagcccaccttccgggtggcaagcttgaaactcttgatcatcaactgatctaaagttggatttgctccaattcttgcatcatcttggtatccgaaattcaaaaggtcctatccccaaggttgtatctcttcaacctatatcttttacgatttctattttgttatcaatttgataaccaactaaaaatttgtttcttgctttgttattgtttatttgcttcaagatctttatttaaaaaaaaaacatttttcttcagtttattatttatttttgatttattaaaaaacccacaaaaatcatattttgttgaatttttgaacttttatttttataaaactagtaaacaaaaataaaaattcgtttcacatttgatattttagatgaattttgtttttattttggcattgattttagaaaataaaaagtttcatattttgtcctctttaccttattttgttcatttaattttgatacagatttctcttatttgtgcaaagaataccacgaaaacaaaagagcaacaatgacatatttctctatgtacagaaggaagaaatcaaccaggagatgtgtttcaatgagagttatgaagaactatggcatgaatagtactctaaatcagattttgaggatgaatcttgccatgaagtaccggaaccagaaccgcctgactcatataataccaataaaggctattgtaaaccatgcaataaatttaatgatgatttttgcagccatagtttgaaatatcaattgactcgagatatttcttttcaggaaaagcgaattatattaagcagagagaagtcatg

SEQ ID NO: 13371 - DNA, 3000 bp, Unknown
  misc_feature (1)..( 3000): cDNA_ID_2713537_gDNA_ID_2214621_Annot_ID_135883 3000 nt of promoter + ATG
agtaagaatcttaagtaatctagccctaaactccatatcccaacatctaaaccatcctaatctaaccctaaccaaagaactctaggagactactcactcatgatcatgatcatacaaaagaattggtttgatctttgtaaagccataatcattagagaatagatgagaaatttaaaagaaatacttgatatagaaacttaagaactcaacattcatacaaaaacttataaagaaccttaaagagaagttttgatctccaaaacaaaagctttctttctctaaaactaggttaagagtatttatagtaatgagaaaataaaccggatcaacccggaacaaaccaggttttgacccgatttaggaaggcaatcgaccaagcaatagatcacttggtagattcaatatcgtccgcaacattaatccttgaccaatcgaccacgcaatcgacaactttggtagattcaaattcctccgtagctctggtcctgaccaatcgaccaggcaatcgaccacgcaatcgaccactttggtagattcatattcctccgtagctctggtcctgaccaatcgaccacggaatcgaccacttggtctattgtcctgctagcttctccactttggtcactttgcattcttttagctcctttgtttgctccatttgctccattttacttccaaaactttaaactccactcatgtacctaagaaaaccaaatgcaaatgcaaatccaatactatatgccaaaatatgaatgcaaagcaacaaaaactaagagaaaaaggggttttaaaacaaccaaaaacactagatatcaaatatatcatatcttgcctccgtgatttacttcttgtccttaattactgctattgtaatttataattattatcgttatttaataaaatttgtacttgtttctcaattcggtttttgagctcctatagtaagtcttcctatacacaataggctaaggaggtgcttggtcctgttatatatatggcctttatgaagaagaagaagaagaagaagaagaagaagaagggcagctcgaataaagagagagctcataagaagaagctgaaggcaggtcaaacacacataagagagaaagctcaagatgtgagttaagaagagatctcatgagagttgagagagacctcaggagtaataggcttatggggtagctaacttctatatgagaaaagtctatggagagttgttccataagacctaagtaagaggcttttgagagatgttccaaagatttaagttcttgagaaagatttagtttttagtaatttctaaatctatattaaagaaaagtcgttctttcatctttcaagttcttttgttgttgaactaccttgtaaatcattcagcgactaattctagatatgacgatcctgatttgaatcagtattagagcaagtcagcttttatctgaattggtataagatggtaactaagtcaagataaggtgatctttatttgaattggtattagaacttaagttgaagactcgatccaaggacggtggtaacggcgggcgagaatccacaactgagaataaagaacctcgaaccctaagcctggaggctataggaattcagaggccgttgatatatccctatttttactgtttttaactatgttttaggtataggttttagagtccttttgttatttctagagtcttttctagtctttttcaggtctttacatatttgggattcatttggagataatggagcattctggaggaaaacaaagaatttatgctgctgaagaaatccggagacgaaaaatgcacgtaggtgtcgagcgacaccaatacctaacggcaatttcgaaacacaacttattgatgttttgaagatttccaaattcggcccagaactttctcctatttctaaagaaggcccatcacgtgttttaggtcatatatatagtttttaaggtcattgtttagacctaagcttggagaggctattctcctcatctcttttgtactttgggagcaaaaccctgtggagactccctttggagaagatcttctttactctttctcttgctattattgatttcttattcagactatgaattgtgtttctttgattatgtctgagtaatccacttgttaggtttaggatttctcattagggattcatatggtttaatagattgccccctgctaggttatctgtagaattcttcatctttaattgttcttaatgctagatctagattgatcacctagaacttgaatccagacaatagatatgcccgccataggtatctgtagttggatctattatttgatgagcctggtttataggtgtgtaataagaatcggcctatctactaaggtgaacaaccaaactcgttaagaatgcatatttaggttaataatctctcggcttctccggttattcttagctatagatataaggagtttcgcggcacgcccaccggttattccataattagagtttgagtttaagaatggttcgataacaacctagctattattagatctactaaccaatagtttcaagagaataccctaagcctgatgtttttactttcttgtcttacaacctcacaatctgctattgcttccttttgtttctttttattttcattactatcttacttagcctaattcaaaaccttggtctattgtgtgatcccagagctttgtggaattcgacccttaagtgctacaatcgatctcttatttgagagagtggtcttaaggcaatttgacctatatcaaatttggcgtcgttgccggggttctctacgattcaccattagattaggattagaattttttctaagtatttatttttattttttttacttagtctttctcttttctttttcttgtgtgtttcaggtgtttgtctaatcatagaaccaggaccaaacgagaaacatgaacgagagtaagattgctgggatcatggctaaacttaacgcggtccacaatcaatttgtgg

SEQ ID NO: 13372 - DNA, 3000 bp, Unknown
  misc_feature (1)..( 3000): cDNA_ID_3029812_gDNA_ID_2214622_Annot_ID_135895 3000 nt of promoter + ATG
ttgttttaatcccaattagtctccttctcctttctctctgctctctcgttcaacgggcaaagtttttttcgaataaagttttggtttttcttttaacgttcccttcttcttcctcctcctcgcgaattcgcttatctgtcgatcacgatgagctcaagttcgaatccaccggtttgttcaccggaaaaggtcagatttttccctgaaatctgattagggcttttcatttcttgtgatcagattgttatcttcgcctactttggtgtgagttcatgggttttaggtctgaatcggaacacgttttaacgtgtcttggaacagggtctgaattggtttctaatgattaggattgtataaaccctaaacatccatcttgtgcttgaaagaaatcgactcgttttttttggtgagatctggcttctattttgcggccgttgagtttttagggttttgtgagttttgattaattatttgtataaagatacgttcttgttcattttgtgctcaatccatgtttttaacgaaaattctggattttggtgattttcatggggttttaggaggaaagaagtgaaatgaagattgagattcaatgtatggagaataagcaaccattagctgcttcttgctcctctgcatccgaaggcagtggctgtttcttcctcaagtcacctgaaatcgcaactcctgccacagtatcttcatttcctcggtacttttactatcttttacatttcatcttctatctgtgtgtttatacaacttattatgaaattgattgattggaaagactgtgctttgatgacttacaccgaactcattttgggtttctgcaatgttttaatgttgatctgcaggaggactagtggacctatgagacgagcaaaaggtggttggactccagaggaggttagtggttgcttttgtttcattattttgttggtgtctggagcaacctcattcgactatgtatcttgtatgtataaggattactgttcacttgaatgaaagaggaggctagcattattgtggtctgtaattggtttctatcactattcaggatgagacacttagacgagcagttgaaaagtataaggggaagaggtggaagaaaataggtaaatttcttttcttgaatctgtttcctgaaaaagtagtattgcaatacattagaatgagattataggtcttctaatcacactcttgtatgtatacttgaatgtataatttatacatttttaaaactgaactcgtatcttaaatctgctgagaattttgtgaatttttctcattcagtaaacatgatctctgctgtgcactgtgcaagagaaccatgatttcttttttgtctcttaaatgttaaagtagctggtttcggtcaatgttctgtttgtttgatttttttgtatttcatcttacagcggaatttttcccagagagaacacaagtccaatgcttgcacaggtggcagaaagttcttaatccagagcttgttaaaggaccttggactcaagaggttctcttatcattttcatgttctgaaactttttttggttttcattttacgtaaatatttggtagctctaaaattctcttcaacaagtttacagtggctccatcgttgaatccatctgtgtacatatgatccgttgtctgtgtatattaatatgggaaaaatgtcgaaaaaatcatgaacttgcaatttttggacgatttaatcttgaacttcaaggaagactaataaatcgtaaagttattgttaactttctatataaatgacgaagtttctgttgacttgtctatttagtcacgtcgttaaataggtttaatagaatcgattacgacgttaatactcccgtttagctgctctgttagaataaaacgacgtcgtttctttctcagacaaagcgagataaaacaacgtcgttttatctgttacccaattttaatccctaaaatccctaaatcaaatcgacatctctctttcttctcttctcaaactcgacatctctcttatcaatttctctgttcgatcgaaatggctaaaactcgtgggggggaagagaagagatccggttcgtcgatcacggagactgagtcaagcatccgccgaatcaaatcctactgaagctgaaccaattttaattccttctgtcgacgaggctaatcgaaagaaaagaaaaaggaagaaggtagttgaagtagatattgaggaagatcgtgagcctgtgagtggcgatgattgtgaggttgttggtgacgaagattgcgaagaggtttgctatgcagacaagagaatcgggaataacgaagaacatggtggagaggaacaatgggacattgacattgtttctgttcagcaagaagacgatagaagtgctgtcggggaagaaggaaacgttgcagctggggttgaggaagaaggaaacgatggaggtggtgttggggaagaagaaaacaatggagttggggtcgaggaagaagaaatcaatgaagttggagctgtaggtgtggaagaagcacacgttggacaagatgttgaagaagaagacgacgatggaggtctaggtgtggaagaagaagattgtgaagattttgaagcagaatttggagcacaggcgagagaggaggaagacgaaagcgatggtgacagtggtgacgatatctgggatgacgagaagattccagaaccagtgtaccatagtgatgatgaagaagttcatgacgccagaatttgacgatcctgaaaagcttttgaggttggggaaaacattcaataacccagaagatttcaaaatagctattttgaggtactctcttaagactaggtatgatattaagctatatagatcacaaagcttgagagttggagcaaagtgcacaaatactgatgttaagtgtcaatggagatgctattgctcctatgataaaaagaaacagaaaatgcaagtgaagatattcgtagatgaacattcatgtgttaggtcgggttactcaaaa

SEQ ID NO: 13373 - DNA, 3000 bp, Unknown
  misc_feature (1)..( 3000): cDNA_ID_3029812_gDNA_ID_2214622_Annot_ID_187695 3000 nt of promoter + ATG
agatagtagagcaaccttttacaatcttcagaatgccatcctgagacttgaaccagcatcctctatcttctagtgtaccaagagaaatgagattcctagtcatattgggcatgtatctcacatcagtaagaatcacttgagatccatcagagtttctaatcttgatactgccaattcccttaaccggagagtaagtatcgtttcccatcttgacataacctgaactcaactctttaaaatctttaaaccagtctttccttggagtcatgtggaacgagcatccagtatcaagaacccactcatttgcaatgctatctgtcaccaccaacgtttcatcagtagccagtagaaccatagcaggattaaaagcttcagtggacttagccaaactagactctccattatctgaaccctgctgttttgacttgttcctttctatccacttataacattgcttcttgaagtgtccttctttgccacagatccaacatactctcttaccatctgctgacttagaccttgacctattcttgcctttattcccttggttattgttcttaccatctggtcttcctctagcaaaatgaccttctacaactggtctattgttctgagacaattctctctctttatctcttgctgcaaccatcacatcatcgagtctaagcttttctctgctattactgtacttcatagtttcaaccaaaccatcatatcttgcaggcaaagaactcaacaacaatatcgcttgaacctcatcagttacatcaatctgaagatggttaagatctgcaacgatcttgagaaaatcatcaatattctcatcgatcttcttattttcttgcatcttgaatgtatagaaactcaattgagtatatactctatgcggtaaagatcgaatcatgaatagtcgatccaacgtttcccaagcttctgctgcggttttacatagctcaatctttctcaagaccttatctgcaacattcagaaaaatcacattcttcgccttgtcacagcgctcgagccttgctacttcatccgcatctcgcttcttacgtttctctggatcttcttcttcttcctcggttagaggtttcggagtggtcccaagcacaacgtctttcaaaccaatgacgctgagatgagccatgatccttgtcttccagagtgagaaatcaccggatccatcaaagatcgcgattggattaccagccatactccgattcgaactggctcaagaaccttgagctctgataccaatttgtaaggttttgatcaacacttagctcacaaaactctcgaatcaaacgacttaaactttgagaatgaatcgaaactttaaagagaatttaaagaaacaaagacacacacgatttaacgagttcacgttcctcaaccggaatcgctacgtctcgccggagaatctctccggaaatccactagaacctttctttacaatgtatctttacaagttttctctctctagttctctctagaacttgattacaattctctctttttctctatctccgatctaacagaattacagagaagaagaagaagatatagttacagagctcatgcgaaaaagaccaaaacaccctcaagcttgttatgaccttagtcagctcgcctcacgtgttatgactttagtcagctcgcctcacgtaagaaagtataacgcttaaggggactgaggggtttgtcttgagaggttcttggattgtataggaatccatgaacgttagagattagataattgtttgagtgaaacttgtaagtttactaaacagattttctaataaagaagctttttgttttgaagaaactacgtcttagcttgtgactcagttcttgaatcgatttccatatacataaatagctcttgcgttttcattaatgatatgcccaattcaaatttctgtgactccatgatgatattcttgaaactggtacgacgagttaggattaatctggctatgattcaaagaaacatgtagtttgtgctggcagtagaaaccaagttttaagcaatctagaaaaaaaaaaaaaaaaaaaagaaaccccaaaatagtcaacaggataaatttttccaatgatctgatggttttaagttgatcaggggacatctgcattgccgacgacgcgttcgatggtcaacgcattaagcttgtaactcctggactgaaacattaactttgttctgtaagttttatacaagttgtaaatatgaattgcaacttttttgtttgatcaacttcctttttttgtttgacaattgtaaacatattaaacgacttgtctgatcttatattatgactgaaaaataaaacagatttttatattatacacataataattatgtctaacgtgtgagagagtcagagattgtgatacttttttaattgagaaaattagtagaaagatttatacacattgatcaaggttagctgtgtgtttcaagttgaacatacgaaagaggagagaaggagacagaaaaaaatatcacaacatcgtttttagaagcaaccatgaacctagtcggtgaatttcgtgaggaagaaattgatgggaaaacgtttttcttatacaattcttcaacctcctccggtgaagacattcctctccaacctcttttcctttgtcccctcttacgtgtcaaatattgggccatatgtatggaccttatatgttttgggctttaactgtaacttatcgatgaagtctcataaacccttgtgtaaaccctagcagctttgtgtatataagcaattgtatgaatgatcaataaagcaagtcagttcgatatctaattctacatggtatcagagcttaagatctctcaaaaaaaaaaaaaaaaaaaacttaaatttcttccgcttgttacatcgatagtttcgattagtgtgttttgaaaaaaaaaaaaaaaaaaaaaaaaaaaaaaattttttttcgatagtttcgatctggttttctcttgaagttgtgttctaacaagag

SEQ ID NO: 13374 - DNA, 3000 bp, Unknown
  misc_feature (1)..( 3000): cDNA_ID_2713575_gDNA_ID_2214622_Annot_ID_135897 3000 nt of promoter + ATG
cgcataagcttatcagcaccccttgctgtaacactcttcaacgtcaataaaaaaaatgtagttccccacggatgtttaagaaacatatctagattttcggccatgtccgcatgtaccggagatattttgcttctacccgacgttgggcacaagacgccatcaatgagggctagagcagcgtaccgtagacgaattccttgatcttcaaccattcgtttcttcagcctaccaacaacccgctcaacagatacatcactccagtcaaataaggtgtactaatacttgtcaggaagtagtttttgtttccccttcctctctttgacatgagggagtttgtagcagttgagcctagttactcttttaaactcagatatcgaaaactgaattggggaaccagagaatattacccagattttattttgcttgctaacaactagctgcctcgttagcagaaagtgaataagctttccagaatacgcggctccctccgggatatcaaataattttccaaactgtgattcccttagaatcttcatgtcctcctcatctaaagcgtcggcgatgttatcgattaaagataactcacagtaagactggactctctcaccgtttggttcagatccaccccgaaacaaccgacgaggaatagggtggttcgccatctagaaacagtattagcgtatacaggtttcacctgtgacgacaagaacttaacttgcttatcaacaattactaacgaattaaaatttgtggaagatactaattgtgagcttaaaaatccagatctaacaatatttaccttcgggaatgatggattcgaccccgcatgtagcacaaacactcgaaagctgcaaataccttccacaaatcggcagattttaaacgggattccaatgtcgcatgtcgtttttttttctctccagttatgttcttcaacagagagagaaacggaagaggcgctaggattttctgtttttctttttttcgtctgaaggatttcattgattgaatgcgtttgagttatacatagccaaaaaggaataaaatccttttggagacaaagccggcgggtacatagaaacccccagagacatgaggccaaaaaaggcgaacaaacaaatcaagccttagaagaaaatatacaaagataacagctacagaagtaatagctaaagcctccaaagccacaacactgaaaactcctcccaacaagcagccgactaacacttccatagaacagtttggcgctgaggagaggtaactgacaggagtctcgaaaagagatttaatacgaccatctccacagcagaaacgaagacgacgaaacaagaagaacagaacacagaacctaaccaccacaaccgctttagcgccaatgaacatgagaaggcgaaggatcatggaagaccttgagatcggagaggggaaacgccaaatagaaccacttatccttacacacggaccttcaaagacccagctaaactacttcctggcaagagatcgacccaccataacgtccagaactcagccgggaaaccaaaagaggttccaacagagagctagtagatgccattataggaggctagcatccgattgaagaacccacaaaatagaaccttccaccaagtcaccacaccgaaaaccaagaggaggatagagagataggcagagctaggagtcaaacaaggctacccaaaagctgaacttgaggcttcaaaccataaccagtcaaaaaacacagcaaaacacaaaccctagaagtcactcaaactcaaaatcggaagaagaatccgcatacaaagaggccgttgctgcagtactaaagggataaacagaactaactcaaggaaacgaaacgccgactaaatatacgccccaaacgagacagcaccaccgcaaagccaacaaaatccaagaacagtactcaatagatccacatcagaaccagccggaacatacaacaaatcaactccagttcccaaactaacaagaacaagaccgatagttgagacattagaaccagatcagaaccacaaacctccataaccagatcggagaaacgtgacggctccaccggggaatagatctgactacaacgagcaccgatctgccacctatcctccatgatagtcaccacatcggaaccaccacgaaaaggagagacttgaagaggagacaacgaaactagggtttgagaaactaaatcaaaacaaagaagaactaagagagaagaaactgaaattattaagaacaggaccggcgacagtgctatggaagccaccaatcaccggccaaaacgaggaagaagatggccttgacggctagggcgaacaaggagaggggagagaggggagagaggtcgggggaaatccttgagctagggttttctgtttacagggggttttctgatatatatgtaaattattcattttcttgaaattgtagtctatatcggttgcgtcctcaaaccaactttgtgctccagatgatttcaaatttcaaaatttaaaatgatatgcctatgaagctatttgtcccctcaatcaaaaacctattgtagggagatgagagtaatttaaagttggtttccgacaggtactatacggccatagttagtttgtacattcttttcaaatccatagccatttattataaattctctaatttattttgattggtaagaatttgaagtttgatggcaagtattgattttagtttgttttataaaaggttagacacatttttatgttgattaaatggttgttttgtattcaaagttagtaaaatagaatttatatctaaatgggtctataggtttaaatgggaaaccttaatagaccttaaaattaaataagtttaaatggggtggggttaaattggtcggcttttaaatgggatgggcctttgaacttgattattcatgatgcattgtttagttttgggcctttgaacttgattattcatgatgcattgtttagttttggtaactaaaatgcaatg

SEQ ID NO: 13375 - DNA, 3000 bp, Unknown
  misc_feature (1)..( 3000): cDNA_ID_2713571_gDNA_ID_2214622_Annot_ID_135898 3000 nt of promoter + ATG
gaaacaatattcttcatcttcaccaatgtgtcacacacaaccgcatctacattagtgtcaggagctggaagatcggagtaggtgcctagctatcgtgttcctgtagctatcgtgttccaaaagttgtcagcaaccgtaggagacaactttgaaaactcaaccgcttctcctttcgtaaatccatacatgtcgtagatctcaaacattgtcttgttgtaatgttttttgttgagaaagaatgtgagtgttccttgactcgcttttgggttctctggatttgcgtacgtgaggcgacatgtggcaatgaactccttcacaagtttaggatatacatcctcatctatttcccgataccatcccataccgtgtgtttgaaacaccgtcacgacatcattgtacaggccaagtacctgtagagaaggtctgcaagcaactcgcgttggcctcacatcaatatgtttcaaagctgccaatagctttgtgtcctccttatcccatatgtcggtaacaagaagttttgttaggatcttcttttggcagtgccccggaattgctcgtacgtgctcgagcagtgcctgcagagtcgtttgttcgtcccataccttgcaaaagagacgaagtgaagtcaagaaatcacttaaaaacaaatcaaagaaattaatcattgcattttagttaccaaaactaaacaatgcatcatgaataatcaagttcaaaggcccaaaactaaacaatgcatcatgaataatcaagttcaaaggcccatcccatttaaaagccgaccaatttaaccccaccccatttaaacttatttaattttaaggtctattaaggtttcccatttaaacctatagacccatttagatataaattctattttactaactttgaatacaaaacaaccatttaatcaacataaaaatgtgtctaaccttttataaaacaaactaaaatcaatacttgccatcaaacttcaaattcttaccaatcaaaataaattagagaatttataataaatggctatggatttgaaaagaatgtacaaactaactatggccgtatagtacctgtcggaaaccaactttaaattactctcatctccctacaataggtttttgattgaggggacaaatagcttcataggcatatcattttaaattttgaaatttgaaatcatctggagcacaaagttggtttgaggacgcaaccgatatagactacaatttcaagaaaatgaataatttacatatatatcagaaaaccccctgtaaacagaaaaccctagctcaaggatttcccccgacctctctcccctctctcccctctccttgttcgccctagccgtcaaggccatcttcttcctcgttttggccggtgattggtggcttccatagcactgtcgccggtcctgttcttaataatttcagtttcttctctcttagttcttctttgttttgatttagtttctcaaaccctagtttcgttgtctcctcttcaagtctctccttttcgtggtggttccgatgtggtgactatcatggaggataggtggcagatcggtgctcgttgtagtcagatctattccccggtggagccgtcacgtttctccgatctggttatggaggtttgtggttctgatctggttctaatgtctcaactatcggtcttgttcttgttagtttgggaactggagttgatttgttgtatgttccggctggttctgatgtggatctattgagtactgttcttggattttgttggctttgcggtggtgctgtctcgtttggggcgtatatttagtcggcgtttcgtttccttgagttagttctgtttatccctttagtactgcagcaacggcctctttgtatgcggattcttcttccgattttgagtttgagtgacttctagggtttgtgttttgctgtgttttttgactggttatggtttgaagcctcaagttcagcttttgggtagccttgtttgactcctagctctgcctatctctctatcctcctcttggttttcggtgtggtgacttggtggaaggttctattttgtgggttcttcaatcggatgctagcctcctataatggcatctactagctctctgttggaacctcttttggtttcccggctgagttctggacgttatggtgggtcgatctcttgccaggaagtagtttagctgggtctttgaaggtccgtgtgtaaggataagtggttctatttggcgtttcccctctccgatctcaaggtcttccatgatccttcgccttctcatgttcattggcgctaaagcggttgtggtggttaggttctgtgttctgttcttcttgtttcgtcgtcttcgtttctgctgtggagatggtcgtattaaatctcttttcgagactcctgtcagttacctctcctcagcgccaaactgttctatggaagtgttagtcggctgcttgttgggaggagttttcagtgttgtggctttggaggctttagctattacttctgtagctgttatctttgtatattttcttctaaggcttgatttgtttgttcgccttttttggcctcatgtctctgggggtttctatgtacccgccggctttgtctccaaaaggattttattcctttttggctatgtataactcaaacgcattcaatcaatgaaatccttcagacgaaaaaaagaaaaacagaaaatcctagcgcctcttccgtttctctctctgttgaagaacataactggagagaaaaaaaaacgacatgcgacattggaatcccgtttaaaatctgccgatttgtggaaggtatttgcagctttcgagtgtttgtgctacatgcggggtcgaatccatcattcccgaaggtaaatattgttagatctggatttttaagctcacaattagtatcttccacaaattttaattcgttagtaattgttgataagcaagttaagttcttgtcgtcacaggtgaaacctgtatacgctaatactgtttctag

SEQ ID NO: 13376 - DNA, 3000 bp, Unknown
  misc_feature (1)..( 3000): cDNA_ID_2702818_gDNA_ID_2214622_Annot_ID_135900 3000 nt of promoter + ATG
gccttatttatataagaggtgtgttgataacctttttcaggagatgtattccagagagtgaagtcgaaggtatcctttacagttgccatgcttcagattatgaaagacactttgcctcattcaaaactgcttcaaaggtcctccaagctggacaacctacaagactccagttggaacaacgccattcaacctcatctatggcaaatcttgtcatctaccggtagagctagagtacaaagccttatgggctacaaagttgatgaactacgacattaaacccgctggggaacgccgccgtttacttcagctcaatgagttggatgagattcgtttgaatgcctatgagagttttagaatttacaaggagaggaccaaagcccttcatgacaaaaaagatcattttaaggaagttcgcagaaggtgataaggtactcttattcaactcaaagctcaagatatttcctggaaaacttcgttcaaaatggtcaggccctttcgtcataatggaaatgcgacctaacggttcagcaatactctgggataacaatggaaaaccgttttctaccaatggacaaaggctgaaaccgtaccttgctcattccactcttgaagagggcactgcagttcctctaacggatccaaataaggcataagagctcactgccgtcaagctaacgaccttaagcaagcgctccgtgggaggcaacccacaaggtattgtagatactttgttttccttctttcattttctttgattttggtttgattcactccactgtagagttcagacttatcgacccggctgttgagtcgatagagtctctgtatttgacggtgttgtgagaatgctttttgagtgcagaaacaccatgacgacattgcaaaaccaaggtattatcgagctccacttcatcttcttcgtttttgtttatcaagaacaccaaaatcactaaaccctaactctctcaattcttggtcgtttttgtcaaaattggtatctatttcaatcggatttttgcctcttttcatatctattgtctgttttctcgatctgcaaaggtatgagctcgaaattccccttttcggttccgttttcaaaggtgaaatatctctaattccttgaatttcatgatgtttatggattatttgatgctagcttcttgtctaggatggttttgggaacctttttaagtctttacttgctggattaaggcctaatttgagaattgaaaatttctcttttggtaaaaaacggacatgttcatacactttgggaaaaacggattttagggcttaaaatagtgatgttaatttgggttttaaatttgggctttagttgggcatttaaatcataataaatgcccatttagactcatttagttcaaagagtgaaataaatgaaaactcaaataagacccatttaaaatgtggaggccctattagcccatttatatatatatattttttttttgaatatgtttgagtttgatttctagatattaatttattgggtaatattagggggtaacgtaatttgacatcaatattaagaaaatgaccttagtgcagaaaagttgggtaactaacgtttttgggccatgcgaaataacgaatataacctcggtcattgggcgtcaaatctttatttccgacagtagggttctcggtataggatcaaatagggtagtagggatatgattacaccgatacgtaataaaaattcatgcattacagtaatcgatatttttatatgtcacatgttaccttactatgcaagagaacctagttagagctattggttactacaggctgaataaccggattttgaatatgacacaggctgtatataattaccttcagatgatgcatgaaattaaagagatggattactttcctcacacctgcaagaaatgattctggaaaaagagatgtgacgtttacattaataccaaaatactacaaatatcccacaaatatcaaacttcataacgtaacccgcgttatgtataaaaaacacgatgtacaaattttccttagcagcatgtattaatgtaaagtaactgaagtaaaagttttacttgggaggcctaactcgaaatgtactggactggattaccctaaagttgaatgggcttttgagaagaagatccggaaattagatttccgaaacagcataagtacaacgtaaacaacatgttttgttaaaaaacacagcaatcattgttctgccacttgcaaatataacatagtggaagaagtataaaaggaaacagatgtgacagtgaaaagcgcgtgcaaagaggagagtagatatgtatcccttgcattaaatgcggcgtcagagagtatcagcttccaaggtattaaactgttaaaaaatagaaactttttttcatgtgtaacaatctgaacacatgctatatatgtgcttctcacgtacgctacatcttagcgaatcatataggtgacacgtctcaactgacgtcagcgttacgactgagcaagtggacgacgaagatatagtgtatcttacctcaggacaagttaatgtgtaaaaacatgagtatatgataaatcatttggttctattgtcgataacgtgcaatacaaataaagaacaagtacctgtttgatgcgacattcgtgaagagatcttctcgccgccctcgggtgttgggagggaaatcataaccttttcaaattcacgtggctggaaatgggtcagcaactgttgcccaaaattcatagaccactgtagctctaaaaaaagttcaacttttctatataagataatagatggcaagatatcatctctcacacctcttcttctatctaaaaaacacaaacgaagtatccaataacatctcagaggtcgatcgttgttgttttggtatgcaattaatgattgttctttttgtctaccttggtgttgtattaataaatcgcatggtgattttatatggtatttaatgcaaccctattgatgtgtaggtaccaatg

SEQ ID NO: 13377 - DNA, 3000 bp, Unknown
  misc_feature (1)..( 3000): cDNA_ID_2713563_gDNA_ID_2214622_Annot_ID_135901 3000 nt of promoter + ATG
gacttctcagcttgaagcttctcatagtcagagactgatggaccacctagcttttgttgaatgaatctgatgacaaccaccggaaaatagagaatatgttatatgcaagatcttacattacacgtaaacagttagcctaatacgtaacaaatattgtaaagttgcattcgtgaacttgaacttgaagatctgttaacgaaagatcgacataggagattggcaaggaagaaaaacaaataaaattatatgtcaaatctaacagacatacctatcaattttcttagtatatgtagtccatgaaagaaaaagattataagtcaatacacaaaattgtttctatacaaaatctataatactcagctagaaactaatgaatgggtccagaaacttactctagagcagaggaaggcttgtcattctgctcatacagagaaaccagaactacaatcaaaatcaaaacctcgtcatgttccacaacatacaaaagagtataaagagaatcaaaactattcaattaaaaactgttgcaataggtgaagtaagattatacctttagtaagagaatcaagaactccacttgactccaaatacttcctgaaagcttccttcttcacctctttctcctgattcatgtagacacacacaaaaagaagttcaaagaacacataacggtgcatcacctaatctagcgaagaaacagacttgaaatcagaaagtactaatacctctttgtaccgcatcatctccttgttctacaaaacacagaagaaactttaatgtttctaataactgtatattaatcctcttctttttcctagctgcatgacgagcttggacctatttagatcctccaaagaataaaagctctctctctttaactaacaaaattacaagggtaagctttgattaagacaaaacataaacttcatcacacataaccagtgtcaagctttgattaagacaaaacataaacatctcccaagttcctaaaaccattccactctaccaaactttttcaaagtttcgatttttcttaagcgtatagccataaattggcaagagatctcaaagattctatctttattctccaaatccagtacaatagatccataaatttgatgccaaacaatccaaccataacacaaattagcataaacgaaatcgatacatttgtcaatacaactaaaccaaagacatctaaaatcaaatcaaatcaaaaccggaaagtaggacttaccttgctcaaagtgttggaaacaacgcggtcgcagacacaatttgagatccaaaacttgtgtcggttggtgcttcagttgtctctttctcaaaattttgctaaaacaaacctaaatattttttttttctattgtgggaaattaacgataaatacgctgattttgtattttttaggttgttcaaaacaatacatccttgatccttaatcttatcctttatcaatcatttatcttataaatcataaattattttatcagttgtatttgtgtcatgtgtaaagtcacaatttaaaaaaggaaaaaaaaagagaaaaaatcaagttttcttaaaatttggctaaacaaaactaccgttattttaaaaagataaatcaagttctttacgatctgtgcaatctactgttacgaatcatatttataggaatatgtatattttttttttagaaaaaatctcaaaaaatgattacctaatttttatttagccgtttaatatctttagttttaaatttgaaaaatacctcgtttaactttagatgctatttaatttttttgataaaattggatttccgagttagtaactgttatctttactaacagaagttctaactataattaaaacttaactcctggtatttacgtttaaatatacaatctttttccaaatctttacgaatatattgttttggtcgggtggttattcggtctatgatctcaatgtgttgacatgatcgcaaagcagtggactttgtattcgccgttctattagatcggatttgttgcttccggctagcacccagattatttaacccctcttccatgtctgcgccgataattttaatttcttttctaattgtggatgtttgtagaatatatgcgttatgcccaagttcgggaataccatgaacaaaaataaattttattattttatgtttttttcgtcgaaataccattatatttaagtaatcggaaagagaatctcttctagagagagccaattaagaaccgacttgcttacatgggaaaaaagactattacgacctcgtgctttttttgctaggcaatcagcacatacattatgaatgcaaaacaaaaacttaatactaaaaataggaaaaaaaacagacaaaagaaccgaaagtcgctatttcagcaacaaaggtaggccactccgaaggtttttccagtaaagagataagatcagcacaatcggatgagaaagagcaatccgtgacacctatcgagatcatacactctattgcccataacaacgaatcaacttcagcgtgtaatggtgataggctcttcggcgcactctttagacccaaatgaaggacattatcttggtcaactaggacccatccatgtccactcaaagtgtcatctaagtgccaagatgcatcaaactgacaacattccgagtagggaaaatattagcagggaccgcctgaggacgagggtactccaaaactgactcctttgaatttgcttctttccaaacttttgcttcttgaattgcaaaatctaaagtttcttgtggagattcaatcacgttttcgaagataaaccggttacgactcttccaaatataccagagtatccatggaaatatctcaagaatgtcttctcctatatcaaattctttccctcgccagagtaggaaatcaaaattctagaagtgagaattccgggggaagaggtactccgaagacgggataggggacaaggcccagatttgtctcgccggcggacataggaagagaagatg

SEQ ID NO: 13378 - DNA, 3000 bp, Unknown
  misc_feature (1)..( 3000): cDNA_ID_2702834_gDNA_ID_2214623_Annot_ID_135909 3000 nt of promoter + ATG
tcaggacagctacttaataccaaccaggctaattcataccttcacaagcgatccaagacaagctgttgaaataagaactccagggacagcaagtaacaccatttgtcccagacacctctaaagaatcatgcaagtattcagtacctatttctcttaacctttaagcttaactaggaattagagccagaggaataaaccttaatttggtgaacttccattgaaaacgaactctcgaaaagaagagccggaagaaaaacagctaaaagaagttctggatcgatctcattccctgcacaataacattgattctatagttcttacaaagccagccatggaagagaagaaaaattcgaaactaaaaacttacagatacgaattccatggccgatctttccaaggttatgtttagctccatattctgaaacaccaaacaacatgaattagcaattaagcatgattacgttgacttcaaggattaaaacagatgaagaaatcagaaattccatggaacgaaatcgaaccgagagatccaagagcaattccgataacgagaagagcgacagtgtaaggaaccctagttccacgaagcaagtgcctagaagcaataccgagtaccagagacattccgacgaagagaacggcgtcgacagggctagattctagtttggaagaagaagaagaagaagacgaatcggtcgcttcctccagaaatctatacgccatcgtcgcgtcgattacagtcgtcattttatttgaatatatctaagaagcaacaacacagaggaagaagaagaatgctcgttcactgaaaaaataaatagctgaaagagagtaaatacttatagagctatacatacacacgtgtatagtactgtagtgttaaattaaaattaaattttactattaattttgtttatgataacattatcatatttttctgctatatatttttcacaattttcagccgaccaattcttcaatgtttatattttttctgaccaagagtatattagaaccagaattagataaattaatggaaatataatgatgacaaaaaaataatataaatataatatatagtttgttttggattttatagattgatgtcatatagatgtgaatgtgactatggtatcttcacaatgaaattagtgcttaatttgtgtacaagaatttattgaaattgagtttatttgtaataagtattccaaaacctggtttggccttaaaaggaaaagaaatattcgtagttggttttttgacattttgggacatatttttcttatgatttaattgataagacctcttactgttgtacttttttgaataaacaattgcaaatgtaaattggctattttagaattagacgactagcctaccaaaaatacatttataatgtggattttgatatgtgtgtgagtgtgtttacttcgtggagtttgatgtgtttaaggtttcgaaaatatttgagaatttggattagcctgactctattcggctgatccaaaacattaatctgatacctttcaattcttcacgttaaatttataatattttttaaactttcaattatgcttagctgatgcacaacaacattttcaatttcgcatatcagaataacaccaattatcattttcatgctacccagaagcacctacaaggtatcaagtgtgcatgttaaaagactgtttgggttagtattgattaatcgaccaaccgtcgatcctaatgaaatgctcaaagatagaatccaacataaagaatctctattggtattcaagatttgcttatagagtagtgattgttagttagttagtttgttattctttgattttccaatcagcttacgaagatttttcaagagtagagatgctaacaacatgcataataatttgtctaatggtaaattctacaataggaaaagagtttacattgattactctatcattagtagttcaggggatagtagatgtttgttttgttctaaggcttatgtttatgctctggaaaactggttccaggcgagaagattcagagagaactcgttgatggattacatatcatggtcgctgatgagtgtatgattcgccaccaccatcaaagaaggtgcaaaatcaataagtatcagagctgttacaaaaataaactttataaataaataaaattattgtctgtgtaattaacatcttaattttatagtgttcttatttatctggtttggttgcaaaaaattgagtttagttaagataatcaggtatataaattactacatcattcattttatgtacaaaaaatttggtttatattccaattgataatactttttacttgctttgctttaatcaatttcataaacgagatactattgtgaaaaaaaaaaacgaggcactattgatcttttttcttttgaccacctttttatttgtatcttcatcatcatgattttgttaaagagtaaaaagaacattactgattgttatagtcacatggaatgcaataaaactcctataaatagtagaaagcacaagaacgagagaatcactctaccaatagaaaattgctacttattaaaaaaaaaacgacaattgtaacaaaaaatatcgattatagaaagttttatttgcttcagtttatatcacttgcctctgccattcacaagtttcttacgaaacgtattaaataatttaaaattttgtgaattaatacgaattttgtttagaagatttaagaaaacaaccaaaaataaaatatataaaaataatcatttcaatttctaaaaaaaatattaaaatgtcgcagattttattttcttacataatgctttttattcgcaatattttttcttaagcatttagtagaagaaaattcgttaaaaagagagataaaataaataaaagtaatataatcgtccttttgccataagcgttgctctcaaaaatataaagcaaactcagatctcacgattttcttcttcctctcacattaacacacatcatcatg

SEQ ID NO: 13379 - DNA, 3000 bp, Unknown
  misc_feature (1)..( 3000): cDNA_ID_2713615_gDNA_ID_2214623_Annot_ID_135910 3000 nt of promoter + ATG
ttgtccaccttcccaatgaatccccaaataggcaaatcatcataatacatctgaaagtaataatctttttcaacagctcttcgaaagtgttcaacttcttctctactaagcttctttttacagtacacctctgagtctttctcatctctaaagttaagcttgtatggagcactaacaagcctatccccattcaaaacctcaccaagagcttccttcttatctttcacaccctctacacaaaccaaaacaaatgcatattgacaccaaaatacacaaatccgaaaaaagtgaaaaaccacacataacagagacaacattgagcgtgctcgtacctggaatacaaaaggggagatcgaaatagcgatacgtctcactgcaacaatcatcaaacacaagtaaaaatcagtcatataacaatgcaatcgaagatctatcacattttaagaacacgaatcgaattttttcaaggtcagatacaaaaattcaataccaacgcaagcttctacagaaatttgcaacgatcaatttatcactcatcaaagagaatcacagatctaagctaccgacaaaggaactgagattagagaattggatttacctgggattgtgaaaggggccgaccttgttggcgtagagaggaacggagtcaccgtccttgtaacggtggtcggaggcatcggatctgacagtaccggcgccggagaagatgagagctccgataaagaggagcagcgtcgttggtaatctcatgatgatgtgtgttaatgtgagaggaagaagaaaatcgtgagatctgagtttgctttatatttttgagagcaacgcttatggcaaaaggacgattatattacttttatttattttatctctctttttaacgaattttcttctactaaatgcttaagaaaaaatattgcgaataaaaagcattatgtaagaaaataaaatctgcgacattttaatattttttttagaaattgaaatgattatttttatatattttatttttggttgttttcttaaatcttctaaacaaaattcgtattaattcacaaaattttaaattatttaatacgtttcgtaagaaacttgtgaatggcagaggcaagtgatataaactgaagcaaataaaactttctataatcgatattttttgttacaattgtcgttttttttttaataagtagcaattttctattggtagagtgattctctcgttcttgtgctttctactatttataggagttttattgcattccatgtgactataacaatcagtaatgttctttttactctttaacaaaatcatgatgatgaagatacaaataaaaaggtggtcaaaagaaaaaagatcaatagtgcctcgtttttttttttcacaatagtatctcgtttatgaaattgattaaagcaaagcaagtaaaaagtattatcaattggaatataaaccaaattttttgtacataaaatgaatgatgtagtaatttatatacctgattatcttaactaaactcaattttttgcaaccaaaccagataaataagaacactataaaattaagatgttaattacacagacaataattttatttatttataaagtttatttttgtaacagctctgatacttattgattttgcaccttctttgatggtggtggcgaatcatacactcatcagcgaccatgatatgtaatccatcaacgagttctctctgaatcttctcgcctggaaccagttttccagagcataaacataagccttagaacaaaacaaacatctactatcccctgaactactaatgatagagtaatcaatgtaaactcttttcctattgtagaatttaccattagacaaattattatgcatgttgttagcatctctactcttgaaaaatcttcgtaagctgattggaaaatcaaagaataacaaactaactaactaacaatcactactctataagcaaatcttgaataccaatagagattctttatgttggattctatctttgagcatttcattaggatcgacggttggtcgattaatcaatactaacccaaacagtcttttaacatgcacacttgataccttgtaggtgcttctgggtagcatgaaaatgataattggtgttattctgatatgcgaaattgaaaatgttgttgtgcatcagctaagcataattgaaagtttaaaaaatattataaatttaacgtgaagaattgaaaggtatcagattaatgttttggatcagccgaatagagtcaggctaatccaaattctcaaatattttcgaaaccttaaacacatcaaactccacgaagtaaacacactcacacacatatcaaaatccacattataaatgtatttttggtaggctagtcgtctaattctaaaatagccaatttacatttgcaattgtttattcaaaaaagtacaacagtaagaggtcttatcaattaaatcataagaaaaatatgtcccaaaatgtcaaaaaaccaactacgaatatttcttttccttttaaggccaaaccaggttttggaatacttattacaaataaactcaatttcaataaattcttgtacacaaattaagcactaatttcattgtgaagataccatagtcacattcacatctatatgacatcaatctataaaatccaaaacaaactatatattatatttatattatttttttgtcatcattatatttccattaatttatctaattctggttctaatatactcttggtcagaaaaaatataaacattgaagaattggtcggctgaaaattgtgaaaaatatatagcagaaaaatatgataatgttatcataaacaaaattaatagtaaaatttaattttaatttaacactacagtactatacacgtgtgtatgtatagctctataagtatttactctctttcagctatttattttttcagtgaacgagcattcttcttcttcctctgtgttgttgcttcttagatatattcaaataaa

SEQ ID NO: 13380 - DNA, 3000 bp, Unknown
  misc_feature (1)..( 3000): cDNA_ID_2713612_gDNA_ID_2214623_Annot_ID_135911 3000 nt of promoter + ATG
ttaccaatcaatgatgggccaaatgtatattcaaattattgggtgcagacaaatttttttttagctaaaggcccaactacaccatagcaaatcagcaccattcgatctcagaccattcaaacactgtaataaaaacatttttagttttagttttatttttttgcaaaacacgtataacaggtaaattattattctcaataaaaaaacgtattataggtaaattattattatagccaacctaattatgttgtcaagtttgaaaataaaaataaaagagaggaatatattaaagaaaccctacaagtaaaaatcaaattttagtttcttgttttttttagacaaacaaaattagtttcttttttctgcatctgaaaatactttcctattttaagtagaggccaattaaagaatgtgggtccccgcgaataatatcggcgcaaattttttcgtcttttataaatgggccccacaagcgtgcctacatttgggcccattaaagaaaataatcgtactcgggggaacatgtctagaaactgataaatcgataaaagtaatacatactgacaaataatgaaggaaacaatataaatgaatagtagtatagttatagaaagaaatattttttaggttttaaattgacattatgattatacactcaatcgcattagacacactgtagtcacatcactattttgtacagttcgaaatagttaattgtctcgtggttctacaaaagcagttttatttataacattttcttttgttaattttgttttccgatcaaaatttttggattttacctacaaaataaaacatgaagcgaaatgaactcaaaagagtttattatctcattacaatatcatataattactctacctctaacaatattcacccatactaaaccattactatatattatgataaattcatcgtctaataacaacaattctaatacactaaacgaacacgaccaaacttattctatagtgattacattgcttcaacagtttccaccattccgaacaatttcatcatcctatcaaatcaaatcgataaagtcaaaccatgtcaaaaaatcatatatgaaaacaaattgaaataaagggatgtaataatggaagaaggtaatcgtgataggacgtgacacgaccccaccattgtgaagaatgaagaaaagcatacaaaagaagaacggttgttcaccaaatcagaagcaaaacagaatcaagatctataataagctagacagaatttcttctatacatgacttttttgatcaactaaagaagaagaaaaagaagatattacatagttcattatttttgtttgaaactgaggataatggtttaatgaactgtgaaatacatcactttttgaaaatgtcatccctaatttctatgacttaacaatccaattacaacaaatattgttaatcttgactgaccatatatatgttctttttactcatgacgttgatatcagtaaaatgtaaaacattaaacgttatataacagtaaaagttataacttatatcagcaaaagttatatcagcaatattttaccactgagctaacgttagtaaaacaaacacaacatccacttcataactcaggaacagtgaaatgaacgtgttttatatcctttttttaatcatttgtaacaactataatttgaagatgatcttagattatgtgcacatagctcattacacacatgattattaattccgaaaaattgattacttaatatttttttaaaatgatttcacaatattgttaataacatttaatcacgcaatcaaccattatatatatttaaatttcaattacgtttaaaaattgccgacattatttactattcacatgtgatattttcttattctagtttaatcttgtgtgagtcaaattataagattatttactaaatttgcttaaagcggaacagtaaaaataacagcatgatgtgataccataacctttagcattaaggtcccccatctaaccaaaccctaacaaaattcaaacacatgtacggagttagacaggaacatctctaatattaacgttgaaataataacaaaattgatacatttgttttttgaatttacgaagttagataacatagatcacccgaatacttgtttttttttttttttttttttttttttttgtgtgtgtgtgtcttttctagtagttaattactattgaaaccatccaagtagcggagtcacataaatttaatatagtatgcagattatgtaattgtgaccatatgatatatggcaaacatattactaatctaaatatatatacatatatatatatatatatatatatatatattattgcatggttataatatataacctaatgattgtgtattaatctcggggttgtgtatccatccgaaaaattcaaattttcataaaatgtgtgtttgttaaagagaaaattttttttagcacctttacatttctcaaggaggaaaaacactatccatccaacatttcttcttttgctttatttctttttccgttgactgtattgagtacaaattcgtcttcatcttctaaacctctccactactttttacttaactttttttttcttccaagtttattgtttattctcagttacattcactttagacacacaatccaccaacataaataggcagtgatataagttaatatcatagaaaacaatcagaaaataattcagaagagaaaacacaacaaaaaaaagaaagaaaaagaaagaaagaagaagagatgagtgagcttctctactctctccccacttgggatatccataaccttggatcactcttcaagcccgattttaatcttggtaatatatacattaatatatagacacaaacatattttgtgttttttcaatcgtaaaatattgatacatatacgcatatgtaatatatgaatcgacgcgcatgtatttatttacaagttattcaagaactttcttattaaagtgtaatatg

SEQ ID NO: 13381 - DNA, 3000 bp, Unknown
  misc_feature (1)..( 3000): cDNA_ID_2713604_gDNA_ID_2214623_Annot_ID_135913 3000 nt of promoter + ATG
ggcaattccataataagccaaccgttcgcagcattcgtttgctgcaccaaccaaagcatagatatcagtttttggagattaaagacagaacatgagagaatacaacaagtacattacaagtgaaataaaacaaagtgtttaccaaaaatgaatggacaagctttccagtttcctgttgtctgcttcaatggtgggtttccatgaatatctattgaaccatcttcagcatataattttacttcttcctggagaaaaacgaattagtcaacaaagatttagaccccaaaacactaaagaaacaatgacaatgaggttgaacctgtataagagattcttcaacttcaagaagtgacctttcttcatcaatggaagccattttttactttctcctcaacatgacaattttcacgtaaagctgatttaagcttctcaacgaaggatcaaataaaatgatcctcccactgaccaagttgttgttggtggtgtgagtggtcactcaccacagaaccacattctttaaaaaatgttataaaaaaaaagagggaatataaaaccacacaaactttattaatctgattagacttaagcattaagcaaattttgagccatagcacacttttcccctaacacaacaaaagttatcaaacaagttagagacttcaagttttaaagaagacatcaaacaaatcttacgaaacctttctagccaaaccggtaaattaacaaagccaagacagaccaaaagccaaaaatagtaatcaagatgaccgttactaaggttcattgtcgtgaaatatgcaacaagtgtaagaatcaatgagccgagtgaagagtccaagcactacacaaattttgcatctagagattgttcatagaaaaaatcaagccgactaagaaagaacaaaacgctagatgttcccaataaagatatattgagggatatgccaaaaaatgctcattggaacagtgttaccactatcaaccagatcgttggattactcttgtctctctcgaagtcgagaagttggtggcggtgaccactggaccataaaatgtgttcttgttaacaacacgttttaagaaattgcaaaattgagtggacctattgggctttaaatattagtgggtttcctaatttgtacttgttgggccaattttatgacctccacaacttggatataaaatatttggtaaggaattaagtaaataaatactattttattttttgaagcaccaaatgcaatttatggtgttaataaagttttatgataataattaattaatgcaaaataaaaatagttttggggtaaattgattttttttttttgggagaccaacagtcttcaacctcaaaaacgagaagctctagtaaatcatgatcgttttgtaatttattggtttaccaattgattttagtgatatagttttcgaaccgcttaaatgattaataaataaataaattaaattatggattggtgattttgtctctaaataaaaatgttgaatatgaaaggaatagttttgaattgtccttaataatttaacgttgaactattgaatagtcaataattcggtcgctaatagttgactagtacaaacaaaaccgaacagagcatgtattaattggccatttcaaaattcgtgttgcaataattaaggaaagtcagaactttagagaagtaaaccggtggcggttacccataattgccggttcggcgagtggcgtctcggtctccatttgccggttcccattgactaacgcgttagagagtgactgatgggtcgacttttgacttttactatttttcttcttttgtttcttactgccagttatgccccattccctgcctcttaattacgtatgagtgccactcacaaatatttttatttctgaaaatcatttgggggagacaaaaaaaaacaagatataacaaacctgttgttttacttttgttactgacaagtccttcagtcaaaaaataaaaacaagatagataaagaaaatgaaaactgtatttaataatatcctgaatagtcaaaatagaattgtctataaaatctgattttttaaaaaatataaacatatatgatgaagtattcttgtttcatgtatccattcgaaaatataagtaaatcctatgtacaattgaaaaaaaaaaaaaaaaggtaatctagaaacaatgctgatcaagctgtagtattcaacgtaattaacccaagctagggctagtggattctagttttcaacaaaattaacccaagctagggctattctaaagctagtctaaacatgtgggaggtttgataaatcgcctaactttatttgtttaattaggtcagaccatgggtttgatgtttatttgaatttttatactttagagatggtaatatgagatcttacaacaaaaagtcaatgtcctttagtggtgataccaatataagttcgaatttggtttctagcttattggtataaattccattgacagcaaaaaggaatcacgaaaacaatataatctagtactatattcacattttacgcgtaacgcgtttgtaatattcacataattatgtaagtgtgaaattgatcaaatcgcgggagatgctaaataaacaaaatcaaaatcactaataaaatgttcacgataacttagaaagatccaataaaaagatgacggtcggaatttgtatacgatagtaataaaagtattcgtgtttctaaaagttagtaattcattggtctaaatattataatgaggaaaagtcattggtaaggaaaaggtttgaaaaaggagcacataaataaggaccagcgatgcttcctttcacgatgcaaaacacgaaatgaagagacacattctctctactatatataccatttgctcctcttcctctaattccacacattcttcttcaactacaaaacaaaaacactactacacattctttcctcttgttcatttcaaacccaaaaatcaaagttcgaagttgaaagaagacatg

SEQ ID NO: 13382 - DNA, 3000 bp, Unknown
  misc_feature (1)..( 3000): cDNA_ID_2709779_gDNA_ID_2214623_Annot_ID_187726 3000 nt of promoter + ATG
accaaagtcaaatggattttcgtatgattactacttttgtaaccaaagtcaaatggattttcgtatgattactacaagcttgtaggtcaaaaaacacatgtcacctctctgtttagtataataaaccaattttataacatcattctttttatttgctagtttaatcgtctaaataagtgacccaaccataaaccatatcagattatgaaattttgactttacgatagtttacgtatcctcaaattcctcacgtatatgtcatgaacaattcttaaacaacaaaattataactctcttttaattaatgtagttttttcgtaagaactcaaattgatatttaacaaaaaaaatgaatgaaacatttctcaagttttaataattattttttggaattttgcaaaacatatatagagagataataataagtatgaatgaatccaaaaagagacaaaaagaatagatggaaaaagagacagtcatctttaagaaagaagccaaaaacaaaaacttgctcttttaatcccaacccacacacctctcaaatcctcctctcctcgtttctctttctctcctcttcacagaaccaaaacatatcaaacctttttttctcttgggtttaagtaaaaatcgaatctttgtgtcggtttttagggttcttgaaacgatatgggtaagtctagtggtagaaatggtaacggaagctttaacggcaataaatttcacggagttagaccttacgtacggtctccagttccacggcttagatggacgccggatcttcaccgttgtttcgttcacgccgtcgagattctcggtggtcaacaccgtaagtttattatactttttttctcttcaaatcttttgtgaaaaaaaccaaacttttgtgtgtttgtttgcttcaaacatcctaaagttacgatataactagaaaaattggacttttctcattcttttgtctcaatcatcgtaaaaaatcagtttttgaataaaatcttcacacttttgttactttgtttcattcttatcttcaaagtttggatttttatgctaaaaaaaaggtttgaagtttccttattgtgttgtttatcttcatcatcgtaatgaatcatctttgtcaagttaccgagtcaaaaccttcacgcttttgttgttttgtttcattcataaagtttgagtttttgttttttttcataaagaatcatcatagtcacctttttgatattttgttgggtttgatgaaacaggagcaacaccaaaacttgttcttaagatgatggatgtgaagggacttaccatttcacatgtcaaaagccaccttcaggtaaatagtaattaattttaccaaaaacatcaattttgttttcttctttattcatatttcattcataacaccttgttttgattgttttgaacatatatataaacagatgtatagaggaggttcaaagctcactttggagaaaccaggtattatttttttccttataattatgaaatgaatcaatgatgatatttggaaaaagaatgggaccgttgattttaatttgaactgttaacatcaaacacataataatggatggaatttaattattttactgtatctgtttgtagtatgtactattggtctagtgtcatgattcataagacaaatgtcataaatacatttatatatttttcaagagtaatagaacagaaaataagagaatattcattaactagtttttattgtttcttacacagaagaaagctcatcatcttcaataagaagaagacaagacagtgaagaagattattatcttcatgacaacttgtctttacacacaaggaatgattgtcttttgggttttcactcttttcctctttcttcacattcttcatttaggtatttatttttatttataattgttttctgacaaagttttttaattttatttcagtaaaaaaaaaaaaaaagtgttttgcttttttgtttgtctgtatttgaattgtccttttactttggtgcagaggaggaggaggaggaagaacaaaagagcagcagacttcagagtctggtggttatgatgatgatgctgactttcttcacatcaagaagatgaacgatacgacgacgtttttgtcacatcatttccccaaggtataaataaatttctcttttgtcaaccggtttggaaatttaatgttgcaaaacaaaatcaagtccggttatgagttctaaccggtctgattgagactggtcaaatccaaagggattgagtccggtttaagtactacttgtcattgaatctaattagtttcatataaatggcatttaaccggttttagtccggtttggtaactaattttgtcttttggttcattagggaacagaggagtggcgggaacaagaacacgaagaagaagaagaagatttgtcgttgtctctgtcgttaaatcatcatcattggagaagcaatggatcatcggtggtgagcgaaacgagtgaagcagcagtctcgacttgttcagcaccattcgtatccaaagattgctttggttcttcaaagattgatcttaatctgtcaatttctctcctcggtagctaaataagttatgcaagatttaggttcagagaaactattcggatgtgtttttgaaactaggatattgaatgttagtagagaaacctagaaaatgaagtttagataaattatcaacgcagcgttttgatcgcctttgaacggaaaattaacaaacagagccaaacgcagtgttttgatctttgaaggataacccctaaacgcagcgtttctatatcaagatcctacggtttagaatgttcattgttattttggtcggcaatcctacggtagaaaaaataatctcgcagataaaacccattaaacgctgcgtttcatcgttggagggtaaactcattaaacgccgcgttttacattcaaaaaacttgaaactaccttataaccgcccagacgatgaccaacgtcgtcaacgtcggcgaag

SEQ ID NO: 13383 - DNA, 3000 bp, Unknown
  misc_feature (1)..( 3000): cDNA_ID_3029834_gDNA_ID_2214623_Annot_ID_187723 3000 nt of promoter + ATG
atgtttgggcctttgtgttgcaaactgaaatttatggccctctgttttggctttaggatatatttacaacataataaattacacaattccaattagagatttgttcttagttttgaggctttttgacttaaaatttgagccatgaataatctttcttcttttttcatcatagataatcatagatagagtatagaaatattatatttgatttttttgtgtgtgtttaaacctgaattatatttgatctaagactaactatttcaactgattatgagtccatcaagtgaaactacctataccacatacgacatttatggttttttttttaatcaaacaaaaaaaattattgtatattttggttaagagatatgaagtgaaatcacgtgtgagtaagaagaaagagacatgaaatcatatattaattaattattgtaaattttgcacaaaaaaaagaattaattatatataaatatatatatatatatatatatatatatgtgtgtggtatctacataattaattattcttcttgtgattgtaatattttgtaatatttttcactatatgtaaatatgtgtgagttattcgacatttatggttttatagtttccaaaggtatcaatatcactgtttggatattgaagctaaagtaaagagagaacgtaaacgaaagagtagagagaaactaactcagttaactaataaaaccaattgtacaagtagattgattaattcaagaaaacaactaatttgttaacaactccgtttaacaaactaacaaactcacaaaactaaaactaaaacaaatttgttaaattattatatatttttaacacttttatgtctttgtagtatatattattgaattttcttgtcaagtaaagtttttggatttgtttggataaaactgggagtttaggaaaatagagcaaatcagcaaaatgcatcaaatgaaaaaagattgaagatcacgaccgaccttgacaatcgtaagagtcagtacataagatgtccagaactgatcggttacatacttgtaccgatcattataaaaaatgtttcttagtttaggattccgactcattgcatataaattcttaacactttgtaatcgtataggcagattgttttgtttttttttctgtgattatctagtttttctatataaaattttataaacaaaatgatcgtttgaagaattagagcatatttgtcatttgttattttgactaatccatctccattcaaattgtccaattatgtttagtcaaatgagtttgaaaattttgcctaatttaatcatccaaatgagcaaaagaataaagccacacattacttactaataatattaaagcccacattaaaataatttctcacgtaaaaaacaaatacttacacaaacctatataatctagactctacttcacttgtttgccctaaaccatctatcatctctctttcaattcatctacaccttatttttatatttctcaaatacttttcgagaaaattatataccctttttaatatacgacgaatgaaatcgcaggaagataatcttctacttgttcttctactcgaggggataaaaaattacggacttaagagatgggataagatactagcatcacttcttctatcccagcgaagtatcgctaaatgtaaaaaaaaattctaatctttcgttaaacgaaaggtaaattattttctcgaaaaaatttgtgtatagaattaaaggttttctttagtcaatagctaatcaatcttatcatttattttctactagtttcttatttgcacaatacatttgagaaaattatgttatgttttcaagagttttgggtttttgtagagtattagataaaatcaatattttctctcttgagactagtttcttctttgcaccatacatttgtgttctttttcattttctcaaagctgtttgttttaccgaattttctcttgggttgtggagaatattttttttttttagtttttataacaccttatcttatataaaaacaaaagagtttgtttttacaagggatgatggatgatgaatctatagatggtcgtagtaccacactctctatggactcaagttgtggagaatctttttttttttagtttttataacaccttatttgatatagaaacaaatgattttgttcttacaagagatgatggatgatgaatctatagatggtcgtaccacattctctatgcaccctatgaatcaagttgtggaatcaatcaaagttggccacatatagttatgaaatgattttgtgataaaaacacaaattaatttctatgtgaatcacaaagaaaatatatatatatatatataattcccatttgaagtttaagcacagaccttagaaaaatatgtaaacaaagccgatgtctatagtccaataaaaacaaatttcgccgggaaaaggaatataaaaaatttgtcacatttaccaaaaaataataggagagtttatatagtttcaacgtacaattaatgatctaggttatcgagttttaatttccatttctcctaattttgctgacttgagctacatattattgagcattcttgttctttcagggtttatagagagattggctgataattactgtttgttatctgagtccccaaacgatttactgatatcaacaacgtattgatgatgtattgttttagaaacacatatatgtaaaaaaaaaattcttgattagagtgatatcaacaacttgagacatggacaggtaacaggttgatccacaattctatctttacgtcataataataacaaaaaattcgtaaaaagatgagttttgttaattacttctcttattataatcaaagttttgatttttattttccaataagtcgccgggaaaagtaaaataaaaagccgtcacgtctccgataaataatagagtatcgttagataggtagcttcaacgtaaggaatctaaattggttcagctcaaaaaacgaaaacg

SEQ ID NO: 13384 - DNA, 3000 bp, Unknown; identical to SEQ ID NO: 13381
  misc_feature (1)..( 3000): cDNA_ID_2713604_gDNA_ID_2214623_Annot_ID_187720 3000 nt of promoter + ATG

SEQ ID NO: 13385 - DNA, 3000 bp, Unknown
  misc_feature (1)..( 3000): cDNA_ID_3029858_gDNA_ID_2214623_Annot_ID_187716 3000 nt of promoter + ATG
caaataggcaaatcatcataatacatctgaaagtaataatctttttcaacagctcttcgaaagtgttcaacttcttctctactaagcttctttttacagtacacctctgagtctttctcatctctaaagttaagcttgtatggagcactaacaagcctatccccattcaaaacctcaccaagagcttccttcttatctttcacaccctctacacaaaccaaaacaaatgcatattgacaccaaaatacacaaatccgaaaaaagtgaaaaaccacacataacagagacaacattgagcgtgctcgtacctggaatacaaaaggggagatcgaaatagcgatacgtctcactgcaacaatcatcaaacacaagtaaaaatcagtcatataacaatgcaatcgaagatctatcacattttaagaacacgaatcgaattttttcaaggtcagatacaaaaattcaataccaacgcaagcttctacagaaatttgcaacgatcaatttatcactcatcaaagagaatcacagatctaagctaccgacaaaggaactgagattagagaattggatttacctgggattgtgaaaggggccgaccttgttggcgtagagaggaacggagtcaccgtccttgtaacggtggtcggaggcatcggatctgacagtaccggcgccggagaagatgagagctccgataaagaggagcagcgtcgttggtaatctcatgatgatgtgtgttaatgtgagaggaagaagaaaatcgtgagatctgagtttgctttatatttttgagagcaacgcttatggcaaaaggacgattatattacttttatttattttatctctctttttaacgaattttcttctactaaatgcttaagaaaaaatattgcgaataaaaagcattatgtaagaaaataaaatctgcgacattttaatattttttttagaaattgaaatgattatttttatatattttatttttggttgttttcttaaatcttctaaacaaaattcgtattaattcacaaaattttaaattatttaatacgtttcgtaagaaacttgtgaatggcagaggcaagtgatataaactgaagcaaataaaactttctataatcgatattttttgttacaattgtcgttttttttttaataagtagcaattttctattggtagagtgattctctcgttcttgtgctttctactatttataggagttttattgcattccatgtgactataacaatcagtaatgttctttttactctttaacaaaatcatgatgatgaagatacaaataaaaaggtggtcaaaagaaaaaagatcaatagtgcctcgtttttttttttcacaatagtatctcgtttatgaaattgattaaagcaaagcaagtaaaaagtattatcaattggaatataaaccaaattttttgtacataaaatgaatgatgtagtaatttatatacctgattatcttaactaaactcaattttttgcaaccaaaccagataaataagaacactataaaattaagatgttaattacacagacaataattttatttatttataaagtttatttttgtaacagctctgatacttattgattttgcaccttctttgatggtggtggcgaatcatacactcatcagcgaccatgatatgtaatccatcaacgagttctctctgaatcttctcgcctggaaccagttttccagagcataaacataagccttagaacaaaacaaacatctactatcccctgaactactaatgatagagtaatcaatgtaaactcttttcctattgtagaatttaccattagacaaattattatgcatgttgttagcatctctactcttgaaaaatcttcgtaagctgattggaaaatcaaagaataacaaactaactaactaacaatcactactctataagcaaatcttgaataccaatagagattctttatgttggattctatctttgagcatttcattaggatcgacggttggtcgattaatcaatactaacccaaacagtcttttaacatgcacacttgataccttgtaggtgcttctgggtagcatgaaaatgataattggtgttattctgatatgcgaaattgaaaatgttgttgtgcatcagctaagcataattgaaagtttaaaaaatattataaatttaacgtgaagaattgaaaggtatcagattaatgttttggatcagccgaatagagtcaggctaatccaaattctcaaatattttcgaaaccttaaacacatcaaactccacgaagtaaacacactcacacacatatcaaaatccacattataaatgtatttttggtaggctagtcgtctaattctaaaatagccaatttacatttgcaattgtttattcaaaaaagtacaacagtaagaggtcttatcaattaaatcataagaaaaatatgtcccaaaatgtcaaaaaaccaactacgaatatttcttttccttttaaggccaaaccaggttttggaatacttattacaaataaactcaatttcaataaattcttgtacacaaattaagcactaatttcattgtgaagataccatagtcacattcacatctatatgacatcaatctataaaatccaaaacaaactatatattatatttatattatttttttgtcatcattatatttccattaatttatctaattctggttctaatatactcttggtcagaaaaaatataaacattgaagaattggtcggctgaaaattgtgaaaaatatatagcagaaaaatatgataatgttatcataaacaaaattaatagtaaaatttaattttaatttaacactacagtactatacacgtgtgtatgtatagctctataagtatttactctctttcagctatttattttttcagtgaacgagcattcttcttcttcctctgtgttgttgcttcttagatatattcaaataaaatgacgactgtaatcgacgcgacg

SEQ ID NO: 13386 - DNA, 3000 bp, Unknown; identical to SEQ ID NO: 13378
  misc_feature (1)..( 3000): cDNA_ID_2702834_gDNA_ID_2214623_Annot_ID_187715 3000 nt of promoter + ATG

SEQ ID NO: 13387 - DNA, 3000 bp, Unknown; identical to SEQ ID NO: 13383
  misc_feature (1)..( 3000): cDNA_ID_3029834_gDNA_ID_2214623_Annot_ID_135916 3000 nt of promoter + ATG

SEQ ID NO: 13388 - DNA, 3000 bp, Unknown
  misc_feature (1)..( 3000): cDNA_ID_2709779_gDNA_ID_2214623_Annot_ID_135918 3000 nt of promoter + ATG
tccaatccttaaggatgaaaagtcaagagttgtttggtcctacttccaataattatgcactcacactactctaaaccttttcacataaccatgcaatgtctatatctatccatgtgtacattgttgtatattatattctctgtcttgtaatttatatattagttgtgtaatttttttggtggcccaaccattcccaaatcaaacttttaaacaactctctttcacttttgtttaatgttattttaggtgtgaaaaggctaattcttctctgttctctctaggtgtttcatggattacaccttttatattactttaaccatcttagaatttgccttgttcttgcatgtgctatgattgaattcaatcaatgggtgatgagaaaattgacccaatagaataataaattaacattgataatcgtcgaatggttcggtgagatttgcacatccaaattttccacacacaaaaaagaatgttatgttttttatagtccaaaatccagttgggttacattatcttacatgtatgtacaaagttttataatattaataaaaaaacaagcaaagagaattattgaatgttttgattgtggtaaaagccatgaatcatggacctccacagtcaattactcattcaatttctcttggagctatttgtctctgccagactcatttaatgtattattttcatttgcttccactttctctcatacatgtattagtactaaccattttgatttttgagacttgaactctcggttagacattttatccatccatgcaattgtgtttatcgatcaatgatcatcagtaggataataaaaggctttattagtgaatatagtaaaattgtttcactgataaaaccttttggaatgtgtttacttgattattttgatcaatgatcataacctaggtagctttttgtattattcttctagtcaatatataggtaatataagcaactcgtgtgtctttgacaagctggtgactgaatattatattttaattaccgtctaatcaaacactaaaccatttttaaaatcgttaaagcgaattttggcatatatgcagagaattccacgtttttataataatttagagaatgtgcataaatgagaagaaaatgcaaagcacaataggctacattttaaaggtcaatgacctcactttgtgtgtagattttattatttgattgtttttttcgttgggtatagaaatgtctgatttatgtgtggaataaagacgacgactttgttaaattataaattattaaattttgttctcttaattaatactcaatcggctttttcttatttttttattattatggctgataccacgtaaaccacgagtaagtatgtagtacaaatcaattactttctaatactacataaaaattatatactagtacttaatttcttacaagaaatacatacatcatttaaaaacagtatttgatgttaatataagtagttaatagtagaatagctgataaaataacgtgatttatgtccacaattcgttgattaaaatattgaatccatggttggaaaaaactggcgaaatcagtaattattgtcggctaccatatagggacatgatggttttggttcgtcttccatgtacaccaaatcagcaatgagaaaaagaaaaatggggaaaataaataattcttgttataaatattatcctaagatttattatcacttattatgggagtgaaaaagaaaacaataagaaggaaaatgaatgggaaatgggagaaaatgtaaaggaattaggggaatgaagtcaaaacggtggtccaaaagacataacgaaggaccattgtaaaattgtgtgatttatttgaaatcagaaagtttaacacgaaaccctaaaaaaacaaaacaaaaaacaaaaataggaataataattatgctatatggtcaaagctaagcagttgggctattttcatttaaatttattcgttttggtctaaaacctatcgtgaaaaaagtgagaaagtaaagtttgaggtactgtggaggaaacttcttcatttgggtaaatcccaaatccctataaggtaaatattatgtgttcttacaaaatttggtttttctatgacaagtatattcttttgaccagctaagctaacaaatgtatgttcaattggttatatatcgatcggggcaagggtaatactcgaatctatgttcttttcatgcaagttatgtatgtagccttgtgtagttctctggtacgttgatatgcaatgattctctcgaaaactatttaaaaaaattatttaagataataatgaatggggtcacgagtcaagactaatgtaaccaaagtcaaatggattttcgtatgattactacttttgtaaccaaagtcaaatggattttcgtatgattactacaagcttgtaggtcaaaaaacacatgtcacctctctgtttagtataataaaccaattttataacatcattctttttatttgctagtttaatcgtctaaataagtgacccaaccataaaccatatcagattatgaaattttgactttacgatagtttacgtatcctcaaattcctcacgtatatgtcatgaacaattcttaaacaacaaaattataactctcttttaattaatgtagttttttcgtaagaactcaaattgatatttaacaaaaaaaatgaatgaaacatttctcaagttttaataattattttttggaattttgcaaaacatatatagagagataataataagtatgaatgaatccaaaaagagacaaaaagaatagatggaaaaagagacagtcatctttaagaaagaagccaaaaacaaaaacttgctcttttaatcccaacccacacacctctcaaatcctcctctcctcgtttctctttctctcctcttcacagaaccaaaacatatcaaacctttttttctcttgggtttaagtaaaaatcgaatctttgtgtcggtttttagggttcttgaaacgat

SEQ ID NO: 13389 - DNA, 3000 bp, Unknown
  misc_feature (1)..( 3000): cDNA_ID_2713631_gDNA_ID_2214624_Annot_ID_135920 3000 nt of promoter + ATG
agaagaggaagatgacgtaaacgtagtgctctttgggctttgctctgaatctgtaatcagcgagaacgatattccagaatctgcagttatactggagggattgctcaagtgccagagattggaaacgaagcaaagcatcatagacgctacaaagaagctgaaatgctggaaataaaaacattctttattatttcgttttaaaaagacgtgtgagatatatttctgttataagttaagattgaaatttttgagactatattatatacaatacacctagtttcgtccatacgcaaatggaaaatgaagcgtggagtttttttcataacctttatgattgttagacctaccaacttattgaagcattcaatttggatgatagtgaagttggaatgtaagttaaacatcaatgtcttgattaattttgtgcatttttgggaactatccgtattgtttctgatttgagtgatcttccttattgttgctaagaaatgctcgaatggtgattagcataattgctgtttattcattggagctataataattatggttgtaatattgtaatttgggaaagaaagcctttgatacaggccgattttggtacgtacgtaagagagatataaattgaaacacctaaaccaaaatctggtcgccgcgaagacaaaagaaaaacatttgtggcaaagaaacaaattcagaaaccgcgtgggtccgatatggaacgctgatcaattggacatttgtaaacatttcaaatattttgcatgtaatcaatattgttgttatattttttgccttttagttatagttaggtttgttttttctgtttgtttggttagattcaactatttgtttatgcttttcaattttgggttagtatttagctgtttactttggagaaacaaaagaagatagattctgttccatataaacaaaaagctgtgtcgttgaaacttgaaaatgtgaatatactcggatatcaaccaaagggtacgctgcattaaccaacctccctcgtagaaaatttcaaagaaaggataacaaaacaagaaaaagcacaaagttgaaaaagaagtgacagatgcagaagaattggtcaaaatcattttgacaaaactacataaaaaacaatcaaatgtcactttcaaaattattagcttatttattattttattatgaaaataatgaaagcgacttctatctgggactggtaaaaggacctctctcaccattggttgtacattagctgtcaaatttttacatttccattacattccctaactccaaatatatacactaaactaaattcttcaagttacttcctaattactactatagtaattatttcctaaccgtcaaatagtactgaataacacatataatatagtttcgattgattaagagatttgaattaaacagaataaagttttacgattatatattctaacaatttatttgtctcacaaaaaaatctatagatttaatgagaattaaatgaagaggacgaaaggaaaaacaaaatgaagaaaaagacatatgaaacgtagtcccctcttttctttgctttcttctctacataaaactaaaactcctctctttcacgaccctttaagtaacgacgccgttttcatccaaacacaaacctctggaatcgtgtcaccgttggagctccggcttcattaatggctttcttcaagacctgaagacaaaagaaagtaaaaatatatatacactagagagaccaagatcctcgtttatgggtttcatcgtgtcttgtgcttagggtgacataaatacccatttagagagcttagaccaagaagttttagagtttgtgaagttacttgttggttagtctgctgtttctggcaaatgctgagtctcttctctctgtaagttcttttttcttcatttactctgttttgttccccatttttggtctttttgacttaacttagagtattttaaggcaaaataaaatcatgaatcttttggtattttttgttctcatcttcttgtggggtttttctattgaagtttgcttagctttgaatcttgtctaatggagctaactcgatccaaaataaaaacacgtataatgattaactagttctgctcattagatgaactaaattaatgagttaattccgtagtttcatgcatcctacaatgtattgtctatgtatggaagcaaagtatgatatcatatttaaacatctatgattgtgctactaaactttaaataatactttaagctgatgtgatcttatatggataacctctgaccattatctactttctttgaccattgctcttgttttctaatccaaaagtcgtatcttccaatgcattagttggtccaaacctagatttgcatcccttaatttgtagtagttaacatctaattttgatgttaaaaccaagacaccactttgtttgtctggtctgagaatatctcaaggcgtatagttttgtccttatgacgcttgcaaaagcaagttgttgagttgtaatcttatgtttttttctgcaacttgccttggatgaagccatgagattatctttataaatggtagcaagtaaaccggtttcttatgtcgaaaaaccgatcatttttgttttgtttgatgacaaggaatggaatactctagagactcggcagagatgatgatggagactaagcgcaatgtctactcgcttgaagataacaaaattaaacgacacaagtcatctgatctctctttctcttccaaggtcttgtgatacatcaaaatcaaaattcattgtggctatgaagctaccggacatttctgtaccagcatgctaatgatcttgaaactttgttgttctgtggtttaaacaggagaggaaagacaaattagcagaacgtatttcagctcttcaacaactagtttccccttacggaaaggtactacttggtccgaaataatctttcttacacgctctttgtcttctctagccatgttcaagtctctatctatg

SEQ ID NO: 13390 - DNA, 3000 bp, Unknown
  misc_feature (1)..( 3000): cDNA_ID_2713627_gDNA_ID_2214624_Annot_ID_135921 3000 nt of promoter + ATG
ataattaagaaaaatacaataaacaacaaaactctaaagttgagaattacctcgacttcgagttcgtcgaaagagttaaccaagaagaagtcaatgtcgtcaacattcacgaactggctactaatgagctcaaacaacggccggcagagattgttatcgtacagaaacaccggtaagtcattacccttcagcggaggcattgcaggcaaaacgacatcattttgaaactccttaaactctccacgcaagaaatgaatataggtcgcgttcacggtggaggactgagtgaaaaacgacgccgcagcaacgccaggatgtttccggcaaacgtcgaggacataaggcaggcacgagtcgtaaacgacggcgtttggttttgggtccatcgaggagataagctctgagaggcttcgagatacgttttcttggaactttgcgaagtagtcgggagatgtgtccgtagatgggtgatcttcctcgaatccatcgtcaatggggacaaaagagagaggaagagcagtggctccgccggtgatggcacggcggaggatggagttgtgggtggaggaagtggtgaggaatgtgacgttgacgtttttagagagtaggcgttttgagaattggaggagagggtttatgtgaccttgtatcggaaatgagaagactaacacatttgctttcgctttctctcccattgtttttctcttctttttgttgaaatttgttacatacaaactcttactctgttatgacggaagtatttatcggatatatgcaagtatgcaacgtagaaaatagtagttataggcaactttaatataaaagatttgtttctatatgtctctttaccaaatagaaaagttaaaaggggttggtgggttagtgatttggttaattataaggtattcatacaaatggcctaaggatcgtaaattcttaaaattagtggtggatactattttagatatagggttcaatatatccgccagctagattcctcctcctcgatgggttatttttgttttttatcaagcagatgtcgactaaagaaaccatttatcacttatcagagtacataaaattaaaataagctaagatttggatttatgctattggatgagtttgtcaatatattataccatctattgcatatatcttctaaagtttatcttaccattaaatatatttttagaatcgttggaaggaaactttctttttaattatatatatagatgatgttttgactatatgttatatcttaagacactcacgaggataaataatggtttagcaacatccatccttagacttgtattttcaaatggtaccttgttttcgaagcatctggaaaatgaattaaaataaaataaaattaatcatagtcttttcatggtaatatatgtccttctctcgtaacgtttagagatttattacattaagaaccaacatttttaagttccaaacattcttgacgggataaataaagtaagacaatcgtgtggctcagacccatgtaagtaatcatctttcacaagaaactaaagaaagaagagaagtattttggatgtgagtttggtttgtgaaggtatatatatcaatgtcatgccatgtgccgtatgctttttgtattcgttaggtttgctctatatatcaatacaatgactctgacaacaaaacagtgactgcccacaatgtatgtccatccaaatgaatgtgcaatttaataatgacttaacgagttacaaaaataaaactaaaaaatgcaaaaagaaattaggtaacactttttttattttttttaccaaaatgtagatggaagttcgggtgatttccgtattgcatgccaagtctgcacgtccaaactacgaaaaatgacatatcgtttttttttgttttttattttgttttttcatcgtctagatacctgagtttcattagcatttagaggatgctatgcatatatcggtatcaataatatggtcttcaaaatgaaattctctatgttaaatcatttatgatgtatccttttagttacgtcataaccaatgtgattcgtttttcgtctccgattaaacacatatatttttcgaagttttcaaataaaatcttttgacattaaatattcgaggtgaaatgtgacaataatcttttcaaataggttaacttttgtcttttatacatttttaacgtatttagatataaggatcgagagttgtataatgtgacaataatttaccataactttaaatatacattcggagtaatgattgatgatatgttgtttatatcgaaaacaaaagagacttgacttgatatacctgttcatatattcttgtcatcttcggagaagagagacactgccatcaaattatagctattgatgtcattgcttatgtaagcatgaaaccccaattgcaaaagtgagaataactaaaaactaaaaacctttcaattcaacttttggtttatctaatggtaggtgccaagtttttcttgaaaaatgaacaatttagcatccatatatttgatggcagtgtctctatccattatgacaaaaaatgtatccatatattatataaaacaaaaattctgatataaataaattcactttcgatttacttaaaaaatttatgattctagatagccgattataaatttttgtttagtcaaaaaaaaagaaagtttaaaccgattatgagaattcatgatttatcaatcaaaacacatatgtatgaggcccaaatattttatcttcaacattctgacccaatttaagcccacagcagactctgactcgatggttttggttagctttccggttcggtttggtttaattgattagtttcgattcgactttgaaccaaatttaaaccgtactccgacttcagcatccaccacctccaagtcttcgtcagtcgtcaccgtgtggtaagtgtaaatccttaagtctggaaaattagggtttttgggacttgggtgtgtttccatagcagagatatg

SEQ ID NO: 13391 - DNA, 3000 bp, Unknown
  misc_feature (1)..( 3000): cDNA_ID_2702865_gDNA_ID_2214624_Annot_ID_135925 3000 nt of promoter + ATG
tgtagaagatgggaagaagattaaatggtgtccatcaccgggatgcggatacgcggttgaattcggtggaagtgaaagtagtagttacgatgtttcttgtttgtgttcgtataggttttgctggaattgcagtgaagatgctcacagtcctgtggattgtgacacggtttcaaaatggatattcaagaaccaggatgagtcggagaacaagaattggatgcttgcgaattcaaagccttgtcctgaatgcaagcgtcctatcgagaagaacgatggatgtaaccatatgacatgttcagctccgtgtggacatgagttttgttggatttgtcttaaagcatatcgtcgtcacagcggtgcttgcaataggtttgttgtggagcaggcagaaagtaagagagcattgcttcagagtgaaatcaaaagatacacgcattattatgtaagatgggcagaaaatcaatcgtcgaggctaaaggctatgagagatctggagaagttgcaatcggtgcagcttaaggagcttagtgacaatcagtgcacgtctgaaactcagcttcaattcaccgtagatgcatggcttcaggtcagtaaaagtatttaaataactctttgattatactaacattacgaaactgtatatatatagcaagcaccgtagaaattagtaaaaacgatttcatgattcaactaaagttgtaatttatcaaaagtcgaacttagagtttcatcggtaaatcaccatgatgcgaataaccaatgaatttccaattttgacgtttgataaattagaacattgttgttgaacatttattgacatgtgattgattttactgtggtagatcatcgaatgtaggagagtcttgaaatggacatatgcatatggatactaccttcaagatctccccaagcggaaattttttgagtatttgcaaggttagttttcgttaaggaaacacttaaatatgtacgttgtgatcataatttgtccattgtagctaattaaatttttgttgtcaggggaggctgaatcaggtttggagaggcttcatcattgtgcagagaatgagttgaaacaatttttcattaaaagtgaagatccatccgatactttcaatgctttccggatgaaattaactggtttgactacagtaaccaaaacctacttcgaaaatctggtgaaagctttggagaatggtctggttgatgtgacacataatgaattccccccagataatgagaccaaatcaacacaagaaaaatacgaagaatatcaagattacgaagacgattttctcgaaacacaaaggctatatgatgaagctcttttaagtggctgctactacgattgagatctctctcagcctcaatttaatcccttcgttttgctagcaatttggatattttttttttctttttatcaaagcaatttggattttttttttgatacttgacttttgaattttgattacttgctctcgcctagtacaatttgcaatggatagacatgtacttcacaatccttgaaaccgatattagaggccacccacgtcgtcacgacttggcggcaaactatacccatggaaaaatttacaatttaaaaaaggaaaaaacattgaacttggttccgtataagaaatatatgcagcgggatcaaatgttcatgcttttgtatttgtcaattccttagatttggttttaaaacctataattttttttgttaatgtaatgtttctaaacacgatgaacacaactaatccaaatagtgttaaatattttttcttaagtataacaactaatccaacgctaaagtcaagtttacttgttcgaccgcagatctcgattagagcatatgcaatggaagaggtttgcaaagtctctcaaattatattattttaagacacatatttttttttttttgttaaatttgaagtaataaaaaaagaatcaaaccaattatatgtcgacatgggtaaaagagtctctcaagaggttctcatttgaaatcccatgctcatctctctctctcttactttctattttttttttttttttattatccataaccattgttagaactccacattgcacatgctcttagaaactgttaattatttatttaaaatatgggaaatatttttgaaaaaattagaaagaaatttttgaagatttactttttttttggtaagttgggaagatttacttctatataaaaaaataaatataaatatttcaaataaagaaaataatgagaaaatacattaaatgtagattttgtttgttataaagatagtagtaaatatgacttataatgattatttctttatccttaatgtactattttattttttattttaaaactaatagcatttgatgtaatattaaggatagtttaatgttcttcagctagtttaatgactatttttaatttaaaaactaatattaacaacatttgatgttagttctatatatatatatatatatttggatttgttttttttgaaaagttatttttggatatataaatcttcaaccgaaaaaaaaaattccctcaacaaactttagaaccaatattatatatttggcctaaaatccaagagaaaactgagaaacaaaatttgatgaatttttttacacccgaaaatgtgaaatagatatgatacaaataaaacatgtggggcccagagaaactttaattttcgtaattgttatacttaacactagctgaagaacgttccggtgttccgagatggaaacacgtggaaaatgcttattggctataattttgagttatcctctcttatgttgttttagcaccaaggatatcctaatgataaccctaatatctgagcgatgattagaagagagcttctacaagtataaataaaataacgatcgagatcttgttagagcaaagccctagtttaccaatgagacttggcttcatttgcctcctttaaatctcaaagtcgtttaaggttttttttttttcagacggtc

SEQ ID NO: 13392 - DNA, 3000 bp, Unknown
  misc_feature (1)..( 3000): cDNA_ID_2702869_gDNA_ID_2214624_Annot_ID_135926 3000 nt of promoter + ATG
acgacatcatcgatatcgaatcaggagaggaggatttgtacagcgatggtggtaacgtatccgatgactacaaccctgtggacgacacaattagtcgatctgagaaaagttacgttgttgttaaggaagaagacattcttaagcttcaaagagacgatatcgaacaagtttcgacggttctctctgtaagccaagtggaatcgattgttctgcttcttcactatcattggtgtgttagtaaactcgaagatgaatggtttacggacgaagagagaatccgtaaaaccgttggtatattaaaggagcctgtcgttgatgttaatggtacagaagtggatattcaatgtggaatttgctttgaatcatacactcgaaaggaaattgctagggtttcttgtggtcatccttattgcaagacctgctggactggttacatcactacgaaaatcgaagacggtccgggatgtttaagggttaaatgtcccgaaccttcttgttacgctgttgttggtcaagacatgatcgatgaggttactgagaagaaagataaggacaagtattatagatattttcttaggtcttatgtcgaagacgggaagaagatgaaatggtgtccatcaccgggatgcgaatacgcggttgaatttggtgtaaatggaagtagtagttacgatgtttcttgtttgtgttcgtataagttttgctggaattgctgtgaagacgctcactctcctgtggattgtgaaacagtgtcaaagtggttactaaagaacaaggatgagtcggagaacatgaattggatacttgctaagacaaagccttgtcctaaatgcaagcgtcctattgagaagaacactggatgtaaccatatgtcatgctcagctccatgtagacattatttttgttgggcatgccttcaaccattgagcgatcacaaggcttgcaacgcgtttaaagcagacaatgaggatgaaactaagagaaaaagggctaaagatgcgatcgatagatacacgcatttttatgaaagatgggcattcaatcaatcctcgaggcttaaagctatgagtgatttggagaaatggcaatcggtggagcttaagcagcttagtgacattcagagcacaccagaaactcagctcagtttcaccgtagatgcatggcttcaggttagtaaaagtaacatttacaagaccattgaaaatgtttgtggaaacgacggaacataatggaattactaccatagtagatatataataaacgacaagctttcttgaagacgattttatgagtaacttatcattgatctgaactgatgaatagatagattacaaaaaaagtgtgtataattttcaaactggcaaaaatcatcccaccattatgctagccaccaatgagattctaagttagattttgttacttacattgtaacagcggaacataatctgtagtagaaaaaactagaaaagctttattaaattgaaaaatcatcttaatgacggttaactttccgaaatggtgaaaccattccaccattatgcatgagaactaccaattagactctaagttagttacggcattaattatattctcattccaccattatgcatgagaactaccaattagactctaagttagttacgacattatattaattcttgttgacatgtacttgattttactgttacagatcatcgagtgtaggagggtcttgaaatggacctatgcatatggatactacatacttagtcaagagcgcaacaagcgagtatttgcaaggtcagtttttggtacggaaacacttaatttgtgtgtaatcttaatttttccattaattgtagcagaactttttcgttgtcttgttgttcagctgaggcagaaaatggtttggagagacttcatcattgtgcagaggaggagttgaaacagtttatcgggaaaattgaagacccatcaaaaaatttcggtgagctccgagcgaaattaattgatttgactaaagcaactaaaacctacttcgaaaatctggtgaaagctttggagaacggtcttgttgacgtggcatataatgagagccagtcaatagaagaacctgaatcttttaccaaaaggtccaagacaaggaaaataaaaactttaatttagagttttagtaacttcaatattttctatggtttatgtgtttgctgcgaaggactgtagatttttttatgcctttttttttaaccttagacctcaaagttttatttatttacaattaaggatttgcgactttgctgcttggttgctttatatttcatagtgcaattttggtgaccataatttgtatttattgtctgaaaacttctctagattaagagctaatgtaatatccattcaaacatcggatgaaacctctcctaacatgacaaagattaaaaataaattacatgaattgtgagaactcaagcatctataattctattttcgttgagctcatctatacaactctttctgaagtccaacaaattctaaaataacatgaaaaagtatgatccacaaaaaaagaaagataacataatgaaatcaaaatttttatcggacccacccacctaatctcctcccttcatggcttcatctacccgccacgtttattatatggcatagtaagaatctttttttttttaccatcacaatgtcttaatcgtcatagattgctctctacacatttcatagaaatcaatcctgaaatactctcacgcattgcatacaaacttattcacaaaaaggaagcatcaatttataatgaatcattccttcaaatttaaaaccaaattaacagaagaagagaagaagaagacgaaaaagaagaattgacaagtattctaaaaattataataacttttatccaacatcgtaaataatgagacatgtatataacactatattcacttaacttacataggagacacaatatcaacaacttattgttcctttggttcgaacaattttaccaaaaaa

SEQ ID NO: 13393 - DNA, 3000 bp, Unknown
  misc_feature (1)..( 3000): cDNA_ID_2702873_gDNA_ID_2214624_Annot_ID_135927 3000 nt of promoter + ATG
attgattatgccagacggcttgaatggaaaaacaagtgtaactcgtgtaatgcaaaccacaatctgaatttttcatattgctttttagcaaattcatggcacgaagttagatatatagcaaagaactctcttacatcttcgtcagtgagaagtccccagtgagcgtcgagaatacgatgtaccttggggtcaaaaaatggctcaacgggataaacatctccctacatttaaaaagataagataacttttaaaaattagcaaactcggaaatccttcagtgcagccagggagaaaaacaaaaaagggcatgcttcaaatgttgattccaggcagccaccacatagagggaaaaaaacacaggcatctatagttctgtttaactttatcaaatagccaaacctactataatttatgcaaccaaattttttgaaaggaaagtgaggaacttcaagctgaagttaaacaatctaaggagcagagaagcacacacccctgctgatgtttccttttgagggacaatggctccttttttgctacttcgaagaacactaacaggcgcttgctccttgagatctggataggatgctgctgaaaatcgccaaaatggagcagttgcacccatcttttcccttctcagtgctatctgttatccaaaaatgtcattccattttccctaaattagtgaaagtccctgagatctatgcctttgtgtccactcaaagatgtaactactacatacatacattagatagcacaaactagatgatattcaaaagccataaaatctagtaattccaaacatacactacctttcctgtccttacaatctctctgatctgaaactttttcaaatttctttctacagcaatcatttttccaggatctccagttacctgcaaaatagcttaaaaatgattactaaagagctaaaataggtaaatcagagacacccttttttttactccactttctcataatcaaggtaaaaagaacaatatatttaaggttatgcttctctaactttcaaaagtgaacactgagcattcccacagaaatttgcacaggcaatacaactcagaatacagattataagcatagggtaatcaaaggtagcacactgttgaataactttctcgttatattaaattcaagaagttgcaccaaaagtttcaaataaactttaatacacatcctataatagagtcctgcatgtggatcatcatcagtttcaaaaggcaacgaaaatccaactaatagatataaaagttaaaatgataccctccataatatttctgatgtcttccaacgattagtaagatgttcaaacagaagtctgaaacccacaggctacagtgcgaaacaaatatcaagaccaacacaaatcataataagtagatgtacctcgatagtcaatgcatgttccgctatatctacaactcttgctctgaatgtgtcaactagccacatgatctgtgaattcattaaaacagaagcttaatcaaatttagagagaaaactaacaccacctctgccctaaatcagaagcaaccagcaagtacagtaaactctaatttcccataggcaaggaatagtacctctgccctggattctggatgtgcattcacttttacaagcatcagctcacgctccacttgcggctcacttgagatatcttcaacctaattcatgtccaagtcaatgaagagaatggaaaaggaaatcgcaaatgtaatcttcaaataatgaataagcaaattggctgatgcgtaaagttggtgcgaatgaaactatagtcatgcagaaactaataagtgcgatctaacaaaagaacaacctttagaacattaacgagcttctggagttgctcgatgacctgctgaagtaccctttcagttccacagacaactatggtgaatagagccttgtctctgttcagaccaacagcaagactctcaatattgtatcctctccttgcaaacactcctgcaatcctattaatcattccgctttcgtctccaacaaatactgaaattgtgtgcttcctcaccctgattttaatgcacaaagaatcaatcaaagcaaaggccaaaaggaaacgactttaagcaaatattattcacagtacttcgattttggagtcgcagatgaagcttcggagaaagacgcatcagagatcttcccatcgacgcttctaacgaatccttccattctcttacccatttcatcgccacggtgcgaagatataccggagagatatgaaatcttcgccgggaacgatacacgcgtcgaggatacaagagcaggagaagaatcggaacatgccgatctcaagcagcgaatagatggtgaagaacttacagaaatggccgccattgacgagacgaagccgaaggttttttgctactgaagaagactgacgacgacgaaacggcaagtgaaaaagaacgtatatatgttggttagaccggtcaaaccgtccggtccggttcggttgttgacgaccttagaaatcaatggctttaagaaaagcccaaaaggcttcgagtagataagaccaacacgtcagctccacgtataacaaccttttcgagtcaactattttcctaattttgctaaaaagtatcttgggttcgtcggaactaattgtaattatgagaagtttagggtaaaattcataatttaggaaaagaaaatgattttaaatccggtaaagccaccgaaaaaagtggacaatcaagaagagtccatatttacgcgggactcgccaaataatgattgaaaggaaaagtcaaatcaaagtcaatcggaaacagacgtcgccaataatatcttcacccgtcaaattaaaattaattatttctcgataagcaacgcgctagagacggatctcacataatcaccagatcaattttctcgagaaaaagaaaatgtgattatccattcgattttttcgcagaagaagacgaaagagagaagaagagaaagagatttgaaatcatg

SEQ ID NO: 13394 - DNA, 3000 bp, Unknown
  misc_feature (1)..( 3000): cDNA_ID_3029896_gDNA_ID_2214624_Annot_ID_187754 3000 nt of promoter + ATG
ttcagcaatacaaataatgcggcttcaagacgtaacagatcatcccatgctacactatttgggagattggttcaagtaagcttggtaaagtgaacctccgattaatccattttttaagagcctcagtaatagttggtaacaacattgtagggaatgcaaccatcttcagtgggattggaaacatccagcggttacagtgggatggctggaataccaaatgaccaacagatggtcgaagctaaatatccggctttactattcaagcaacacttagcagcatacgttgagaaaacatatggaatgatccgagacaaattaaagaaagagataaatccattactaaatctctgtatccatgttagtacatcattcatcaagttaatatggaactcatcttaaagttttgctaatcgcgtatgttaataatgtgttatatgtgagatgtaacaggcaccaagaccaacaagagccaaaaccttgcgagatgtgactaaaagcatccacttgaccacaattgccaagcaacaagcatcatatgtacagtggcagaacattgtcaacaagcttgaacataccttgacttttatggcagagaaccatgtaaaacaatgcactttcgaagatttccagctcaagcttaaatttgtcttttcctgtttcttgactgagccttaatgatctccaggtcccatctatgatcacaagaaaactcttccatcaggttttctcgtacatcaatgtgcagctctttaataggtacaaaaatatatcgcataggacacaagtacctatgtttggttatgacgtagcttgacttgtaaagtttatcttctggcagtttgttgcttcgccgagagtgttgttcagttagcaatggagaatacctaaaaatgggcttgcatgaattagagcaatggtgcctgaaggcagatgacgaggtaggctataaagcattaataaccaaatcatgcaaagatgaaaaataagacaaaagagattaacttacataattctgttcttttttgtctcctacaggcaacacgatcaccatgggatgaacttcaacacataaggcaagcagtgatgtttctggtatagcatcgaaccatatctgttggttaaagtacaaaactagtgaacaaaattcgatatttgatatacactatcactctacaggtctcacatcaaaagacacagaaatcattggacgaaatcgcaaaagagatatgcccggtaaagaccttaaaccaaaaatttctgcagagcatatagaaggatcttaatatgacacaattatctattagtggttactcctgaaacactatacagttggatacatgagcaaacgggtgaaagatcttatgaaagtaaaagcatctagagaatgacaagatggcataactaaaccatcctacatttctacttccagtcactgtcccctgatttgttgatttgttgctcaggtactaagcattccacaagtatatcgaatcgggactatgttttgggacgacaaatacggaactcaaggactctcccccgaggtaagtaatggatcaacctaactaactccagaaattctcttcaaacaccatgaaccaggattgtatccaaattacacaaaactaagattgggctcatgatccaacgatttgtgccgataataggtgatcaatcagatgaggaaactaatgacggaagattcagcgaacatgacttacccttctttcttgctagacgtcgattcaaggtacgcaaaaaacaaaattctcgctttcttctcagtttctctccctaattactctcaatgcatgtttcagcattcctttctcagtggaagatgtttcgcaatccttccacggcggtaacattagcctctccgacgtcgatccatcgccgcttctccgccagcgatctgattttcacttcttattccagacattgccggaataaaggaagagaaacgtcggagagaaacttctctgtctcatagaaggttacaacagctgagaatcttttataatttattaattaagccacgaattttccatatattacagaaatggaagcttttcaattttttctttcaaattttttttttctgtcacatgaagcaagaagcttctcctcttttatgattcctttaatttttcatttggtttggggttctttgctttttatcacttaaaatttacattgtgtatagatagagttttgattcatatcgtacatggtatactcgtttttgatacacatgatgtaatgaatattatatgtgttaatgtaattggatttgtaaaattttgaatttgacacaaaaggaatatcaaaaaaccaatcagtgctacatttggtccttattaggataatttgtggatctacaattttttttcccctttaaatataatttaacattaaaaaaacactacttactaatataatgatttgtattagtattttcgttgattcgttgtattaccatctgaatttagattcacaaaatgcatattgttgacaaaaaatgaatgttgaggtttgtgcacttcggattagtacttgattccatatgtgtatgatcaaagccgtcgacgagactaagctaataaaacttctgtttgcggctattttttgattatatacaagattagccatatttttagcaaaattattaatgtagattagtggcaaaaggcatggtggcatagtttgggcatggtggcatagtttgagagtttgagttttttacctctattttcattagttttatcaatttaaatcatgatagtaatatctaaaattatttatttatccaaacaaaatagtgggcatgttctataataaggcgatttttgagggatcactaagataattaatggacatcttttattagtgctttggtttgaaagcaaactcgctaagctagcaagagggtttagctaaaacccactctctgttaaaaatcacagcactgccattaaaattctcagatagaagaagatg

SEQ ID NO: 13395 - DNA, 3000 bp, Unknown
  misc_feature (1)..( 3000): cDNA_ID_3029900_gDNA_ID_2214624_Annot_ID_187752 3000 nt of promoter + ATG
gaaccagaagcatctgttcatcgaatccttgatccatcaacttcggatcaatcgcaaggctaggattttccgatgttattatgttcctcatccactttatcagactcatctcgtcagtatgctgaaaaaactcatctgaaggaagcttcccaatcaccagaatcccaagaatcactccaaaactatagatatcacatttatctgtgaacttgtgggtttgataaaactctggtgctatgtatcccacagtacctgcaacatgcgaggttgtaatatgtgtgactgcatctggcattgcctttgccagtccgaaatctgaaattctggcttccatgtcatcatcaagaagaacattggctggctttaagtctctgtgaatgattcgtgggttatgatccatgtgaaggtactcaagccctgcagctatacctaaagcaatcttgtgcctcgctggccacattagttcttgatttccagcttgtacgtcagtcaatatatcttgcaaactccccttttccatgtactcgtaaacgaggtagtggcactcgggtcttgacacgtgtgctaacaatgggagaagattccggtgccggatatggccgactgtgttgatctcggatctaatttgcctcattttcttgttcagaaacttggaatcttcatctgttagttcatcggcgtctttaggcggttggatcactttcttcacagctatgatcttcccattgcttcctggtagttcagctttgaaaacttctccacaacctcctcttcctatgatctccagagaagctaacgcttcttcattctccaagaaagctaaatcttcagctttcttgatcaatgggctgaatatggaaggacctggtggtttttctgatcctcttattgcttgaataatcaatttgaacaacaccgagaagacaaacccagagattgttcctcctatggctccaacgacaaaccctaagatccatgccgctactttcttcttcttgctcttcttcttcttcttcttcaacttccctggttttggagctccctttggagcttttgatgtagtgctgttgttgggtttgttcgtgggacttgaagttggagtttcagcaagaatgtgtcttgtttgatgtggagatgtctgaagcttgatactgctcataaccggagccggaccttccaaataccggtttccggagaaatcaaagaaccggagattgtggaacgacacaatttgttccgggattttgcctgagaagagattgtttgcaacagagagattctccagattgcgtagattcttcaagaaattcaagttcccggataacttgttcgaagagagatcaaggattcgaagacggctcaaactagaaaagtttcccggaatctgaccggaaaatctatttttccgaagatcaagaacttcaagttgcttacagcttaagatatccaccggaacagcgttgaccaactggttattagacaaagtaagttccttgagctccgacaacattccgatgaccggagagatagtccccgtcaagctcctggatcggtagacgagcctcgtgacacggagaacgtattctccggtggtggcagagtgccgtctctcgcagaaaactcctcggcgaccgcaagggttgacatcactggccgaagaacgttgactgttgactccgagctctgtttcgatgacctgaagagctttgagatctgaggaatcgatatcgagccactcaacagaggagacgaatgaagagagaagaagaaaggagagaacggcgaggatgagaggccggagaaagagattggcgcttcccgtgggaacagccattttaattagagaaagtttcttcttgtggatgttgtcggagtctacactctgtctatttatggtcagcaactggtactaatctattgagaaatctttacgtgtttcgtggttttttttttcttctaaaactttatttttgaagtgacaaaatatatttgacccaaaaaaaataaagttacaaaatatattcacaagttaatttcttaatattgttatacacttatacatataattggtaaacttaaattaacagtttgaaaaatttatggtttgttcaagggatccatccaagccccggtttcatatcgaaaaaatggggttttctattgctagtattttatttgattagtttgatattaatgatagattactgaattcttacataagatctcctaacaaaattgtattttatattatgatatttagttatcaatggttttggagaaacattgattcagcgtatactttttgaattatttgtatattcttaataagagttctgtttttaattaaagtctaaagaagaaaaaaccattataaaaactgataatcctgacctgtgaaatgggctaaattgtacattttttttttgatttaaattcttccaggaagttttatgggaaaataataaagtagaaaatgtgaatatagaaagttgcaaaactgtattattgatatagcgaattttgttattgacttgactatgtaagcgttgataagtcaaagtctacgctgtgggttccatagtgagccaccgtttcctacacgttagaaaaaaataaatgttatgttacacacaccttctattttccagtcactttcttttagcgttttccgtcaatacgttcgttgtctgtatcaagattccaaactggtgagtgtgaaataactcgaaactggcttttaacttaaaatgagttaaccagatagctaacgaggatgttattgccactaaaccaatacattaccgatatggttcaagttccaacttcccggttctacaaaaccggtttgcctttcgccttcgcactcttgacttttttagattttttactccgggacttgagtatcttctagcggcagcagaatcttgtcgcagaagcgattcgtaaacctgtttcaaaagcaattgagaacagctgtgagattagaaaaatcgaaaaatg

SEQ ID NO: 13396 - DNA, 3000 bp, Unknown
  misc_feature (1)..( 3000): cDNA_ID_2991745_gDNA_ID_2214624_Annot_ID_187748 3000 nt of promoter + ATG
ccaattggtagagaatgtaggactaatgataagagaggaagtttactacttatatagattttaattgcttcttactctttttcctaatcaattcctttgtctttattttttattttcacaaaaagtaatttaatttgtctttttcgtatattctgattggttgttcttttcttttattgctaaaatatattttcttttaacataattaatgattttcaattatgttttagtcaaacccgaaagaaaaaggaaacaaattttttatatttccattcatgctaaaaagaaatgaaagtgtcacgaggtccgacccaaaggtcatacatgctaagcagcttatggttacttattcattttatgctttgcttatcaccaattttgttttatgattatggtaccaaatttgtttttactaaatagttgttgttcataaatatctgatactattttttaattaatgtgtggttgacaaaaaaaataatagaaaaaggtcatgtaaccgttttttttattcggacaactatttttattggaccggccatgcgtataacttccctatttggcaagttttggtctaccattctatcccaaataacaaaacttgggttttatggtctggtctacaactcacaaatcacaagcatagacaaatccgatcatgtggcaaattcaagcttcagattgttgttgccacacaccaagttaatttgttgatttttaaatttaaatttgttttcttttcgcttcttaactatttctttttggttgtcttttttcggaactattacttaattattactactactacacatttggatttgaagcactccataacctaaatcaggttttgtttttcattcactacatgaaattataaaacagagaaatgttttgtatggatttatattgcgtttgggataggtcggaattggttatataggatggaagaagctgatcgaatattcgaactagaggttaagaagcaacatgaaaacaagaaaccctaaattttgtttgtttgatatattggcttacctcgattaaatctgcatgatagcattgattcaacacattaattttaagcaacaaatctcgaactggtttcagataattaagaaagaacataaactagtttatggatccttttattaactctcaaaggtcaaagcagttgaataaaaaatttaactctaaacaacttattccctacccaaaaaaaaactctaaacaacttattgataagacacgaaaagaattgtaaaacccctaaaattcaattttgattttcataattcttaagtttttttttttagttaaagagataattctaagacttgtaaatactaattttaataaaacttgattgacacggaaatagagctacaaagtccacaataaacagagattaatcacaaatcatagctattctgttcgttgacataaaagcgaaattaaatcgaaaaaactatataggacaaaacgaaaaaaaaaaaatgttgaaaatatcctgaaatctactgcaaataagaaagaaaaaaaaaaagaaaaaacttttattgctctttttttacctctcaacgcaattgaataaaattttaatcctgaacaactaaattcacaagaaacacgaaagaattgtaagaaccctatgtagaattaagactttgattatagatgcaagattataaaagactattcttttattccttcgaaaacttactcaaaacccaagttcttacaatctcttaatctctctctcaaccatctaaggttttccacaacttggaaactcatatatttagagactaacatatccaaaacttactaggattgtaattagataactccaaacttttttttttccgctagataactcctaacttatcctttagatatctcctaaagatttaatataatcctatttaaactaaatcacttatatctcaagttattaccaagcttagtccaagaccctaaaactcaaatttgattttaataattctaagttgcaaactcatgacacggtaatagagatatagtccgaatacacagagattggtcacacagctgagccggagtcggcagtggagctacaacaacaacaggatccagccggagccggtgacggaactggagctggaaccgagttggatccggtgctggagtcggggctggagcaggagccagtgctagatccagacaatccagcgtcgtcctgacggagaccattgagtctagttgcaacaaaagctggagctgaagttggagcaggagtaggaacagcggaagacaaagctgaagcttgacaatccagggtcttcctctctgtgactgagttcctcctgcttctctttctccttggaacatcatcaaatattctccggcatctctcacgatccattctccgcgtacacctagctgactctgacaaaagaaagtgttgtttgctccacaaggaacagataataagaaatagattgactagggtgaatgagagaggagattatatatgttttctgttttgtaaatagttttttttcttatttattctttctctcagtcctaatttttaggcttttatttcttttatttacaaaagtatatcagtgattctaaatgtaatatttaagataagttcactaccattagtccgttaccgacttaccgtcctgtgttattagcgaaaaaaaacaaaaaaaaacatttttgagttacaacaacaatatgttcatgacgtgtcattttcttatttgatagtttttagtctacgattctatcccaaataacaaaacagaggtttctatagggttttaagtgttttgtttttgctgctggggaagaagaagaagcagtggcaaatacagttctgttgctgggtttgttgattttttagtcaattctttttttttttcttggcgatttaattttggaattgaacttgaaaaatctcattgggttttcgattaatttaatcttgttcattttgtttcaggaggaatg

SEQ ID NO: 13397 - DNA, 3000 bp, Unknown
  misc_feature (1)..( 3000): cDNA_ID_2702881_gDNA_ID_2214624_Annot_ID_187747 3000 nt of promoter + ATG
gtttcacgtctttccataggtcttcaacttgtttgacataatcagagttccgtttgaaaaaaatatatgaagctgacttggattttccatcttaatctctatttttttgcttttgtgttttggattttgtgctgaaatttgttggctgtgggtatagcttactggggatctagacaagatggttgcactgcaaaggttattggagccctatggtatatgtgaggtttgtttcgcaatctactttcatctcttagtgaatgcataaccccgtgaattcttaatttcttataatgatactccaattgttcggataaagtcccaaaatttagttgtagtctttacgacttagaaacagagtagtgaaatctaactctctggtaaaatcaataaccaaagctggacctagttacatgaatcttcttctggttgtgtgtagaacaagaataagcttgacaagccatgactactttcagattatgcatcgtgttgacgcttattatgaacaatcaatcacaggttgcaagaaccggtcgtgtggcattggctcgtgaatcgggagtggactccaagtaccttcgtggatactcctttcctttaacaggctaaaccgttgcagagtgcatccatcgaacatcagaaacttttgaaggtaaaagtttcattacacagtctatgaaccaactcaaagacagacagagagactgcgtagatatatgtttgtgactttgtttatgaaacaattagctgattttggcttcatttcgattcttttctttttgagataagaaaagttgttaggattattaatattcgttcgtcttattttcccaatatttcccaagttattattatgagatggctaaaagaggaaacacaaatggactttgtaaatgttatagtctagagagtcaaaagtcaaactaagtaagcgttgactgacccggacgtgtacctaaaaatgactcctcttctacaaattcgattcttacattggtaacttcaataacgattactcctgacaaaagtaattcaataattgtgagtccaaataagatccatacgactcatatcatcatctcttaaccttttcaataaatgtcacttctctaagaatatactttcaagtttcaaaaaatctaaccattttcatgattattctgtatttagaatcggggaaacttagatttggaaaaatacacttttggaaagaaaaagttgtgtttctcttcgatatgcatatgtaaaagaaaaagtttgagaattgcaattatagagccgaccatgtgctttttatgctttactcgtttattttaatttgtctgtagtgactacaaaattttcgggcactatgaatggatcgatcaatttatttatgctttatcggcggaagatataaattattcattgaatcataattttgtaatctccttgtttcttaatttattttgtactaagacagttctcaatttaaccacagtttataaccgtaattttgtactaagatataactgtattttgtagttagtgtagaattttgtctctccagctataaaaagctagagttaacttttgagaattttttacaacacttttccgtattttgtaatatgatcatattactaagctaagaaaatccggtcaaacaaattgtttaatcatttaattagaaatgtgaataagttaagaaatgcaagttctttttagtcgtccttagttttgtgtacaagacattaaattacaacactacacaaaaaggagaattcgttagttaactaacaaagtgatcaaccaaacaaaaccctaaccaaatgatactgacttggacttttaactagagcaagtaagtaaaaacgactagttgtatcgtcttacctttgtttagacttttaactccgattaggtgacatggcaccatccatagattagtcaatgaaaagagcattagagacctccatcaattattcaatttcttttatcttattagactcaaactgaaatatctaacacaccatagagaaaaagctttccactgtcgacacaaaaagagaaactaatactaaaaagtaaaaagtaaaaactttattatcgcttaagagtgatgcttgcataaaagcgtgttattaataaaaaagaggcactaacaaaaataaaacaagagtttgtggctgctgaaattcttcaaacccaactgatggtgatgctgatgttcttcttcttctgacattctctctctcttctctcttttcgcagcttcttcttcatcttcggcttaacaacaacaaaacttcacacacgtggtgagagagcacacaaaggctcaagctttttcaaacccttgttgaaattcgagctcttttggtgtttctcttttttttgttggtatcaatttggtgtttctcttggtcttgttgaggtactgaatcagcttcttcttcttctccgatcttaatcgattctaagtttcttcacagcttgggacgatttgacatctactctccaattcatttcccgtaaagttgtttttttttcttcttgttgcttgcaatacatggattcttcgaggtgataatcaacaaaagcttatctcttttgttttctcaaggtttgtgtattagagattagtgtttttgttagatttggggataatatatagataatctgggtttaggtattttagttgataacgacgataaattggagtaataggatatgactataatggaggagaagcagaacaacagtcctgtgggagagaagcaacagagctttaatggtataataataaaccaaacacaagagaatcagacaaaatcaatggagaaacaacagagtttccgatgtgtggtggagaatcaaccgagaaaggcgagagctttagagaaacaagtgagtttccaaggtgtgaatgtagagaactatcagcaaagcagactcggaagatcaatggagaagcaacagagttttcgaggtgtcaacgttgagaatcataaacgtggagtt

SEQ ID NO: 13398 - DNA, 3000 bp, Unknown
  misc_feature (1)..( 3000): cDNA_ID_3029912_gDNA_ID_2214624_Annot_ID_187746 3000 nt of promoter + ATG
ataatcagctagaatggttgagaaacagaatgaagtacttttagagagcatatagaacagtgagtggaataaaaccagactagatacagccatcaagaaatgccgaggagcacaatgtttgaccattaacgtaactaataggtaccggatataagatgacaccaaaacgtatgaatccataaggtactacctcatataatacgacaccaaaagagtaagaatccacactcctgtcaaatatttcatctttgtaaacctcaggtgccatacagtaatctgcaaacaacaaaaaaaatcatctgtttaaactattgcctcatggaaatggaccattcttataacttatgagtatatcaatagtagaaacagtttctatacttaatacttgtatcaaagtttctcaggaggaaataagcatttaggacttacttgaaggatctatatgggccccgtgattaaggatttttgatttatcagatgataactttgcaaaacttatcaaaccaaatcccgccaccttcagatgtcctccactatcgagcataatatttctggcaccttacaagaagttgcaaaaattagataacgagggtccaaatatatgttctcgaaaaacttaacgtgcaaatgcttctttatttagttatcttacttgggttttagatcacagtggattactggttctggtttacactcgtgaagataattcattcccctgagaagagccaaatgattcgttcaaaagattattaaaaaaaatgtagttgtaagttgaatacaatcttgccaaaaaagtcacatgcctggctatatcgagggcaaatcttagaactttggctggagaaagacgaccttttttttgaagatagctcccaaggtccccctgcaagttaccaccaagtggacaacattagttcctaccatccaaatattgcttaatgagggaaaaatcttttaaggtgtaaaaagagggagaagcttactttaggatgatactcggacacaatcatcatggggacattttgagtaacagctccaacaaattgcacaacattaggatgacgtaccttctcgaataaagtaagttcgtgtttgaaggcatttctgtgggtacataataaaagtcagatgagaagattgcagaacaaacgtaatatatgaaaagaaaaacaaggattaacacagagggaatgaagtggattccagaaaatattactggaaatgcacaattccaacatagaagattctataagaactatgattgaataatgttacagctcatatcatcatcactatgaacataacaaagatgatttcaacgatctatagcttcactcaagaagaaattcaaactccttcttgacctgttagctaacatagacatattactcactgaagagaagagtaatcttacatagtgtcagaatccttgtagagatccttatcaagtatctttacagaaaccttagtcccattccatttagccacttgatatattccctggcaagtggaaaagtgatgtagtatcttgttaaaaatctataaatggaaactaagacattattacaggaaagtaaagcaaagagagatcttgcctttgagataccatcagctttccgaacttgaagttcctgcggatttaactcgtactcaggaacttcacgaggattcgccacaaccatgggtgtccttttggttttctaaaaccaagaagaaaatgtaactataaacatattaagatatgaaaagaacagagcttgaatcaatgaaaaatgcagcaacataccggaactttagctccacgggctttcaaaatgttgaaaacatccatgttaccataatacttagcatcagcagctgcctatccacacaacacaaacataatttcaaaaccaaaagcacaaaacctaaccaataagagacaacaatagaaatttatcacattaccgtgcttccccaacgatcacgagcatcaatattagccttcctagtaagaagaagcttgacaacatcgacatgaccttcacaagcagcgatatgaagagccgtacgaccatcaagatcgatactattaacatcaataccttcatcaagcagatcctgaacaccttcaacatcacctctacaagccacaaatagaagctgcatagtagcgtcgagattatccggtacagcaagctgcggaccgttagaaccatcaggactccgacgaatcggatctaaagacgattgtcgaccaaaactaaatcgcatattgttccggcgaggatcatgtgaagcttgacgcgtgaattgacgactaagcgtacgacgaagcgatccagttgagaattgtctcgagattcctcgttttagctgtcccactacattcgccatgatttcaaatctctttctcttcttctctctttcgtcttcttctgcgaaaaaatcgaatggataatcacattttctttttctcgagaaaattgatctggtgattatgtgagatccgtctctagcgcgttgcttatcgagaaataattaattttaatttgacgggtgaagatattattggcgacgtctgtttccgattgactttgatttgacttttcctttcaatcattatttggcgagtcccgcgtaaatatggactcttcttgattgtccacttttttcggtggctttaccggatttaaaatcattttcttttcctaaattatgaattttaccctaaacttctcataattacaattagttccgacgaacccaagatactttttagcaaaattaggaaaatagttgactcgaaaaggttgttatacgtggagctgacgtgttggtcttatctactcgaagccttttgggcttttcttaaagccattgatttctaaggtcgtcaacaaccgaaccggaccggacggtttgaccggtctaaccaacatatatacgttctttttcacttgccgtttcgtcgtcgtcagtcttcttcagtagcaaaaaaccttcggcttcgtctcgtca

SEQ ID NO: 13399 - DNA, 3000 bp, Unknown; identical to SEQ ID NO: 13392
  misc_feature (1)..( 3000): cDNA_ID_2702869_gDNA_ID_2214624_Annot_ID_187744 3000 nt of promoter + ATG

SEQ ID NO: 13400 - DNA, 3000 bp, Unknown; identical to SEQ ID NO: 13398
  misc_feature (1)..( 3000): cDNA_ID_2702877_gDNA_ID_2214624_Annot_ID_135928 3000 nt of promoter + ATG

SEQ ID NO: 13401 - DNA, 3000 bp, Unknown
  misc_feature (1)..( 3000): cDNA_ID_2702881_gDNA_ID_2214624_Annot_ID_135929 3000 nt of promoter + ATG
gatttgccgcaactttccaagctgttattaactttgtgaggattttctgcaggtccatgatcttactcatttgccattttctgaaagagaactgatgctgattaagattgccgtgaacgctgctgctagaagagatgtcctggacattgctagtattttcagggctaaagctgttgacgtatctgatcacacaattactttgcaggtaaaatacatttctcataaatgggatttttatgtagctgttattgcatctcagatgagaaatcctttcaattggagatcttcaaagtttcacgtctttccataggtcttcaacttgtttgacataatcagagttccgtttgaaaaaaatatatgaagctgacttggattttccatcttaatctctatttttttgcttttgtgttttggattttgtgctgaaatttgttggctgtgggtatagcttactggggatctagacaagatggttgcactgcaaaggttattggagccctatggtatatgtgaggtttgtttcgcaatctactttcatctcttagtgaatgcataaccccgtgaattcttaatttcttataatgatactccaattgttcggataaagtcccaaaatttagttgtagtctttacgacttagaaacagagtagtgaaatctaactctctggtaaaatcaataaccaaagctggacctagttacatgaatcttcttctggttgtgtgtagaacaagaataagcttgacaagccatgactactttcagattatgcatcgtgttgacgcttattatgaacaatcaatcacaggttgcaagaaccggtcgtgtggcattggctcgtgaatcgggagtggactccaagtaccttcgtggatactcctttcctttaacaggctaaaccgttgcagagtgcatccatcgaacatcagaaacttttgaaggtaaaagtttcattacacagtctatgaaccaactcaaagacagacagagagactgcgtagatatatgtttgtgactttgtttatgaaacaattagctgattttggcttcatttcgattcttttctttttgagataagaaaagttgttaggattattaatattcgttcgtcttattttcccaatatttcccaagttattattatgagatggctaaaagaggaaacacaaatggactttgtaaatgttatagtctagagagtcaaaagtcaaactaagtaagcgttgactgacccggacgtgtacctaaaaatgactcctcttctacaaattcgattcttacattggtaacttcaataacgattactcctgacaaaagtaattcaataattgtgagtccaaataagatccatacgactcatatcatcatctcttaaccttttcaataaatgtcacttctctaagaatatactttcaagtttcaaaaaatctaaccattttcatgattattctgtatttagaatcggggaaacttagatttggaaaaatacacttttggaaagaaaaagttgtgtttctcttcgatatgcatatgtaaaagaaaaagtttgagaattgcaattatagagccgaccatgtgctttttatgctttactcgtttattttaatttgtctgtagtgactacaaaattttcgggcactatgaatggatcgatcaatttatttatgctttatcggcggaagatataaattattcattgaatcataattttgtaatctccttgtttcttaatttattttgtactaagacagttctcaatttaaccacagtttataaccgtaattttgtactaagatataactgtattttgtagttagtgtagaattttgtctctccagctataaaaagctagagttaacttttgagaattttttacaacacttttccgtattttgtaatatgatcatattactaagctaagaaaatccggtcaaacaaattgtttaatcatttaattagaaatgtgaataagttaagaaatgcaagttctttttagtcgtccttagttttgtgtacaagacattaaattacaacactacacaaaaaggagaattcgttagttaactaacaaagtgatcaaccaaacaaaaccctaaccaaatgatactgacttggacttttaactagagcaagtaagtaaaaacgactagttgtatcgtcttacctttgtttagacttttaactccgattaggtgacatggcaccatccatagattagtcaatgaaaagagcattagagacctccatcaattattcaatttcttttatcttattagactcaaactgaaatatctaacacaccatagagaaaaagctttccactgtcgacacaaaaagagaaactaatactaaaaagtaaaaagtaaaaactttattatcgcttaagagtgatgcttgcataaaagcgtgttattaataaaaaagaggcactaacaaaaataaaacaagagtttgtggctgctgaaattcttcaaacccaactgatggtgatgctgatgttcttcttcttctgacattctctctctcttctctcttttcgcagcttcttcttcatcttcggcttaacaacaacaaaacttcacacacgtggtgagagagcacacaaaggctcaagctttttcaaacccttgttgaaattcgagctcttttggtgtttctcttttttttgttggtatcaatttggtgtttctcttggtcttgttgaggtactgaatcagcttcttcttcttctccgatcttaatcgattctaagtttcttcacagcttgggacgatttgacatctactctccaattcatttcccgtaaagttgtttttttttcttcttgttgcttgcaatacatggattcttcgaggtgataatcaacaaaagcttatctcttttgttttctcaaggtttgtgtattagagattagtgtttttgttagatttggggataatatatagataatctgggtttaggtattttagttgataacgacgataaattggagtaataggat

SEQ ID NO: 13402 - DNA, 3000 bp, Unknown
  misc_feature (1)..( 3000): cDNA_ID_2702885_gDNA_ID_2214624_Annot_ID_135930 3000 nt of promoter + ATG
tatatctcaagttattaccaagcttagtccaagaccctaaaactcaaatttgattttaataattctaagttgcaaactcatgacacggtaatagagatatagtccgaatacacagagattggtcacacagctgagccggagtcggcagtggagctacaacaacaacaggatccagccggagccggtgacggaactggagctggaaccgagttggatccggtgctggagtcggggctggagcaggagccagtgctagatccagacaatccagcgtcgtcctgacggagaccattgagtctagttgcaacaaaagctggagctgaagttggagcaggagtaggaacagcggaagacaaagctgaagcttgacaatccagggtcttcctctctgtgactgagttcctcctgcttctctttctccttggaacatcatcaaatattctccggcatctctcacgatccattctccgcgtacacctagctgactctgacaaaagaaagtgttgtttgctccacaaggaacagataataagaaatagattgactagggtgaatgagagaggagattatatatgttttctgttttgtaaatagttttttttcttatttattctttctctcagtcctaatttttaggcttttatttcttttatttacaaaagtatatcagtgattctaaatgtaatatttaagataagttcactaccattagtccgttaccgacttaccgtcctgtgttattagcgaaaaaaaacaaaaaaaaacatttttgagttacaacaacaatatgttcatgacgtgtcattttcttatttgatagtttttagtctacgattctatcccaaataacaaaacagaggtttctatagggttttaagtgttttgtttttgctgctggggaagaagaagaagcagtggcaaatacagttctgttgctgggtttgttgattttttagtcaattctttttttttttcttggcgatttaattttggaattgaacttgaaaaatctcattgggttttcgattaatttaatcttgttcattttgtttcaggaggaatgattcttccattttcgacacagttcacttgccctgttcaggataatggattcagcccttcttcactactttcccattgcaaaagagatcgttttgaagttacttcgttgagatatgactcttttggttcggtgaagactgcctcctcctcggttagtttctgattacctaactctctaattttgattacttaagttgcgaattggctaatttgaaaccttttttgctctgaggtattgctagaagtggaatgttatgaggtcgaggagaaatgtgaaagcttttgggttagttgataaacttgggaagaaggtatggagaaagaaagaagaagatagtgacagtgaagatgaggaagatgaagtgaaagaagagacctttggcgggaaagaagcgagtctcgatgatccagtagagagacgggaatggaggaagacgataagagaggtgattgataagcatcctgatattgaagaagacgaagagattgatatggttgagaagaggaggaagatgcagaagcttcttgctgattacccacttgttgtgaatgaagaggatcctaattggcctgaagatgctgatggttgggggtttagtttcaatcagttttttaataagataacgattaagaatgaaaagaaggaagaagaggatgatgatgaagatagtgaaggagatgatagtgagaaggagattgtttggcaagatgataactatatacgcccgattaaagatctcacaacggcagaatgggaagaggcggtgttcaaagatattagtcctctcatggtccttgttcacaaccgctacaagaggttggtggtaacagtttgtcttacttatgcttgtcaaaatgctacacattttgttgattagtttttatgctgatcgctgactttggttgttattgggctgttttgtttatggattcaactcactttagtgtttagaagtttcaacctttattgtatctgtagataggtgtctctggctctctattcttgctgatgggatctttcaatcctgactattgtagttctagctgtgttgttgaaatttgatacgagtactggttaatttcaggcctaaggaaaacgaaaagttcagggaagaactagagaaggcgattcaagttatatggaactgtggacttccttcaccaagagtaagttgtggacatctctttaccatttctaaaaccattattgaatcttgctgtatgttgtggtctgtgcttaaacctcctgggtcattattacttccagtgtgttgctgttgatgctgtggttgagacagatttggtctctgctctgaaagtatctgtcttcccagagatcatcttcactaaagccgggaagatactataccgcgagaaaggtattgttcgaggaaacctgaaaccgttcagtacctgaatctctaacctttgttgctgtacttaaaatcaatttaacttatttttcaggcattagaacagcagatgagctttcaaaaatcatggctttcttctattatggagctgcaaaaccaccttgtttgaatggtgtcgtgaattcgcaagaacagattcctttagtcgatgtaagtgtgaattaagcataagcctttgtgatcttatgtaaagtagtttcttctctagtctgaagaaaatgtatgaactgaagaagtaatcaatcttttgaatgtgaaatatatgtttttcgaaattgctatttatagaacatgataaattttatgagtctcagaagcagaggcttcgcgtccgtaaacacttgatcaccatgtttctctctcttgcaacgtgctctcttctccctttctctctcgctctctctcaatctcccaccatctctcatcctcatttccccttcatggttggttttgttccgatttccaaatttcttcatttggcaaattcttttgatcttcttccatg

SEQ ID NO: 13403 - DNA, 3000 bp, Unknown; identical to SEQ ID NO: 13395
  misc_feature (1)..( 3000): cDNA_ID_2702896_gDNA_ID_2214624_Annot_ID_135934 3000 nt of promoter + ATG

SEQ ID NO: 13404 - DNA, 3000 bp, Unknown
  misc_feature (1)..( 3000): cDNA_ID_2702904_gDNA_ID_2214624_Annot_ID_135936 3000 nt of promoter + ATG
aacaggcaccaagaccaacaagagccaaaaccttgcgagatgtgactaaaagcatccacttgaccacaattgccaagcaacaagcatcatatgtacagtggcagaacattgtcaacaagcttgaacataccttgacttttatggcagagaaccatgtaaaacaatgcactttcgaagatttccagctcaagcttaaatttgtcttttcctgtttcttgactgagccttaatgatctccaggtcccatctatgatcacaagaaaactcttccatcaggttttctcgtacatcaatgtgcagctctttaataggtacaaaaatatatcgcataggacacaagtacctatgtttggttatgacgtagcttgacttgtaaagtttatcttctggcagtttgttgcttcgccgagagtgttgttcagttagcaatggagaatacctaaaaatgggcttgcatgaattagagcaatggtgcctgaaggcagatgacgaggtaggctataaagcattaataaccaaatcatgcaaagatgaaaaataagacaaaagagattaacttacataattctgttcttttttgtctcctacaggcaacacgatcaccatgggatgaacttcaacacataaggcaagcagtgatgtttctggtatagcatcgaaccatatctgttggttaaagtacaaaactagtgaacaaaattcgatatttgatatacactatcactctacaggtctcacatcaaaagacacagaaatcattggacgaaatcgcaaaagagatatgcccggtaaagaccttaaaccaaaaatttctgcagagcatatagaaggatcttaatatgacacaattatctattagtggttactcctgaaacactatacagttggatacatgagcaaacgggtgaaagatcttatgaaagtaaaagcatctagagaatgacaagatggcataactaaaccatcctacatttctacttccagtcactgtcccctgatttgttgatttgttgctcaggtactaagcattccacaagtatatcgaatcgggactatgttttgggacgacaaatacggaactcaaggactctcccccgaggtaagtaatggatcaacctaactaactccagaaattctcttcaaacaccatgaaccaggattgtatccaaattacacaaaactaagattgggctcatgatccaacgatttgtgccgataataggtgatcaatcagatgaggaaactaatgacggaagattcagcgaacatgacttacccttctttcttgctagacgtcgattcaaggtacgcaaaaaacaaaattctcgctttcttctcagtttctctccctaattactctcaatgcatgtttcagcattcctttctcagtggaagatgtttcgcaatccttccacggcggtaacattagcctctccgacgtcgatccatcgccgcttctccgccagcgatctgattttcacttcttattccagacattgccggaataaaggaagagaaacgtcggagagaaacttctctgtctcatagaaggttacaacagctgagaatcttttataatttattaattaagccacgaattttccatatattacagaaatggaagcttttcaattttttctttcaaattttttttttctgtcacatgaagcaagaagcttctcctcttttatgattcctttaatttttcatttggtttggggttctttgctttttatcacttaaaatttacattgtgtatagatagagttttgattcatatcgtacatggtatactcgtttttgatacacatgatgtaatgaatattatatgtgttaatgtaattggatttgtaaaattttgaatttgacacaaaaggaatatcaaaaaaccaatcagtgctacatttggtccttattaggataatttgtggatctacaattttttttcccctttaaatataatttaacattaaaaaaacactacttactaatataatgatttgtattagtattttcgttgattcgttgtattaccatctgaatttagattcacaaaatgcatattgttgacaaaaaatgaatgttgaggtttgtgcacttcggattagtacttgattccatatgtgtatgatcaaagccgtcgacgagactaagctaataaaacttctgtttgcggctattttttgattatatacaagattagccatatttttagcaaaattattaatgtagattagtggcaaaaggcatggtggcatagtttgggcatggtggcatagtttgagagtttgagttttttacctctattttcattagttttatcaatttaaatcatgatagtaatatctaaaattatttatttatccaaacaaaatagtgggcatgttctataataaggcgatttttgagggatcactaagataattaatggacatcttttattagtgctttggtttgaaagcaaactcgctaagctagcaagagggtttagctaaaacccactctctgttaaaaatcacagcactgccattaaaattctcagatagaagaagatggagtgtgtagttccattccggcgatgcttctgtctcaatccgccggagacacgccaccgtatcgttaaccacaaccaccgaaatctccatatttctctctcctcctcctctttcgcatcaggtcgtcatttcatttcctcttctcttcttagtcaatcaacccagctttatatcctgactcgctcttacgtcaattccagggattttgcctctttctaataagaagtatcgatttgttggtcctctagcacagaggagttccttgcatcgccgtacggactctctcaagcaccttcctttttccgtggttagttctcagaaatttcgttttttttttttccttttcatttcagagatacttgaaattttcatataagtatgtgaatgaggagttgttgtggttgcttttattgatttagtcttcatttgtatgtgactcatgatg

SEQ ID NO: 13405 - DNA, 3000 bp, Unknown
  misc_feature (1)..( 3000): cDNA_ID_2702853_gDNA_ID_2214624_Annot_ID_135937 3000 nt of promoter + ATG
ttgcgtacacctaacaaattaaatatggttttcgttagtactataattcagtaactatgcgtgtgtgaggaaaaataacacaagggaacaaccatatttagttaccagatttggaaaaaatcgccattccaaaaatgaagagaatccaagtgcacaaatcagtaacaacggctgcacacattgcagtatgtcccatatccgtacgcaagagcttgagatccgcaagaatcctagcaagatcagggaaatttgtacagccaaatgcgatcgaccagtacatacaacctgctaggattttgtcggcctctccgttactgggaaggtagtataagccagcaccggcaagtaaagccgcaaggaggccaacaatggctatgatcactggtttgatgtctttgatctttatcatcctcaagtccaagccgagaccgaggaggaaaacgttgtaaacgagagctaagtttgcgaatgtctcaagaagcattgtatatttataagggaatataagtttaaggaccacttcgttattgccgagcacagtcgggctgaacagtaatccgcactgtaaacaaaataatcattacaattattataggatcatattataaattatgtacgagattaatttgaaaaagatccaataatataaatcgtatgttgcaagtggacaaatcttaaattttttatcattttggttttatcttaaaatcaccgttttcgaaaaaaaaaagaagcaaaaagctgaactttcgttagaacaatgaagttaattgttagcaaaaatttaatcaagaatttgaagatgaagactctttaggacatagctaacaaagaaaaaaaaggaaacataggtttgcaatagttgtgggtaataagtaatgaaaaaaaacagtttaaagattgataatggttagttaaatatgttttcaagattgactactcacaagtatttgagcgacgaaaggaggaagacatagaggcttaagaaaatagtagagtatgcggtaggtaagattagcgacagacagttgcgtcataaagaaaggagctgcggctgaaatggtgttgcttccatgcattgccgtttggttataacatacgactctcccaaaccgcgacgaacttgcatcaatagattcagctgcgggatcggccatttattggggggattttccttaatagatttaaacgggattctctcaaaaaaaacccaaggttttggccttttccctttcacaaaatctttgtgtttcatcatctgttttgttttattgcattaataggtgagagctacacaatctgtttttccttttttttttttttctctaatcttcttctttgtcattgctaattatagtttttttttatgtttgatgtcaaatagaaaagtactagtaatttagctgtctttgtattctcttttgcaaatgaaattagtcaattttggttggttttcttgtttagtctgttataaagggattataaaatccaattacatgctgttttccttgttatcaaataatagtactacatgatatcagtgttttttggatagatgagttaatatctcccttagtgatacaatgatatatttttatttcatttaaggaaaaaggctaaaacacagggttgcacatgtaatcatgatgttcttggatcaagaaattagacagataatgatgcaggtttgaatatttaaagattacttaacaaaactaaaataaaaactttcgaccataaataaaaaaagagagggaaaagaaagccaaacctagctggaaaagttaatccaaatggtccagtctcagaaaccggccttaaccgccaccggagattctccaccggccattaccttcacacaccccagaaaataaataaatggaaaaatatgtaactttctataagatttgacaaagtctacacttttaaggtgatgacttcaagtttaagcaccacacattggtgaaaggccttttggctctgcagtaagagatggaaacaaacgtaaagggcactattgtcttttaatgaaaaagaggaaagaagttcactttcacagcgaaacagtacctggccatggccgatcaagagaaaagttggtgcagtagcaatatcaaaatgtaaagcagacaactttattgttctaaaagcagagatttcacattttgttcaacgtacgaggaccccattcatactcaaaaggaagcatcataaagctttgaaaaggagaaacatatgaagagtgtgaccttacaccaaacagttttctatggaatgcatggttttcaaagcaaatgacctaagagagaatatctgaaagaagttgatttgccgccgcctttactgcatcttaagctctaaaacctgcaaaaaagagttaagagacttagtggagacgagaggtgactaggtgagggaaaagtcactttctaagttaagaatctccagtatcttctgattcagagtcgcctatttttttatgattcatctctttcttcttaccttttcttttgatctatctctctgttctccaactgctgcagattctcagtgtaagagcttggaagagcttgagttatggtaagcctccccattaacctcctgttgcatatactatcttttcttcttactgtgactattgaaaagctttctttgataaataatgttaggggactcctgtaaatatcacactcggatcacatgtctgggtcgaggatccagaactcgcatggatcagtggagaagtgactgaaatcaaaggcaccaatgccaaaatagtcactgcaaacgggaaaacagtaagaaactaatattcattacatataaaaccacaataaatggaaaagattatgatatttttaccatggacctttgcagtaagattcacagatttttctagaagaattttgagaatagattatattattacaggttgttgctagtatttctagtatctatccaaaggatacagaggctccgcctgcaggagttgacgacatg

SEQ ID NO: 13406 - DNA, 3000 bp, Unknown
  misc_feature (1)..( 3000): cDNA_ID_2713634_gDNA_ID_2214624_Annot_ID_135941 3000 nt of promoter + ATG
ggtttgatctaagcatgtcgaaaagaactcgaaaaccatggtctagtctcatcaacgatatgcatcaccatgcaatatgcacccaaagctcacaaccaaaaccagacaaagaacaagagcaaatcgaagacaaagagattgatcgtaagagtttgaacaatctgatgagatgcgatgagaaattgaatggagaagctgatgttaacaacaagagctctctagatcaacatttcgaggatggcgaggggatcaagccgacgatgcaattggtggtgaagaaagagaagcaaggtggtttgaaattcaaaggtatggtgggtcgatatgttaaggtctggagcggtttgataaaggccaaacgtgaccacaaatcgccggtctttcggtttaaaacttgaatcctatatacgtacgtttcatatacgtgatcacatatatatatattatacgattagttattagagataagctgtagactaggcagttttttggaatgttttgcgtacgtacgtattattgatgtgcacgtttgttgttggcatattggttttgacttgagattgtaattagcactatatacatgcaactcttgttttttttgttaagaatctcactacatgagttttgctttgtgttttgagcttttgccaaaaaaacaaatctgttaaagtcttttcgtcgtcagatcttagggtgttacggttgatcttttttggtttaacggtctaaactgtagtcgttctttgccaactagttacgattaggtgaactttaggtttatacataattgtaatatataacttttgatatttttgtagctctaacaatttgaagtgttttttataaagaaaaggcaaaacataaagagaaaccaaagataatgttttaaaacataaaatatgttcttaaatacaaccatttttgtttttggataattgttttacttctgttttccaattaatattcgcgatattataacccaataaaaaaaaaaatcttaaagaaaaataaaacacgaagaatgaaacaaatttaagtgttgtggctcggattgtgagttgtgagtttttgtatttttcatatatatcagatgacacatcgtgacatagatgaacaatttaactgacgatgtctgactaagacctatcctcattttctgccattacaatagttacggggttaactaattgccaaatgtttaaaatagtttataggtaagtaatcttctcagtcaatcaaatattatttttgttatactttttttttttttggttttaatgttaagggtttgttttactttatacgtaatacaatacaatttctttctaatttaatcaacattgcttagtttcaatccaaattacataatataaaatatgcagaagcgtggcgattttatagctatatatataacctccaaattagtgatgctttaaattcatttcctaagaagataacatataataatatcaaaatatcattgtaataaataactttaacactctatgtagttcatccatatgatttatcatatactaaaaaacgagtaaatactcaagaagtcacatgaataattaacataattaaagacagtttttgatcctcgaaaaacatatatagtatcaaatttgaattcttcgttgttagattcagttagtttgtctaaattaaaaatatatggatgttgtttttttttgtttttttataatcatgtagtttacgaaatgtacaaaacttctcaaattcaatagttaacaagtttttttgtttttttttaaacaaaaaaaaaaagacaatacgtaacaagttgacatcatgaaactatatttgacgatattgtttgttgctcttacaatatgtcaataactatagcctaaaatctttgtcgttcaaaattttcctgctctttatttccctagggctttcacaacatattttccggcttatcgagtttttattgtcgtatcgtaccgactactaggcgggtacgcataacaacgtagtttttttttgttcacaaataacaacgtagctaatttatttatttttcttatattatcatagacttttgttggttaaataaaataaaataaaatgagaacgtatcaggtgacctcagatgtaaggaaagggtcggtagtacgtggcatattatcattgggtatcttttttaccaattaaattggagatgcatcatgcatggcctcaccgaccatgttaagtaaccttgtggcaccgtcgaaaagcaagaatctttaactaaagtgtccagtcagctctttttcttttactttatttcggctaccaaacattattatacttcacaaaatatacgccaagtaatttttttttttctgcttaaaagtagatttctgcaattataacttttaagacaaaaaataaatgttttaacaaatgttttaagaaattttaagcttaaattttgtccagttttgatcccaatttttgtccagttttgatcccaattatgtaccaaaattataacttaatatttcattatatcaaactgtatttcaatatatatacaaaaatttgttgctcatatcatcatatcatatcaataaataaacatacgtcagattacatttatagttatatatatatataataaatttagatctcatattctcattgttattttgattaattccgttagttcatttaacactcgcttaatccagtttgattcataaacctatctgtaaatttaaataatatattacgttatccattgtataaaattaaatttctattactgaatacaaaagaacgtatttaattacatttttgtagaatccgaattccgaagcaaattaaacattaattgttaattaatttctctttataaaacccacctcatcctccaacttcttcatcaatctcaattctcaaacatcaagaagtctctacaaaaaaaaaatctcacatctaaagaaaactctcaatagaaaacaattaaacaacaatcaagaatctata

SEQ ID NO: 13407 - DNA, 3000 bp, Unknown
  misc_feature (1)..( 3000): cDNA_ID_1397500_gDNA_ID_2214625_Annot_ID_135945 3000 nt of promoter + ATG
gcatgtgtaggtcagccatgaaatgcaagccatacatcaatttgaacaggaagaaccacggtggtacccacattgttttcagagaggtcaagggatgaaaggttggaagaagaatcaagaagtgtagagaaaaccatcctcgcaaaatatctatcgaggttgctatcgccaaaatgtaaggaatgtaaggtcctgaaagaaaaaagatgctcactaaaagtaaaatgaagaaagaagtacataataataatattacaacatttatgaagagactttgatagccaaatgagcaaacatttaacaagacacgttttggcatcagtccatatatatacctcaccgacatcaggaatgaaacgaaagcggaaggcgcagcaagtggatctatctcaatgctagatgtctttatacagaaacgttgcatcccagttgtgtggatacccttttcatgaagagaagtgcatattgcactgatggaactcaaagaaagcttgcagtgaataagttcaagcgaagttaatgtttctcggctctgaatcaagagcttgcacaagggctcaacctggagttcatggaacatcagcaataaaattccagctaactaaatctaggagactaaatagagaaagcgtcttacatgcttctcggatctgatccaacgtagaaccaaacttcgcaatttacttgtcctcaataactcctacagtaacaaagcctaaagattatttctgtcctccctctagaggttgaatgattgattcatcaacaaagatacaaatttgaagttctaagagagagataaacatcgaaagcaatacaacatatcacggcgatcagtggatactgaaacaaaaataaaacaaagatgactctatttacaaacacagaaacacatcaaaacgtcagagcatagtttaattacttacagaagtttctgtaacgcatagcacattcagaagcctcagacacctgcaacaggtaagaatgaacgcaaagaagcataagtatgttagagcattaaatcagtccaaaccagatatctcacgcacaaccagttatgagcgatataaaagtaaggcaagctgaaagtagtacagtgtatccgtatatacaaggaaaacgtgaggctatgaaacgattaataatcagacacacatgaaatgttactcaacctaagatatggtccaaaagtttggaaatgaaaagatagttccttgcagacacaattttgacaagtcatgatgtgctcttcatggcaaatgtatctcaatatgttatctgcaatagaaaaatacaacaaaaaaactgaataatgattattacacaactgaaaaaatcaaacccaagaatttcattggaacacataccagatacattaatggaacaaatccgaccactaaatgtcggacgcagagctacctcagctgcttcatcaacacaactgttactcggataaagatacaactcaaaaggaagttacataagcaataaaaaacaaatcatcgatcatttcaatagaattggcatacttttggagatgcttttcccagtaaagctgttgccaatcagctggtgattccacacggtcaacaaaatcaggccaccgcagcttaaacaacaacttccaagagctaccaagtacatcatttctgcagatgaatttaagttaaatctttctcagtctgtcttctcaattcgaataacaaaacagaaatcaaaagaagaattcatcaaaccttgcacgttttctcccagtaatcaagcagcaatcatctccagattcataactatccaagcaatgaaacggcctataccaatagaaaaatgtaaatgaaataagagttgtatcatcttcatccatataattcgtaaccctaactaaacctttcaatttgtattcaaaacttaaatgaaaccaaagagtgtactgacatgttggtctgaaacttctgcaaagcaagagcaggcaagtgagcgacaatgccatcaagtaactccgatggaagctcgtataaatctggaattggattatcgcctggaattacacaaaacccaaactcaaattcagcatattttggaatcaaattggcgcaacaaaagctttgttagaattactttctagaagctgaattttgagggattggatgcagagaaacgcaagagaaggagctttcgtcatccaaacaaagagaagagagtgccaatcgcaacgcaaccaaaacttcccgctgcagctgctctcggctcgctgtttctttcttccaaagagggaagagcaaataattcgttatgaggtctctttcataatgggccgcttagtatggcccaattcataattattcatagataattaaatctttttgtgaccagtaaaaaaacaattaaagttttaaaaactttgtttaaaaaaacatattttcatgagtagtgtaaattattttaaaaagaaatggaattataaggaaattttaatcaacaataattttataatggaatttaaatgttttttttatataaaaaaaaactaattgtgagcattgccatccaaaaataaatggtaaatttatttgtaattaaaaatagaagaaatatcaggatcatataaatcattaaacacatgcagccaaaaacataataagtgtacaaataaaattttaaaacagttccaaaaagcatcagataagagcgaaacaaattacaaaattgaattacacaataatgtcctctaagcgacgactaccggtgaaatattttataagaaaacaaaaacaataattaacaaacaaaggcgacacctttagattcgacaagacgaccattttagaaaaagcttctcaaattctctccttatccccaaaaattcaaacttttttctctttggaaaattctgaggcaaaaatgcggcgtaattgctgccatgtttcatttgcttcaaccctcaagatccttaattttgtccaagctttcattggtgtttcgatcattatctactccatatgg

SEQ ID NO: 13408 - DNA, 3000 bp, Unknown
  misc_feature (1)..( 3000): cDNA_ID_3029968_gDNA_ID_2214625_Annot_ID_187789 3000 nt of promoter + ATG
agtccctttgctggagaaacccgaacatgctatcttctatcccaagcagaaaaggggatccaatgagtaagaaaaatggcaaatgcagatacctaacacatatgttttgtctttgagtgactgttcgggtttgagaatgtttacctccattgcgaacagctttgagatgcaagattcctgtgccttgtggtccaatcacagggaatgaacaagacactgagtgcctttggtgagaaacagctagtgaagcattgtaccatggccctttctcaattggctctccgatggcttcaatcatcaccttactattcatcaccttctccatcgccttgctgaaaattaagcatacaaagactttttgagtaatcgccaatgcagatactacattcttgaaaatcatgtccatgttattgatttgatgatacaaggagaagatcatagagaaattcatgacagaatggacaacaaataacaaaatggtgcgtatagaaatccaaaaaaaatatgtttgttctggatattacggctgacttttcactcgattcctaacgaggacaggtagaagaagtatcattactttgtaaagtggcggcacaagcacaagatagactaccagactacacatctttctcttcgtttgcttaaccagtttcactaaagcttgaagccaaaatcgaaatatggagacagcatcaattcacgtacatgtatcactagcaggagaatttgagtttcgtttgttgtctttcgaagttgatcctttaaaccccaacccattgataacaaaatatggtcaaagaattgatggtctcagccaccacttcaacaaaatggtttaaacattatctaaacctgttgtccaaacgagtctcttgctaataaagccttgtcaagactccgaatcgattcacaattcaactatcagtgaaggttacacacatagtatgtctattgcaatagctaaacttcaatggaaagataaatgcatttttgatgaaacgaatatgtgatgggagattacctgctacatccacgatagatagaaagatcatcgagagcactcaaagcaacaccaccagtgactgtaatcaagacgaaagacactgccttgcgaccaaaagagcccaatgtcccagctgttttgtccgggctgtttcaaaaacattcttcagctcattttcactcctaaacgaccatatataacataaatcatccaaattttgaatctaatccatataagctcaagtcaataggtgtaaatgggtatatagatcatttcaccaactagaaaaactaggtcgattttgaaatcgcgatagagatggaatgaattcagatgcgcgaagaagagaaatcgatcggattccaatttgtaagatcgcaaatcaaaatccgaaattggatttttcacggtcaagaattgcaaattcaagcagaaaaatcagagaagttgcatcatttttgggtaccttgaggttgaagatcctttgaagaacgaagtgaaccgcctcgcgaacatttttctcaggtgaattttgacccgactcgctgattcgacccgaagcagcgaggtaggggatgatctgtagggttctgggttttgcaacttcttatttagattttattatttttacttttttcgttgaaataaatatagattaaaagaaaaacaatagtatgtttaaaaaacccgaaaaataacatttttaacctttaatgtttaacgtgtcatttaacagcattttaatcttcaatataattttactaaacattataaaacattttgtaccttaaaactagttttcttgtttgtaccgccataaaaaaatgacggaaaataacatctactaacatgaaatagttaaattatatttgtttaattttaattttaattaatttaatttcaatttatctatttaagagattaggaatgccatctctcctaattaatactatgatacagagcaccatttattttcgggctaatcttaggtgatgaatattaaattgccatttttatatgtgattatgacctctttaattcatcttttctgatgtttttctttacggaaatctgtcattttttatagtgtcacaaacatgaaaactagttttaaagtttagaatgataataaaattattttgatggtttatagtgttttagtaaaatacagtaatatctacgtttaaagtgttaacactttgaaaattaaaaatatcacatttccacgaaaaaaacaatacaggttttttttccaggtataaatgattttaaatacgagttgttactaaatatttttattcccatgagatttgttatcttccggataaattcaaatctttgatcattgttagtaaaatcatcattttgttatataaaaaaaaaacaattagtgagaaacactttgggctatttgaaaaagccccagcatacaaaatttgttaaccattcagaacattccacgtaggaaaattagtggcatttgcacgcgccgttctactcgcgggagagaatgatgactgatcatctcttttaacaccgagccaccatcgtctcgacgctaaggagggaaaagaagagaacaaagcgtgagagagatagagataaatccggttctagaatcccggtttaaccgccataccggtggaagattctgctttactacgctctccgcttcttcttctcctcgattcgattctcctcatgggtttatcatgaatttttaggtgagaatttcgatttttgtaatttgatagtcttctctaggttggagcataattggcgttaggtttggtgattggtggattcagtttccattggtttttgataatttgtgctggcttttggccattgattctgctttttcagttttcttaatttgtgtgtggattatttgctatctgacagtattatcctctgctctcgcaatttggacttgaggaattttacattgatgaatttgattttcttaggttttgagtaattcagaaactcgagtg

SEQ ID NO: 13409 - DNA, 3000 bp, Unknown
  misc_feature (1)..( 3000): cDNA_ID_3029980_gDNA_ID_2214625_Annot_ID_187786 3000 nt of promoter + ATG
tcctcgagacttcatggtgaacaaagtcccgttccccttaccctctcctcagatcttcaacctggatcaaatcaatgcacttacaaccgatacacttgtatctgacaacggttagtcattattcatagaagtgaaatgagttattttccttgagttaattgagtctcactttttattgtacaacaatggctatttcagccttgaagtttcaggatctggaccttgtcccccataaattgaagggatatccggtcgagtttcttatccaatatcgcaagggtggtcctaacttcggttctactgtcagtgaaaagataccaacagacttctacccttgatgctgcttctctgctcaaaggtcatttcctggactaattttttcatgcaagtgtcacaatgagattgcggaaaccagatttgctatgttgatgactttcatttacttctgtcaataataaacgggtcctcctctttgttgtgttcttgaaaaaattataacacatcaacatcattataagttagagaggggacaatatatttcttgatgtggttggtcccttaggatttatgcaatgtctggttcgtttcgaactccatgtactacttcccttgagtaaaactaaagccatatgctttcatctttgcattacatatagctcggtgttgtatgttttacttacgacaaaacgtatcaacatgcatctgtatgcaatagaggttaaaccctgagtaatttgaagtttcctttacatggtcaagaaggtatttcgactccgttatctcccagtaatgaaacattgatgtccattaacccatcttgaggccttcggtatccttaatttaggggtgggtaaggaatctagtttatgcaaatcgtagaataattcactttgcttctggctatagaaaaagtaaagaactttagggaaccccaagaaccaagcaaagcatatagagcaaatatcatctctggagagacaggatagactcatttttgcagtctgtaccaaaatggaagatgacggagactatcccgaacccgaatctggcagtggtggaataaacttaaacgggagaaatgttggtgcggtgatggtggcgcctagggatgtagacatagcgagtcaaagtggttgcaggatcaatatctacgtgaacagcaatgttcaagcaacatgtggttcagctttgatcggtagcaaggttaagctaagagatcctggtgttcatctccatatagatgacgttaaaatgacccgcgacgataccatatctagacagaaggagatgaccttgattaaggttgggttatgtttggtctgtctttttaacatgtttctagtattcattctcttcctctcctcttggttccggaaggaaagtggttccgtatagatctccccatcaaccgatgatcatgctaagaagtaagaacgatctcgcctataattgtttcctcgatttagttatacttatctatgtcctaatttgtagattattccagaaagttcctatctataacagtcaaaaacacaccatatgttgtcttaattcatatcattccagattaaatcgaagattaatgctatagtccaatcatataaactatgtagtagtctagtgggacaaacgacgtgacgatatcaagagggtacaggattaaaagctatgaagtacgttaccaattacaatctcaagattctcaaccaccggattataactacaagtaccgatttggcgatttgacgaatacagatctatcaattagctagaaattttctttccatgcattttcccaccctcccattagatgatgatgattagaagaccacgatctcattggtgttcactgattcaagagcatttcaagagaatataattcttaattatgaatttgttcaataattaatccccaccccacttttccaaatcacccttacatgttcaccaattgtaacaaataattaaagaatcaaaagtgatttcttttttaatacttattgttgggaaatacttaatgctagtccataactctcttcaattatttaaaggaggagtaagtaagtttttttgcaagtccttttgtggtatccatgtgagttatacattggggagcacaaacttccccactcccacaagccacgtttgtcgcttaaagtttctaagtttttttaattttcgctctttttggtttgttatttatgagtgtatggaagtggagtctcccccttgaacacttcaacatttacactactaatcccgacttagacgacaaacattttttctaagttcgaatgtaattctcctaattcgctttgacctgtttttgaattttatactattcaattttaatttagatatttatctactttagacttgtagaaaattgttttcaatacgagcatatttattacctactatggaaccatttacggatttaccaccataaattagacaccagtattcatataaactatctctaattttgaatttaaacaaacgaaaacaaaacttaaatcttcaactggctaacaaaattttactcatcaataaaacaaagcagtgcattttgttttgcattctaatgtctcttttctcttattcgacctacatcaatagtttcatacaaacaaagtcattttggagcatttttggtctttgtttagacttaattatttatgtaattaggtttgcaaaaaggctagtcatctgctttatgcttactgtcaatccgtcatcattagttggacatcatgcacgagatttggtctcaacaaaaatattaacctatttctacacaacattcaaactaaggcagtcaaaacttatgtacttattgaaatactaattgattagcagagagacgttaaacaatgagcttgaacttgaagtaatcatgttacaacgtgttttggttcatgcttagtgcttaccatcaaattctgcgatttgtgttatttccaacgtatagcatgctacaaaccactcacatgattacac

SEQ ID NO: 13410 - DNA, 3000 bp, Unknown
  misc_feature (1)..( 3000): cDNA_ID_2702935_gDNA_ID_2214625_Annot_ID_187782 3000 nt of promoter + ATG
taagtctatgttgcatgaaaactctttccgcagtgcgtttcccatttctgaaacgtttcgaaaacgaaaactctcgcaaattagatgaaaacttacgaaaacgcgttttctaaaattctatgtttggaaatatgatggaaactcacgtttctgttttggaaatgcgaaaaatcttttttattttattttgggaacttaataatttaaaagtttggaaatattaagatttaactacttgtatgactcgagttttaacatctttctctcgacaaactagttttcaagtgctttctatgatttttgatggaactaatgtaaatgatggtctaaatatttgatattaagtcttttaatctttattttttagaattttagtttaaatatttgatatttattttttggattttgattgtttaaagtatatatatgtaccgggatgtacctcttattaaggatgtatttataattggattgacttctctctttttctttaatagaaatgtgaatatatatcatattaatgaaagttttttgatatacatattaaagaaagttgagggtttacaaaatagcttaaccaaacgtttgtaatcttgccaaaaataaaggtaaaagtcaagagatacaaggtattaggtgtgttgagtgtgaatcaacaagtgctaccggatccacaaaatcatcagacttcttaaacctacgatattcgatactccaatatgatttgttccatcagtaacatataatacatattttgatttgtttacgaccaatttgtcacgtgaattatggggtcctatatattttagacgtttgtagacaaaggaaaataattgaattgctgtcttttaacgtgcgttcaaaaattttaagaaccatcatcacattctcacgtcttccaacttaactgtgtcaatattacctaatgatttttgagccagtatggcgtttcttaagactttttaaaaaattacgcttcatataatttttagtttgattttcgcttaaaatggattaagtgttatttatttgtatatttgtatgatgcatttacatgcagatatgaaatgtttctcgatttaattcatattatctagatgtacaatagtaaatggatgcatttttgaaaaggaaatgaattttggtgcataattgacttaaaaagaaagaaaaacatagacacacaatcccacatgcatgcatatctcattttcgtctccttttatcgtttgatgttaccgaaccaacgtatttttgttccatgcaaattgcaattagagattgcggaatgagggaataagaaataacaaaattacatatatgtgatatgccactactgagtttaattttgctagttctcttttaacaaaagactgatcatttaatttccgttgagtttagttcatatttctaaaataaaattttatctttataaaaggaaaacagaagagaaactaggagaaaataacaaatgtaaactaagagaagtagagaatgaccatataccatatgacattatataatcatttggaccacgtgaaatgacatttctcttttcttaattatcttcagaaattgattttggacccctctctcttcgacttccaaaatcattttttatgatgaatgacttccaaaacattactagagctatctattcctcaatcttcatcatttttcctttgatcacatcagatcatagtaattaaactgcatcagataaaccgaattaatttcaccattccaattaagataacacaaatgttcgagaaataatataaacaacatacagtgagaatatgtcatttttataagaaagaaagcgtgtgtttttggcatgaaacatgtgaatgactcagtttttattgatatgtttcctagtggctatctttctctaaactatttttttccaactcactctcgtttaattacttaaaacaatgtgacgatccttgtagaaacctttttgacccttaatcaaattttctcaaaactcaatctttttgtgattaggtcgaaccattataaccgcatgaatatttagtggacaattcggatacgatgtgtcacggttgaattggccatcgaaaaatcaccctcagcactatctgacaaattacctcagaaattggtttggattcattgcgaaactcttcaatgtcatagttgactgagtcatagttaataatgtattttagaacatgagaaaaagattagaccaaaaaaaaaaaaaaaacatgagaaaaagatgcacaatctttctctaaaatcttacttttcacgtctcacacaaaacatttctcattacatttgattcaaaatttttatttattattaccgtagttgatgattcatagggtttaaacgcaacgagttcaattgtgagaatatggagaagtggacggttgcgaacttgccgtagactatcaagtgttttgaatgattagtaaaacataaataattattaaaattgagagattaaagtgtttgacaattaacatgaatatatatatatatatatatatgaattttattttgctcacgtgatttttttttactcggggaataaaccttaacaatctcaaagtaatttgaaacaatataaaacgttttttaaatgattgattttaaaccaaaatctgcaggagaaccaataagttgtatagttattgataaacgaattgggtggatacaataaatacctggagattctttttcattaattaaaaatatatatacaaaaaattgactaaaaatattttattttaaaaaaataaaaattgagggccctataaataagagatatccactcccactgaaacctcaaatcaatcagagagagagcttctgagacataaacatcaattcaaatcgacgcaagcaaagaaagcaaaatgtaagtcactgaagagtttggaattcccatttctgttcaattttcaattgagtttttgtgtttttctcttcagggaaaatggaagcgggaaggtgttgaagccg

SEQ ID NO: 13411 - DNA, 3000 bp, Unknown
  misc_feature (1)..( 3000): cDNA_ID_2702931_gDNA_ID_2214625_Annot_ID_187781 3000 nt of promoter + ATG
ggaagtcgaagagagaggggtccaaaatcaatttctgaagataattaagaaaagagaaatgtcatttcacgtggtccaaatgattatataatgtcatatggtatatggtcattctctacttctcttagtttacatttgttattttctcctagtttctcttctgttttccttttataaagataaaattttattttagaaatatgaactaaactcaacggaaattaaatgatcagtcttttgttaaaagagaactagcaaaattaaactcagtagtggcatatcacatatatgtaattttgttatttcttattccctcattccgcaatctctaattgcaatttgcatggaacaaaaatacgttggttcggtaacatcaaacgataaaaggagacgaaaatgagatatgcatgcatgtgggattgtgtgtctatgtttttctttctttttaagtcaattatgcaccaaaattcatttccttttcaaaaatgcatccatttactattgtacatctagataatatgaattaaatcgagaaacatttcatatctgcatgtaaatgcatcatacaaatatacaaataaataacacttaatccattttaagcgaaaatcaaactaaaaattatatgaagcgtaattttttaaaaagtcttaagaaacgccatactggctcaaaaatcattaggtaatattgacacagttaagttggaagacgtgagaatgtgatgatggttcttaaaatttttgaacgcacgttaaaagacagcaattcaattattttcctttgtctacaaacgtctaaaatatataggaccccataattcacgtgacaaattggtcgtaaacaaatcaaaatatgtattatatgttactgatggaacaaatcatattggagtatcgaatatcgtaggtttaagaagtctgatgattttgtggatccggtagcacttgttgattcacactcaacacacctaataccttgtatctcttgacttttacctttatttttggcaagattacaaacgtttggttaagctattttgtaaaccctcaactttctttaatatgtatatcaaaaaactttcattaatatgatatatattcacatttctattaaagaaaaagagagaagtcaatccaattataaatacatccttaataagaggtacatcccggtacatatatatactttaaacaatcaaaatccaaaaaataaatatcaaatatttaaactaaaattctaaaaaataaagattaaaagacttaatatcaaatatttagaccatcatttacattagttccatcaaaaatcatagaaagcacttgaaaactagtttgtcgagagaaagatgttaaaactcgagtcatacaagtagttaaatcttaatatttccaaacttttaaattattaagttcccaaaataaaataaaaaagatttttcgcatttccaaaacagaaacgtgagtttccatcatatttccaaacatagaattttagaaaacgcgttttcgtaagttttcatctaatttgcgagagttttcgttttcgaaacgtttcagaaatgggaaacgcactgcggaaagagttttcatgcaacatagacttaaacgcaaaatatgacagtttgttttagtttgttaatgataaacataaaagcaaaaaagaaaaaaaaatacaactttaccaatatcttctatttagttgaaatttaaggatctttgtactttttgtctacgtgcataacaatctgttttaaaaattgatgttatgtaaggaacctagctacttagctgttttcaccggatatttgagctaagattctacttagctgatatctcacttgacgcacaatatgattgtttgttttagtttgttaataatgataaacctaaaagcaaaaataaaataagaaaaaacataaataataatatcaactttaccaatatcttctaatattatttgaaatttaaggatctttgtacttgttgtttacgtgcctaaaaatctgttttgaaaattgatgttatgtaaggaaatcgccacaaactccacatagtacaaaccaaaataaccagaatacacttgtaacagcaaaactaaaacataagtaagaggaacatgtgacaccaccagctccaatattggttagattggcagacaaatgatattttaaaatgtataaaatcatattgaatatttctaaacaatatattttttttcgttaagcacttaaacctagctagttagctgttttcaccaaatatttgagctagattctacaaatatgcaaaaccaatgccatgtattatggccttatggttaaagtcatctcaagcatgtatcgattggttagagcatatgacctaagagagaagcctcaactttgatacatttatcgaccagctatttgttatatttattgttttatgtgcgagggacaaaattagatcggtccaaacacataccactcacactaactctgcaaatatctgtctttataaacctatgacccttaagatttgcatttcgacatctcgcggcgacgacaaagtgtatcgctataaatataacacagcattccccttagttgaaagtcgaactgtataaaatgttagcattccctttagttgacagttgaacagtatattctcaaaatcatgacactttgtctcttatttcacccgagagaaatcacaatttgcaccgaaataaatactctcgtaggtgaaaaaaatgaaaaataactcaagcaaagggacataaatgggcctttatgttgaagcccaatttaaaatttaggttttagaagaagaaaactttatttactaaggcagttagggcttatatgtttaggcccaatattgttgtgtcttatggacttaaccgccacaatcttttgtcgccggtaacagcaacgggaattttcatggcggcgaggtcaccggacgttatataatttgtatcccaaatcaaaattctgagaaggaagagaaagcaatg

SEQ ID NO: 13412 - DNA, 3000 bp, Unknown
  misc_feature (1)..( 3000): cDNA_ID_3029991_gDNA_ID_2214625_Annot_ID_187780 3000 nt of promoter + ATG
aatattcaaccgttgggtttggtaaagccacattcaaagtcaattccaaattttcaacgcttacaagtttaggacctgaacttttagtttttcatatattggttaaagacttttaatttcttttaattttatccataacttctacaaagtcaaatctcgtaatcaacattaacgttcgttaatactatgaggtaatcaagtataagattcatttaaattattccggaatccgagtcatccgatattatgctagacctgttcttttcgtaaattaaatatctttgacttatagatcttgtaagtacttgatcctaaacaaattattgattgctaaaagtgtatattgtgcaatcaaaatatttttaaggtacatcgtgatataattgctataattctcttaccactatatttgtttcctggatggtttttccttaagtagtagcatttacaaaactgaataaaagtagctagttaactttaagcaaaatataaatataatgattcgaacaaaatataatttatttgatattttgtagcttggcttaacattttaaaacttgaattggaaagtaatggaaacaagctaaaaagacatttcatggatgattttgtaatatttttttgattaaatgttagtagattcatacctaataaagtattttctttatattgtcattttttaatctaatgttcttcaaagataatgattatagatttagataatagataattgcccgtatatatgtagattttatatatatatatatatgataaaaaaaattgaattgacattaataacagtgaactaaaaaccataattttgaccaagatttatagcttaataaattgtcttactattatcgttgatgtatcacaatccttggtttaaaatccagatatgattgaatgttgtcaataataaaataaaaaaaggtcttagggggtgttattggtttatgattttaaaagagttttagtgacttaaaatgtcatgtacaatcagttgttattcaatcaagattctttatttagatattacgttgtgaaatccacatataacaatgttgtcaaagttttagagtttcttctttaaaatttgattaggtgaataacattacatataagtaatgaaggaaatgtttgttttgtttcaggaccttaagatgtgagcaccgctggtaacgaactagcggatattacaatttgttttcatatagaaaaatggctagaaaagaagaaccacacaccttaaaatgcaatgatgaaaattgtggcagcatggtcatatgtgttaaaatgcaatgatcataatgggacataacactatgttgttgtatcatgaatcaaggagaacaaagtttttagctaaactcagcaaaattgctacttttaaacttgactagagcgaagttgagaattactactaaaaagtttctgaagattaaataggcaaagaaattacagagacaaataaataaagagagtaatagcttggaagtgaaatttataattcttttgagttataagtcaaacgaatatatatgtttatgagttcaaagctactaaaaaagacaatatatatttttaattctttttttgctaattacactatagcgatgaaatctttggtaagggccttagaagttcacgatttaagaattacatcgattaaagtcaaatttcttgcatccctactcaattttgataacatttgtggtaagattttggaaaggattatttgaaagataaaactgaaacttcatttagttaaacttagcgatgaagtcaacgattaagggtttgtaagaacagatagtgcaccaaactcataattatgcatagagctagaacttggaaacaaatctgatgatcgaaaatcagataaatgaagtttctgctccctcttcataattaaagttgctatttaggtattatagtttcaaatatttttgcatatataaaatacgtccattcaaagacatgcaccataacatgcaaaagtaacataatggagaaaatagtaacatatgttgttattataccatttttgaaattgttaataagcttttcatattttctactattttttaaataacgaatcttggcaaaataaatgagagattattttaaatgactacataagaataccagatttgctattcctttttggtaattgtgtgggaatgaaagtaatgaagtttaaattagacaaaacaagtcaaattaatcaacaattttggttgtatttgctcataacatgaagaccacgtttagtagagttaaaggaaaaaaaacgtgagaggttaaaaagacaaataaaaaaagataaaaagctgttcttctcctggtctcaagtataacctcccctttttcgtataattctatttttagtacaaactttatttatctgtctttttcacccctcccagagaagaagattcaattccacttttgttgttgtttgttccaatttgtgttttgtaatcttcttctctccctaatcttcttcaccgcgcattcatttccttccctccataatccaagcttccgttacaagctctctctctcttcttcctctttttcgtgtttgaattttcctgaaattaaaaaacaaaatctctcaggagcattattgattttgctggaggatttgaaaggtatctaattcttaaattctgtgatcatcttcttttgattcgcataggctggtgtttagctggaaccttgaattcgttcttaccaaaaaaaaattgaattttcttatgatttcaaactcttctaaaaaaattagggtttcgttataaataaaggattggtgattcgatgatcgtaggattgtgttgataatattgctttgtttttgattagattgttgatgtgtttttttttgtgtgtgtgttttaggagagattttgttggtgtgttagttgtttgattttggctgatgttgtgtgagggaggaggaggaagtggtgtatgaagccgagctttaatacggat

SEQ ID NO: 13413 - DNA, 3000 bp, Unknown
  misc_feature (1)..( 3000): cDNA_ID_3029995_gDNA_ID_2214625_Annot_ID_187779 3000 nt of promoter + ATG
tgaatggacgtattttatatatgcaaaaatatttgaaactataatacctaaatagcaactttaattatgaagagggagcagaaacttcatttatctgattttcgatcatcagatttgtttccaagttctagctctatgcataattatgagtttggtgcactatctgttcttacaaacccttaatcgttgacttcatcgctaagtttaactaaatgaagtttcagttttatctttcaaataatcctttccaaaatcttaccacaaatgttatcaaaattgagtagggatgcaagaaatttgactttaatcgatgtaattcttaaatcgtgaacttctaaggcccttaccaaagatttcatcgctatagtgtaattagcaaaaaaagaattaaaaatatatattgtcttttttagtagctttgaactcataaacatatatattcgtttgacttataactcaaaagaattataaatttcacttccaagctattactctctttatttatttgtctctgtaatttctttgcctatttaatcttcagaaactttttagtagtaattctcaacttcgctctagtcaagtttaaaagtagcaattttgctgagtttagctaaaaactttgttctccttgattcatgatacaacaacatagtgttatgtcccattatgatcattgcattttaacacatatgaccatgctgccacaattttcatcattgcattttaaggtgtgtggttcttcttttctagccatttttctatatgaaaacaaattgtaatatccgctagttcgttaccagcggtgctcacatcttaaggtcctgaaacaaaacaaacatttccttcattacttatatgtaatgttattcacctaatcaaattttaaagaagaaactctaaaactttgacaacattgttatatgtggatttcacaacgtaatatctaaataaagaatcttgattgaataacaactgattgtacatgacattttaagtcactaaaactcttttaaaatcataaaccaataacaccccctaagacctttttttattttattattgacaacattcaatcatatctggattttaaaccaaggattgtgatacatcaacgataatagtaagacaatttattaagctataaatcttggtcaaaattatggtttttagttcactgttattaatgtcaattcaattttttttatcatatatatatatatataaaatctacatatatacgggcaattatctattatctaaatctataatcattatctttgaagaacattagattaaaaaatgacaatataaagaaaatactttattaggtatgaatctactaacatttaatcaaaaaaatattacaaaatcatccatgaaatgtctttttagcttgtttccattactttccaattcaagttttaaaatgttaagccaagctacaaaatatcaaataaattatattttgttcgaatcattatatttatattttgcttaaagttaactagctacttttattcagttttgtaaatgctactacttaaggaaaaaccatccaggaaacaaatatagtggtaagagaattatagcaattatatcacgatgtaccttaaaaatattttgattgcacaatatacacttttagcaatcaataatttgtttaggatcaagtacttacaagatctataagtcaaagatatttaatttacgaaaagaacaggtctagcataatatcggatgactcggattccggaataatttaaatgaatcttatacttgattacctcatagtattaacgaacgttaatgttgattacgagatttgactttgtagaagttatggataaaattaaaagaaattaaaagtctttaaccaatatatgaaaaactaaaagttcaggtcctaaacttgtaagcgttgaaaatttggaattgactttgaatgtggctttaccaaacccaacggttgaatattgttttaaatgtctctctcacgcgctacattcttccttctatctcagccgttcgatttgactcttacgagatctctttgacttgaataaaaaataatcattaatgttaattttgttcttaaatgcaatacattatgtattattcgtccgattgttaacaataatgaaaaagtttagtaaaaaaaatcgttaacaatactaatatagctatacgaaataaaaaatattaatacagaaagttgaaaatatatatcgccagtttttaccaattttggtactggttttatgattgaaataataacacttataccaccactatggtacgaattactaatcaagttgaaacaaatatcaacaaatttatataataataaaaaaaacttatcaacaaattctagggtttgattttcatgaaaatattgttagaacgtgcacataacacgctaaacgttggatattaataaggagatgcggaagctgaggcattgataccgtgaagtgaaggaccccctaggccgcacatgcactttgtgtcttgggaattgtattgcttacataaatatttcatccgtttccttacaacaaattacgagttttcctaaaagttgttttctgaagcaaagaaaatgatttgttttaatattgtttttacataaaaggttgggaagaatttgatcatcaaaccaaacaaatgaacaatcaatgaaaaacatataaatccatcaatttctataatcagcccagattcttttgagttgaggcccattaggcccatattcatcatatacccgttcaaaactcgtcatttcatcgtcaccaccaccagtacaacatccgctttttgattccaaaccaaaccctaatttctcagctcgaagtttccatttcattgcttcttcttacctcgatttttcccgggtattagaattcggtcaatttactgaattatagtgttctcacatgccaactgattctacttcaaaatcgctgcgaatttctgcgatcagttacgaaaattttgtcaatg

SEQ ID NO: 13414 - DNA, 3000 bp, Unknown
  misc_feature (1)..( 3000): cDNA_ID_3029999_gDNA_ID_2214625_Annot_ID_187778 3000 nt of promoter + ATG
gttacaaaaaatggattgtaccgaagacaaaacctcatgagtcacttaagtagagagagaaaccaactgagccaacatatcattccgagttttgttttttgtgtctaaaccataatttcatgtttgtgttgtgtgaaagccatggaagccggcgggagcaaaaccaagaaatgagttgcttgctacaagaggtacaattcttatagagaatatgtttttcacatcaagattgcgttccattcgattcatcagccttagtgtggggtttgcttcaaacattgtaaatcattcgaatctgttcgagaacaccttcacggtatggcttgagcttatatgatcttcttgttctctgtttttttgttgggttggtgtttgattgatgattattttgaacaatgtcagttccgaaccatccctctcgaccattcaaagaaaaatgcaaaaccattttcgctgaaaaagggtgtgaactttgtcttcaagtctttgtggaagccactgctagggatgagcatatgaaagagtgtctcatgtcttcaccacctcctatccaaaatgcttctagtgcaagtggcacacgcgtgatgagtctgtgcatatctaattttagaaaaaactattttgactctagtggatacaaagatgtttttaacattatacactgttaaaattgagtttttttcaatgactttatcgaaaacatattgcgttctataatattaatcaaagataaaatcctaataaaacgtaaatatataacaatttctttttttaatgaatagtctataacttttcttaaaatataagactagtatgtatcatgctcataagatggaaataaaaacatgttaaaatattaaagaaattataaactgaattggctttagtggttatttaaatttcaattaaatttatttgatttaaaaaaaaagaaaatcttctaaattaaattggctttaacggttatttaaattttgattgactcaattcatctacaattattttttaagaaattttataatttacaattttttttttttgcctagccgtatcggttagggtcatgttgatctttaaaatataaatttttatttgtacggaccgagatcaaatatatgcgggttttgcagactaacccaattgacatgcatatttgttccaataattatgtttgttctttggatcttctaaacttaatcacttagtataataataaagaccaagcagaaacaaaatttatagcaaaaataaaacaagaatgattgaaaaaaacaatagcaatttaaacaaaccacaaaagttttgttctttcatcccaatacataaaaatctatcaaaaagtgaaactaacaccggctttttcagtttcactattgttttctaatcatatagcagcaaaagatataaatataaaccatgttcaccggcaagtaacatcgacacatggaagtgacaaaaaaaattgtaataattattgcttaagtctcaagtatgtggtgaaggtgtcgcttaatcacttaatttttttgttgtatttgatttatcttcgtattgtttacggaaaaaaaaaagaagcctttgttcaaaaaaaaaaaaaaaaaaatgccaaaaaaatctcacatgtaatttcgattaaataaacaaatgaacacaaagtttacaattcaaaaggacctcaccacagttgttgacttgttgtaatatgtttttctaatttcgtgtacatattattagtataaaacgtggaaggtttatgtaggcaagtggtttaagttaaaccaccaattaaccagacactttggcacctgatgttcaatctctttcaataatcgaatccaaatgtatggcttactaactttctgagtaggtgtagagaaaccatatttataaataaaactattatataagacactatttatgaattttcattttcgaaatcaaaagacaaactttctaaaaagttaaataaatttaaggcacatagtatttttttttttaattagtaaagaaaaatctaactcaatttaatgctaataaagtagaaaattaacaaagcaccttaatactattaatcttaaaattaactattttcactattattaacatatatttttaaataacttgagtgttttagctatcatatactataaatcatgaatagattataatatattcttataaaataaatgatctaatattaactcaatttctttctaacatatattttctaatatttaacatttccattaaatcaagtcacattttatcatttcataggttcactgagattttttactaaaaaattaatgacataaagaaaatttcacttctgaataagcatttagaaatgtctaattagtttaattaaaatgatgtgaatatgacgtttcacataagagtttagagacaataacttgataagttagagtgtataagggaaaagttatcaactttaagtaaaagaagcaaaagatggaaaaaacaaaagaatttgataatttcgtctttgttaaatttggattttcccattttatctctagaaaataacaaaagtgattagaatcagaataggtatttttggaatttactgttaattaatactaaattacccttttaatatttttttggtagtaaattaccctttaattactttactctagaaagactaatttattcacagaagtagaaaaagagaagaaattaaaagaaaacagcaaaaaataggtgaaaactatataagaggaagagaagatttatgatttcttcattagcaatttgttttgttgtcaaagggttttaatttaaaagcttttcacacatacatatatctctcaactctctctataagatacaaatctctttctctgagaatcctattatttgcattcacactctgagtcacattgaacttcgtctctagctcaagcaagtgaatgattctttgttgctacaggaatctatctcttgggtttctgatttgattcatctccggtgaaaatg

SEQ ID NO: 13415 - DNA, 3000 bp, Unknown
  misc_feature (1)..( 3000): cDNA_ID_1022296_gDNA_ID_2214625_Annot_ID_187775 3000 nt of promoter + ATG
atctcaaccatataatcagtctatgtcggtttgaatcatatcattcatctatcttcttcaatcaattcatcagtaatgtagttcggacaagatctaaaatcatcgatacctatgtcttctaacataaatgtgttacttaaaggaatgcagaacaacgacatgccacacaatcttcaaaaatcagtgtgagtaagtaagagtgatgctgacctgtggcaaccaatcggttcgagtagttcttcttttgctgccttaagctcatagccattctatgaatcaatccaaacttgaggtgactgaaactgaaaggggatccaatcatgagacttaaaacgattactcgttgtaggacttgacgcttccaacaaatttgaattgctgatgctggaaaatggaaaggatactatgtcacatccagggactttaaaaggacaatgatccactagagagtttgaaagattacgataatatgtgtaatctctggttaaacaatctgagctgtttgtgtgatgaaatgtctggagctcttggtttgcagcaaccacgtcttcgtcatcaataatatacctctcgagttcatcatgctcaaaatggctggcttggttcgttgttggtaagaggaaactgcctgaaatggaatgagagagcagaggtaaagggtacagctcccttgtaaccaaatcatgggatgaagaatagtcagagcaccatggattgtctgtcaaagatgaggatgatgcatttggatacgtgatgagtcttgtgtgataactaagtggaaaatcatctgtctttctggtgcttgcggtttcagtattccactcgagaagtaatgcagatgaaggctctctatgttcgtgtgataagtcctctgtgctgtatccaatttctcctctgtgataatccattgaaaaaggcttgtagtttctgaaatggaggctagatatgggagaacactccaaattttcttcaacaggaaacgacaggaactccttctgtttcaacagtggaggtcgataaactgattccttaggatataagatgggaaagctaatctcttcggaatctcttgggatgaaactgctctgaacgtgaggatactgcagcctcggggtaatgttattttccagccatccctgccaagatatcaatctctccctttccatatgcagactgtggtcaacttctgcatagctttcatgggacctcttaagaaactttgagccaggagattcaacaaacgttcttcttttgactctggccgtcgtctccttggaaaacctagaaggctgagaaggaaaaaaaagtgctgaggattgatcaagataagcaattgacaaatactcagggattctatcaagcttacctgtgtctcctccgtaccaggggacagccgagttaggagaacagaaactaaatcatgcctgaaaaatgattattttctgagtgcattatagaaacaagtattaagattaggataaattaacaactattgtgtacccgtttgaggtaagctcagggatttcagtaagccatgtatctttgacccactgatgcagtttctttctcttcacagagaatatatctcctttctcttcactgattcctgataattcaaactacaaaatcatatctcttaattgttaactagtatcttttgcttctttgatatgtaagaagtagaatatccaacatctacctccactttcagatctcagattgtcaccacttggaactgtgtacctatctctactgaatgatgaagaagatctcccattacattttcctataaacaacagaaatcagaagaatgtttatggatcactacttccaaaataccagtaagagattctacagaagtatccggataagagacacgagatcttatcatgtggcacaaacatgcaccaagaaatcgaagtagcaacctctatccctttgagtcaagttggcatgtaacatagacgacccacgtctggcactatgaatgggtgtggagaagctatagctcttggatctaccattatcgtcgcagtccgttcctgcacatcctggtttatgaaacagtatagatgaaaatccaggggaaagccaagcaaacactatcatcatcatcatcacaaagaaaagctcaaaaacctttgtctggtttggctctggattcgaaggttttaggaatttgttgaactttatttgatggtttagaatcagaagattcagagcagtgaccaaaattagactttaacttcttaaagaatgcaaactcagaggtcttggcatcaatcgctgcaaataaccaataccaggcgattttcaatcaaattcaacattctaagaaactctacgcttattcacgtgaagtagacgcgaacacttacatcctccggcctgagattcgttcaagggactccgatgatcagcatcgtcgaaactcacccttctcctgcgtttcaaatctaaaccaccagaaggaaacaaaattaaaacacacacacaaactcacggaaatcgaaatatatgttgtaagatacctgaatttgctcgagcgctcgaaggatcagtaaacttgaatccgatttgtggatcggtcttatttagggtttcgccagctttcgttcgctgattccttcttctcatcaccgagtatctgaattcgttctacagaatcgtggatcaaacgctgttataatcacgaaggcgatgaagaatgagagatttcacatcacgcgtccatggcgattcataagaatttgaaatcggagaagatgagaaatgaattttggcggcaaaatcaatcaacccttattacagattctttgctctaattatatatttcattttctaaggttgccacgtcatcacattatccagacgatactgatatgtgatcacacgtgtcatatcacaagtggtttaaaacgattccttttaaccccaaacaatctaaagctttgtccaccttttcggatcactcacacaacttccaacgatcacacacaa

SEQ ID NO: 13416 - DNA, 3000 bp, Unknown
  misc_feature (1)..( 3000): cDNA_ID_2702916_gDNA_ID_2214625_Annot_ID_187773 3000 nt of promoter + ATG
gtacagcaagaacagctagtctcccttaacccaacttcgtgtgaatgtaccacactattaccatcttctcttttgctgacatcttcctggcccaaattagttagttagtatttatttcttatagttatatactcttaattttcataaatacaaacatctataaccaaaaactaacatttagtttttcactagagggacacaaaattgggtcaaaaaagttagcttgtacttaatgcaacggaaccgaaattctaagaactggttgaatagttgaaagtttgatggccgtttgggttataaaagccggttcatgatgtgaaagtctaaccagagaaacgagaattgaagcgtggagatgtatccacgttgtctacattgatacaaactaacaattggaaaaagttttcttttcggaatgttttcaccctttaaagtgtttgtagatactagataggatattcattaaaaaaaattgtagatatgacatgacatcgtattttatggcatgcataagcaatattggtatgttaacatgtttaaactactactattattgtgaacctatttgtctgtaagactgtaactagtacactaacccaattactagataagtactaattaaagtacaatagtagaaccacaatgtaattttcttataaaaaaacaaatcaaccatacattctttcttttctaagaaaatcatctttatgaacggaattataattaaatggaatttggacatccaaccaaacatattaaaaacggagtctagcatatcaattatagacaactgagatgtgtttacaaacatattagttataattatatataggtgagacaatttaatgaaaaggataaaattatccaaaatgctcaaaactcactcttgtccttttggaccaaaaaaacttattctttacttaattggttttcctaaattttgatcattgggtgcaaattatcgcatcaacatattatatttattattatttagtttaatttaattatgaatttaaatcatgcattaattactgcttatataataatttgatatgttttaacttattaattaaatagtttcaatgtaattagttacaaagtatatcaaactcatatataaattaacttgtttaaatttggtttaataagttgtataaacataaaatcaatggaatatttattaaatttttgattttttaaagtataaaaaaattaaataatatgatattagaatttatttcatgttttcatatactataatatatataggattagtgacaataaatattagttgaatataagatctattttaagcaaaatataagatattaaatcaacactacttttcgtttacttaaaaatactttaaagttaaaaacatatatttttacgataagtatttgtaaataagtgttaaataatataattaaaacttacaaaaaaaacaaaaatagagtgaatcatttactcgagaattagagaaatacatcaaaataataattagaaaaaaaatcaaaaattgtttatcagttcaatcgatataaattattataactcacaaattatggacgaataaatctgtaggttgtgttggcctagttactctaaaacttgtagaaatgctcggttactaaatgtcaaaacaaacaatttaaaatattgcatctcattatctcaatgtggttagttttttggaaggtttcatttggacaagaaaaaaagacactaagagaataagttagttggtccatttaagatattcctggtcccaattctattgggtatatgaaattacatattagagtagatgatcattattcttttatacttgcttgcatatatatgataaaacatataacatgctattgtattatcgattcttggatcatttattagcaactgtgatatttcatataatgccatataaatctatttttagcttgtaagttgtaacagaaaatcaaatatttgaaactttttccttattttcattgttaatacagtttcaaccaactacacagttttatttatttcccgcaacttaacaataaatattaatggttgatatgttaatcgttaacataatacagtttatctcgtggatttttttttaattattttttttttggtgcagaaaatacagtttattatagacataatttaatcgatttagttaaaaaaaagtggttaaatctattgatagaatggttgagaaaaagagagtaaagaagaattataaatttataattgcagtaatgaaagtggaatacgtaaaaaaaataaggttatgtgatcatatcaaattttggtgaaatgcattcacttcctaaatcctaattccatcttcaagttgagacaaaccatgaaatatggcaacaggaaaagtaatgtacttcaaccatatatgattatatatgatataattttgtccatcattagctcatttacaaactttaatgaaaagaaagattttactaaacattttttttgtgtgatatatataaaaatattagtcatttgcagttttttccctctattaataaaaaagcccttttggtatcagaagacgacgtcatccccttaaaaagctcttcctgttagattcacataaatcttctccggccaaagctatttctccgacgacgtcagagcttgacaatgtttctaaatctagctacctactaacagagtaagttgtctctctctatctcttgctctttctcactgagtaaagtagaaaatgtctgacttatagctccgatctcattttccgatactttttccgttttcctcgttgccggaatctgatctctgttctatttatctccaaataagcttattttttttgtcaatttgcttcgttacatatatttagcaagattcgttacccattcacgagctcattgttcaatttcatggttttcgaaaatgcagaatcagtgagagtggatctgatgctgtagctgaattgagaagaagcttttcattgaggttgttatg

SEQ ID NO: 13417 - DNA, 3000 bp, Unknown
  misc_feature (1)..( 3000): cDNA_ID_1397500_gDNA_ID_2214625_Annot_ID_187772 3000 nt of promoter + ATG
cttaagttgagcttgcacagggactgtaaagactttccagatgacagagaaccaacaacagatttgcagctaaaagtagaaagccatcctgaaatctatatagcatgtgtaggtcagccatgaaatgcaagccatacatcaatttgaacaggaagaaccacggtggtacccacattgttttcagagaggtcaagggatgaaaggttggaagaagaatcaagaagtgtagagaaaaccatcctcgcaaaatatctatcgaggttgctatcgccaaaatgtaaggaatgtaaggtcctgaaagaaaaaagatgctcactaaaagtaaaatgaagaaagaagtacataataataatattacaacatttatgaagagactttgatagccaaatgagcaaacatttaacaagacacgttttggcatcagtccatatatatacctcaccgacatcaggaatgaaacgaaagcggaaggcgcagcaagtggatctatctcaatgctagatgtctttatacagaaacgttgcatcccagttgtgtggatacccttttcatgaagagaagtgcatattgcactgatggaactcaaagaaagcttgcagtgaataagttcaagcgaagttaatgtttctcggctctgaatcaagagcttgcacaagggctcaacctggagttcatggaacatcagcaataaaattccagctaactaaatctaggagactaaatagagaaagcgtcttacatgcttctcggatctgatccaacgtagaaccaaacttcgcaatttacttgtcctcaataactcctacagtaacaaagcctaaagattatttctgtcctccctctagaggttgaatgattgattcatcaacaaagatacaaatttgaagttctaagagagagataaacatcgaaagcaatacaacatatcacggcgatcagtggatactgaaacaaaaataaaacaaagatgactctatttacaaacacagaaacacatcaaaacgtcagagcatagtttaattacttacagaagtttctgtaacgcatagcacattcagaagcctcagacacctgcaacaggtaagaatgaacgcaaagaagcataagtatgttagagcattaaatcagtccaaaccagatatctcacgcacaaccagttatgagcgatataaaagtaaggcaagctgaaagtagtacagtgtatccgtatatacaaggaaaacgtgaggctatgaaacgattaataatcagacacacatgaaatgttactcaacctaagatatggtccaaaagtttggaaatgaaaagatagttccttgcagacacaattttgacaagtcatgatgtgctcttcatggcaaatgtatctcaatatgttatctgcaatagaaaaatacaacaaaaaaactgaataatgattattacacaactgaaaaaatcaaacccaagaatttcattggaacacataccagatacattaatggaacaaatccgaccactaaatgtcggacgcagagctacctcagctgcttcatcaacacaactgttactcggataaagatacaactcaaaaggaagttacataagcaataaaaaacaaatcatcgatcatttcaatagaattggcatacttttggagatgcttttcccagtaaagctgttgccaatcagctggtgattccacacggtcaacaaaatcaggccaccgcagcttaaacaacaacttccaagagctaccaagtacatcatttctgcagatgaatttaagttaaatctttctcagtctgtcttctcaattcgaataacaaaacagaaatcaaaagaagaattcatcaaaccttgcacgttttctcccagtaatcaagcagcaatcatctccagattcataactatccaagcaatgaaacggcctataccaatagaaaaatgtaaatgaaataagagttgtatcatcttcatccatataattcgtaaccctaactaaacctttcaatttgtattcaaaacttaaatgaaaccaaagagtgtactgacatgttggtctgaaacttctgcaaagcaagagcaggcaagtgagcgacaatgccatcaagtaactccgatggaagctcgtataaatctggaattggattatcgcctggaattacacaaaacccaaactcaaattcagcatattttggaatcaaattggcgcaacaaaagctttgttagaattactttctagaagctgaattttgagggattggatgcagagaaacgcaagagaaggagctttcgtcatccaaacaaagagaagagagtgccaatcgcaacgcaaccaaaacttcccgctgcagctgctctcggctcgctgtttctttcttccaaagagggaagagcaaataattcgttatgaggtctctttcataatgggccgcttagtatggcccaattcataattattcatagataattaaatctttttgtgaccagtaaaaaaacaattaaagttttaaaaactttgtttaaaaaaacatattttcatgagtagtgtaaattattttaaaaagaaatggaattataaggaaattttaatcaacaataattttataatggaatttaaatgttttttttatataaaaaaaaactaattgtgagcattgccatccaaaaataaatggtaaatttatttgtaattaaaaatagaagaaatatcaggatcatataaatcattaaacacatgcagccaaaaacataataagtgtacaaataaaattttaaaacagttccaaaaagcatcagataagagcgaaacaaattacaaaattgaattacacaataatgtcctctaagcgacgactaccggtgaaatattttataagaaaacaaaaacaataattaacaaacaaaggcgacacctttagattcgacaagacgaccattttagaaaaagcttctcaaattctctccttatccccaaaaattcaaacttttttctctttggaaaattctgaggcaaaa

SEQ ID NO: 13418 - DNA, 3000 bp, Unknown
  misc_feature (1)..( 3000): cDNA_ID_3030010_gDNA_ID_2214625_Annot_ID_187769 3000 nt of promoter + ATG
ccatttgctgtttttttgtgtgtaactaaacgcataatgattgtgttcaggtgatctcaaacgtcttgacatgactgggaatagttgcatcagccacgaagctgaccattcttctctactccatgaatttcaacacaacggagaacccatcttcgttttaccttcatcctcggtttcacatgttccttacgatgatgacccgtagatagttcctatataccggtttatccttcagtctggaactgtttactggtgaattcattggttgtgtatgtgcattaggttggttcaacgttcacatgaaatagcatcccaaaacatcttaaaccgtcgcctaaaaaaatagtcagagagcagtggtttaaatcttaaaatagagaatgaggagatgtggtcttatttcatttcttattaaaactcgatgagtagaaattgctaatacataatttggatatttcaacttttaatttcaacatatattgaagaaatgaaaatatttcaaagtagaaatcacaaatgggattcatgaggcaccacaggcggacaatggtagacgcaagtacattctccaccaggactagtactagtactgtagtcgcagaagccattagccctatctccaaacgtagctctgcatgtggcactacagcttttatccttttcgcatggtcccatagtcgctgtgcatcccatattttgctcaactacatccaacaaaaccatttaaactacaacatttgagatgttatacctagacactatatatgtgaaagcttttgaaaattcctaagtgtagaccttaagatgtaaatgtatacgtgagacaaatgttatcgaggaactacggtaagcggggaatatgacaagaatagagagaaatgtatacctaaggcaaacataacaaggaagatgattgagagaacaagtgtagaagatgcctttgccatatttctttgcttccttctcttaatattttactaacagtaaaccttttaacacataaacaaaaatcactaatagtgcttttatttgttagacctataacaatatttataaagaattgtgaggtgaccaatttcagaaagaaatataattatttaccatttgaccacaaatattgtttgactttaatttatcaatataggaagttcactcatatcatgttgaatatgctagtttggtatgttattagagtctaggataaacataaactttaccctctgtcacctatcgattcaaatctaatctgttagtagagtcttaattcttttattttcataaatttgtctttttattgcctaatccaattgtaagtgactttgtaatcagcatcaaagtaaatgattgtattttgggaagtgataagcacatagaagtaaaagaagaaaaaaaggtgggaaagtttttaagcatgattacttgtcaattacgctccgactctttggcccgcaccagctgtttaagatcgccggcgtgacaagtgacaacaattggccacgtgtgtgtgatttattatcttaagtttttgttatttctctgcgaattttaaagaaaattttgaactttgatcaaacttgtatgaattagaggggatgcaaaaataaatacacattatacaaacgagatggtatgaaggataacaaaaaaaaaaaagatggtatgaagaccaaaatatattaagcatttgattaaactccgatcagctgacatattaacatgatcaaaggttaatgtttagacaaaaggcttttattagttgagaatggtcttatctaattaaacaccacattcgtgtttataaataatcaaatctaatgaaccgacgtcgggtattatatcttatcagtggagtgatctaattaaactaatttcacaataactgattgattcgaatttagagttattttataacatatcttatttaagatagtcttttaaaattccaatgactagaaattaaatattcgtaatttggatttattccagctttgttaggttggtgatagacatagttaagattttcttttctttttaatttaatgttatttaatgaaataaacattctcttgattttaatttaaagaaatttatttgtattgtttctctaaagaatttaccaaccagagtggaggcattttttatcctatgttttgtccagatttggtgagatatttactttttctttcggtttgatccaatttctaatcaaaatacgtatgagtagagcaacttttagtttattttagtaaaattcactacatttttgttactatatgatgtggttcgactgcaccaatccgagttatccaaattagacactgatttttttttctcaaacatatgtaggtcgataaaatcaaaaaatttatttgttttactccaaattaataccacattctttaacaaaaaaaaaagaaattttaaatttcaaattaatagctcctcaataaattaataattaagaattttatcttcatatatttcaaaagaacaattgctaaaactcctgtaattcactttattattttgttaataacccaaccggattaaaccaacccctccgaatcggaaccggcggttaagttcagagaccataacataatagtggtatgaaacagtaaatattaagaaaaacaagggcaagtaccaaagacgccagccaaccacatgctctcgtttatcttcttcaaaatgagtttagtctctctactagtctctcgcctttactcttttctttcttagtactaaaaattaaacgacacttctcccctcaaatccctttttctctctctaaacacatttacacacagaacacaacacactctctctctctctctctctctacgattctcgctcactgttcatcgaatccgtcattggatcgattcgaatttggtgtgtgttttctttccaatacctctgattagagatttcagcagatctgaacggaggagcgtcagatcggaatcgtccgtcggtggtttggtaaaaaaaaaaatg

SEQ ID NO: 13419 - DNA, 3000 bp, Unknown; identical to SEQ ID NO: 13416
  misc_feature (1)..( 3000): cDNA_ID_2702916_gDNA_ID_2214625_Annot_ID_135946 3000 nt of promoter + ATG

SEQ ID NO: 13420 - DNA, 3000 bp, Unknown
  misc_feature (1)..( 3000): cDNA_ID_2713666_gDNA_ID_2214625_Annot_ID_135947 3000 nt of promoter + ATG
tcgtctggatcgacattggaggagactgttaaaacgactgtggcagagaaccctgtcgttgtttactccaaaacctggtgctcgtaggttcactatactttttggttcaattagaggaatgggttttgttaatttatgatctagtttgtcaatattgatacttttactgggtttgttctttttggtggtgaagatactcgtctcaagtgaagtccttgttcaagagtcttcaagttgagccactggttgttgaattggatcaacttggtatgctcaattctttactttggtttgctatatgggtctgagtagtttgctatattggttttgataatgtgtgtgatattgtttatatcgatcaaggaagagctggttacaagtgccctaatgtttcagcattttgactggatgaaattaatacttgtttccaacttcttcttgtttatcttctggttcatttggctgcttgcttgaattggtttgtatgttttttgattagattttgatggaggattgatgatggttaggggggtttctaatggcctaagatagctttacatttcagagattctgtgtcttgtttatgtgaaaaatttacttccactgtagttttccttggaccaatgacttgttgatgaagaatcaacgggtaggctagtacttctaatggcttaaatttttcaaattgaagattctttcctgcctttgaatcttagacagtatgcttctatttgttagaaactattatgttgctatcttcttagttatcttttctcgtgtcaagatttggtgactttccaaaaccatttgttctttcttgtcttgtttagtttctttgggtaaaacatctctgcctcatgatattggtctgaaacatttacaaaagttttggtggtttttggcgtttccaggttcagaagggtcgcagctgcagaatgtgttggagaaaattactggacaatacactgttcccaatgttttcatcggttagttgtttcatcatttaagccagttactaactatactctgatcatttttcttgattattttgcctgaaaacaaaactatcgataaaatcttagccactacatttgctatgaccatcacttatctaattttgatatcatgtttttgttcatgaccaggaggcaagcacattggtggctgctcaggtacaatctctcttcctttcttacctcaacaccgagatttttctaatatgtaattgagatcgtctttgtgtattttggcaccaagatagatagtactcaagatcttgctcaatgtcttgtgatttttctggtaacttgacctgcatatcattattgttgaacagatacattgcagctgcacaataaaggagagctggaagcaattttagctgaagccaatggaaaaaacggtcagacctagagatttctagagatgaaactggttggtgattcttcatgtttccttattgaagtcgagatgatttgctgtttgaatttactgtctatatagagattttcaataagaatcttgtgtttctttctacgtacaaaaaacagtcaatgagtcatgctgggttctgttactaaaccggagttgctgagtttgatccacactacttggaatttgcaatcatttttgggtggctaaatgcatatttggaaatcgatcttgagattgtaaaagataaaagatgaattgttggttaactttttggtacatacggttttgtttaagattacaaacagacgaaccggtttagagataaaccatgtctctcattttacttcttccacctcgtccaatgcgtagttgttggtcgatatattcgcgtaattcaccttggcgaaccggaccacaaccggatatcgggtcttcgggtcctgacaatttagaccggaatataagatgaaacgatatctaaccgttagatcgttaacttcaaaagtaaatgcattacctgatcaacggccacaactgatccaacgttcttgtaccagtatgattctttccttagaatcttgacctgtaagtcctcaaaattgtttataaatttcacagtagccctataactcttaatatgtatactaaatagacccagaacttattgatgatacccagtttagctcaaatattagtccaatcttctctactagcatctaattaagcttgaattttcttctaccacaagggttagttccttttaatcctgatctagaggtccaaaaacttcatataagtttcacattgaccccatacttacaaaattattctaaatagtccagaaactttattgtaatccaaacttggctatcatcaataaactcaaaattttgaagtataaacatgcatcaaagattatgtatgaataagtaccttggatcctctctttgggccaattggaggaggtttagccttagcggccggaactttcgccggagcagcagcagcggtggtggaagaactatccgacgaggcggttgccggaggtgtatcttccgccgctctgactactagccttgaaccgaagcttctcatcggcaagaaagacacaatggtggtgctctttgaagaaccaccgcctattgccgccgggacgttggccgtgagaataaatccggtagctgctgacgtcatcgccatttgtgtgtgatcgttggaagttgtgtgagtgatccgaaaaggtggacaaagctttagattgtttggggttaaaaggaatcgttttaaaccacttgtgatatgacacgtgtgatcacatatcagtatcgtctggataatgtgatgacgtggcaaccttagaaaatgaaatatataattagagcaaagaatctgtaataagggttgattgattttgccgccaaaattcatttctcatcttctccgatttcaaattcttatgaatcgccatggacgcgtgatgtgaaatctctcattcttcatcgccttcgtgattataacagcgtttgatccacgattctgtagaacgaattcagatactcggtgatg

SEQ ID NO: 13421 - DNA, 3000 bp, Unknown; identical to SEQ ID NO: 13415
  misc_feature (1)..( 3000): cDNA_ID_1022296_gDNA_ID_2214625_Annot_ID_135948 3000 nt of promoter + ATG

SEQ ID NO: 13422 - DNA, 3000 bp, Unknown
  misc_feature (1)..( 3000): cDNA_ID_3029999_gDNA_ID_2214625_Annot_ID_135951 3000 nt of promoter + ATG
agaatatgtttttcacatcaagattgcgttccattcgattcatcagccttagtgtggggtttgcttcaaacattgtaaatcattcgaatctgttcgagaacaccttcacggtatggcttgagcttatatgatcttcttgttctctgtttttttgttgggttggtgtttgattgatgattattttgaacaatgtcagttccgaaccatccctctcgaccattcaaagaaaaatgcaaaaccattttcgctgaaaaagggtgtgaactttgtcttcaagtctttgtggaagccactgctagggatgagcatatgaaagagtgtctcatgtcttcaccacctcctatccaaaatgcttctagtgcaagtggcacacgcgtgatgagtctgtgcatatctaattttagaaaaaactattttgactctagtggatacaaagatgtttttaacattatacactgttaaaattgagtttttttcaatgactttatcgaaaacatattgcgttctataatattaatcaaagataaaatcctaataaaacgtaaatatataacaatttctttttttaatgaatagtctataacttttcttaaaatataagactagtatgtatcatgctcataagatggaaataaaaacatgttaaaatattaaagaaattataaactgaattggctttagtggttatttaaatttcaattaaatttatttgatttaaaaaaaaagaaaatcttctaaattaaattggctttaacggttatttaaattttgattgactcaattcatctacaattattttttaagaaattttataatttacaattttttttttttgcctagccgtatcggttagggtcatgttgatctttaaaatataaatttttatttgtacggaccgagatcaaatatatgcgggttttgcagactaacccaattgacatgcatatttgttccaataattatgtttgttctttggatcttctaaacttaatcacttagtataataataaagaccaagcagaaacaaaatttatagcaaaaataaaacaagaatgattgaaaaaaacaatagcaatttaaacaaaccacaaaagttttgttctttcatcccaatacataaaaatctatcaaaaagtgaaactaacaccggctttttcagtttcactattgttttctaatcatatagcagcaaaagatataaatataaaccatgttcaccggcaagtaacatcgacacatggaagtgacaaaaaaaattgtaataattattgcttaagtctcaagtatgtggtgaaggtgtcgcttaatcacttaatttttttgttgtatttgatttatcttcgtattgtttacggaaaaaaaaaagaagcctttgttcaaaaaaaaaaaaaaaaaaatgccaaaaaaatctcacatgtaatttcgattaaataaacaaatgaacacaaagtttacaattcaaaaggacctcaccacagttgttgacttgttgtaatatgtttttctaatttcgtgtacatattattagtataaaacgtggaaggtttatgtaggcaagtggtttaagttaaaccaccaattaaccagacactttggcacctgatgttcaatctctttcaataatcgaatccaaatgtatggcttactaactttctgagtaggtgtagagaaaccatatttataaataaaactattatataagacactatttatgaattttcattttcgaaatcaaaagacaaactttctaaaaagttaaataaatttaaggcacatagtatttttttttttaattagtaaagaaaaatctaactcaatttaatgctaataaagtagaaaattaacaaagcaccttaatactattaatcttaaaattaactattttcactattattaacatatatttttaaataacttgagtgttttagctatcatatactataaatcatgaatagattataatatattcttataaaataaatgatctaatattaactcaatttctttctaacatatattttctaatatttaacatttccattaaatcaagtcacattttatcatttcataggttcactgagattttttactaaaaaattaatgacataaagaaaatttcacttctgaataagcatttagaaatgtctaattagtttaattaaaatgatgtgaatatgacgtttcacataagagtttagagacaataacttgataagttagagtgtataagggaaaagttatcaactttaagtaaaagaagcaaaagatggaaaaaacaaaagaatttgataatttcgtctttgttaaatttggattttcccattttatctctagaaaataacaaaagtgattagaatcagaataggtatttttggaatttactgttaattaatactaaattacccttttaatatttttttggtagtaaattaccctttaattactttactctagaaagactaatttattcacagaagtagaaaaagagaagaaattaaaagaaaacagcaaaaaataggtgaaaactatataagaggaagagaagatttatgatttcttcattagcaatttgttttgttgtcaaagggttttaatttaaaagcttttcacacatacatatatctctcaactctctctataagatacaaatctctttctctgagaatcctattatttgcattcacactctgagtcacattgaacttcgtctctagctcaagcaagtgaatgattctttgttgctacaggaatctatctcttgggtttctgatttgattcatctccggtgaaaatggtacttttaaatttctgggtttatcaaccgttttaattccattgtagcgtttctttcgttttgttttacttaaagttttgatttttgttgttgttgcaaacggcaaatgtgttaacttttgatactttcttccaaattttgtgtgtgtttgcttcttctgggtttcatttaattatgctctgtcgttgatacagagattgaacatg

SEQ ID NO: 13423 - DNA, 3000 bp, Unknown
  misc_feature (1)..( 3000): cDNA_ID_3029995_gDNA_ID_2214625_Annot_ID_135952 3000 nt of promoter + ATG
acttctattttgcctaatagacaaatagtccaaatttatcaaaaccggaaaaacattgttatattttggatcaaaattacttctaccatcatttagttagcttttaatattttagaaacaattgaatttttgacccaaaaaaagaaacaatggaaataactgataaagtcttcttaaaagtataggaaattttgccaagtatatagtattaattttggaaacaaacacgaaaatggaatagttttgagagttgatacttgtcatttgtggaattattactattactttttaatgtaaaatatttcgaaaataaacttttaacaaaagtaaaatccgaaaatacttagtttccaagtttatagaaatcaagcccagcccatttggggtttttaatttttttttttttttttttttaaaaaaaaaaaaaaaaaaaaaatcaaacccaaaacgattccgtttagtaggctaaaattcaagtaagtcccggcccaataaggcaactaacgcccaaaaaagaaacggttttgtcgatgtgacggtagcaaacggccaccagttttgtcgtttcgatgtgcgtggccaccacgcgcatacgaaaccgcgtcggtgttcgctaacgccatcatcatcgccttttttttttttttttttttgcctttctccgaaagcagtctcactacggcaacacactaccctacgcccccttcccaccatcagcattaaattctctctctctcttcgcttcttctggtttcgaattcactttactctcttcgcttccaatctctctctaccactctgataccttcgccggagaagaagctctcgttctctctatcgtcggagaagctctcgttctctgcttccctgctctgtacagatctcgagccgcatttcgtggatctgtcaaaatcgcgttaaaacctactcgcttctctctaaccctagggtttttgaatttttttcgggacgagggagaaatcaatgtctgtgaagctttgaggaagctatatggttacacctttggttctggttagtcttcgttttgatcggcggagagtgttcgccgaggcttggtgtctccgttattgactaatggtggtttttgatttgagataagagatgcggaactttgcgatgcttctgctgttaattcttcttcttcactctctcgcctcgtttcctatatgctttggtatgaactagttaacaaatttcttttccccttttcaaatttaggaaacgattttgataggagaaattaacctttagttaagttgctcttactttgacagctcaagattagttggtggtctatctatatttagaattgtttattggatttagatatatttagaagctaattttggttatgtacaaagtaagcaaaagagtttagattatttaagtttggaatctgtgattgtgaagcgtgagagtgaagatcaagtcctcacgttttgtgccttaattggcacacaaccttttaatagctagaatgcacatagatcttactctttcttttctgagtatcttgaggaaatatcgattttgtgtgacattctcttggccaaattttatcctctacagttggcattatacttttaaacccaagagaggaggatggagtatgcatactattagaaacattctattttttcgaaacttttcactgctatgaatattcgacatgtgtagaaagaatctatagatgacttatcagcttgctttatcatttgcagctcggttatttccgatgagtttgccatttacccgatcaaaggcgcatcaaatgcatttctttcatccttatcttaatccatcagttgctcctacaccttcaccaggtcagtaagggaatcctatttgtcacctaaacatagtgtcattatgtttctgtctaggagtattcattgttcattgtctttccctttttagctttttcccccaacccaagtcgcattccaccactaaggcacaagggtcatcaccgtcatcgtcgctggcatttaagacgcaatgccactgcagtgtcaccttcgtcacatggtagttcttttgcttcttgttggttatcctgcgtcctattatagtggcaacgataatgttttatatgaatactttttcttcagacttcagttgataaatcaagcgtagtaactactttttcctgtgtatttccggctttccttttgatagactgtcagcagacatgtgtggagcctctcacttcaactccctttggttcaccttgtggttgtgtcttccccatgaaagttcagcttctactaagtgtcgcacctttttctattttccccgtgaccaacgagttagaaattgaggttgctgctggaacatacttggaacaaagccaagtgaaaataatgggtgccagtgccgacagtgaaaatcaagggaaaacagtggtggatattaaccttgttccacttggggaaaagttcgacaacactacagcaacacttatttatcagagattccggcacaagaaagtacctctaaatgagactgtttttggtgattatgaggttacgcacataagttatccaggtaaactgatttcattcagatgcaagtttctactttttttttgttttatttcaaagtttgaacttcttaaccttgcttcaggaattccttcttcttcgccaaatggagatgttactggagatgctccaggaggccttccaattccgatcaatgcaacaacttttgccaacaaaagccagggaataggttttagaacgattgcaattattgcgttgtcaggttttgtcctcattctggttttggttggagctatttctataatcgtgaaatggaagaaaattgggaagtcatctaatgctgttggtccggctttggctccatcgattaacaaaaggcctggtaattttcaccctctgacttcttaacgcttctatagctttaaaagaacctgtttctgaaaaatttattcgccttgcaggtgctggatctatg

SEQ ID NO: 13424 - DNA, 3000 bp, Unknown; identical to SEQ ID NO: 13413
  misc_feature (1)..( 3000): cDNA_ID_2713662_gDNA_ID_2214625_Annot_ID_135953 3000 nt of promoter + ATG

SEQ ID NO: 13425 - DNA, 3000 bp, Unknown; identical to SEQ ID NO: 13412
  misc_feature (1)..( 3000): cDNA_ID_2713658_gDNA_ID_2214625_Annot_ID_135954 3000 nt of promoter + ATG

SEQ ID NO: 13426 - DNA, 3000 bp, Unknown; identical to SEQ ID NO: 13411
  misc_feature (1)..( 3000): cDNA_ID_2702931_gDNA_ID_2214625_Annot_ID_135955 3000 nt of promoter + ATG

SEQ ID NO: 13427 - DNA, 3000 bp, Unknown; identical to SEQ ID NO: 13410
  misc_feature (1)..( 3000): cDNA_ID_2702935_gDNA_ID_2214625_Annot_ID_135956 3000 nt of promoter + ATG

SEQ ID NO: 13428 - DNA, 3000 bp, Unknown
  misc_feature (1)..( 3000): cDNA_ID_2713654_gDNA_ID_2214625_Annot_ID_135960 3000 nt of promoter + ATG
taacaatgatcaaagatttgaatttatccggaagataacaaatctcatgggaataaaaatatttagtaacaactcgtatttaaaatcatttatacctggaaaaaaaacctgtattgtttttttcgtggaaatgtgatatttttaattttcaaagtgttaacactttaaacgtagatattactgtattttactaaaacactataaaccatcaaaataattttattatcattctaaactttaaaactagttttcatgtttgtgacactataaaaaatgacagatttccgtaaagaaaaacatcagaaaagatgaattaaagaggtcataatcacatataaaaatggcaatttaatattcatcacctaagattagcccgaaaataaatggtgctctgtatcatagtattaattaggagagatggcattcctaatctcttaaatagataaattgaaattaaattaattaaaattaaaattaaacaaatataatttaactatttcatgttagtagatgttattttccgtcatttttttatggcggtacaaacaagaaaactagttttaaggtacaaaatgttttataatgtttagtaaaattatattgaagattaaaatgctgttaaatgacacgttaaacattaaaggttaaaaatgttatttttcgggttttttaaacatactattgtttttcttttaatctatatttatttcaacgaaaaaagtaaaaataataaaatctaaataagaagttgcaaaacccagaaccctacagatcatcccctacctcgctgcttcgggtcgaatcagcgagtcgggtcaaaattcacctgagaaaaatgttcgcgaggcggttcacttcgttcttcaaaggatcttcaacctcaaggtacccaaaaatgatgcaacttctctgatttttctgcttgaatttgcaattcttgaccgtgaaaaatccaatttcggattttgatttgcgatcttacaaattggaatccgatcgatttctcttcttcgcgcatctgaattcattccatctctatcgcgatttcaaaatcgacctagtttttctagttggtgaaatgatctatatacccatttacacctattgacttgagcttatatggattagattcaaaatttggatgatttatgttatatatggtcgtttaggagtgaaaatgagctgaagaatgtttttgaaacagcccggacaaaacagctgggacattgggctcttttggtcgcaaggcagtgtctttcgtcttgattacagtcactggtggtgttgctttgagtgctctcgatgatctttctatctatcgtggatgtagcaggtaatctcccatcacatattcgtttcatcaaaaatgcatttatctttccattgaagtttagctattgcaatagacatactatgtgtgtaaccttcactgatagttgaattgtgaatcgattcggagtcttgacaaggctttattagcaagagactcgtttggacaacaggtttagataatgtttaaaccattttgttgaagtggtggctgagaccatcaattctttgaccatattttgttatcaatgggttggggtttaaaggatcaacttcgaaagacaacaaacgaaactcaaattctcctgctagtgatacatgtacgtgaattgatgctgtctccatatttcgattttggcttcaagctttagtgaaactggttaagcaaacgaagagaaagatgtgtagtctggtagtctatcttgtgcttgtgccgccactttacaaagtaatgatacttcttctacctgtcctcgttaggaatcgagtgaaaagtcagccgtaatatccagaacaaacatattttttttggatttctatacgcaccattttgttatttgttgtccattctgtcatgaatttctctatgatcttctccttgtatcatcaaatcaataacatggacatgattttcaagaatgtagtatctgcattggcgattactcaaaaagtctttgtatgcttaattttcagcaaggcgatggagaaggtgatgaatagtaaggtgatgattgaagccatcggagagccaattgagaaagggccatggtacaatgcttcactagctgtttctcaccaaaggcactcagtgtcttgttcattccctgtgattggaccacaaggcacaggaatcttgcatctcaaagctgttcgcaatggaggtaaacattctcaaacccgaacagtcactcaaagacaaaacatatgtgttaggtatctgcatttgccatttttcttactcattggatccccttttctgcttgggatagaagatagcatgttcgggtttctccagcaaagggactgggacattctgataatggacgcacttgtccatgtcccgtcaaacgagggaccccaacaaaccttgagaatcaacgttactgacatcgttgatccttcgcctggtacccacgataaacctttggaaccattagagccagagaagagctaaaaagagaaagagagagagagagagaacgcttggtggagctcctggctagggttttattccattccattatatcttgtggaacaagagagagaattgggtcttttatttactaataatgaacaattttttaggagtatacaaaagttgaatacatgattgagagtctagtgaataacagcattgctatatccgttttgatttggcctcctttatgttttcatatatatgttttacgtgtttgtttaagcattcaagtcctaattgcatcaatcaaaatgtaaattagaatcctaacactgcttcaatcatattaattgcatgagaattaaaatgttacatgaccatcaaggcctagttagctaaatatcccaacatcatacaaaagaagaagccaatttgaaaaaagcaagcccacccatgggatcattagaatcagagaagtcttgcctgccaagcgatttccggagaggtttccgatttgtctgatctcgccaatg

SEQ ID NO: 13429 - DNA, 3000 bp, Unknown
  misc_feature (1)..( 3000): cDNA_ID_2710620_gDNA_ID_2214626_Annot_ID_135964 3000 nt of promoter + ATG
agctttacatttgctcattgtatcatgacattttgcaccattttagcttaatttgcatacttaggcatctaggatcatcttgcattcgcattgcatgttttggtatgttttcaggtgcagaaagagctaaaaaggactctactcgatccattcactcgatccaggcagctacagaagaggcatcattctactcgacctctttactctatcgaggatgctacaaaggaggttgtagtttactcgaccctcctactcgatcaaggcaacctcagatgaagcagcagattgatctactcgcccctcctactcgatccactactcgatccatttactcgaccaagggtgaccaactctacaagacttgttgagctatcaaagcgtcttcggatcctcctcattccccactcaaccagacatctgagcatacaaataggagaggatgaagcatctactcgaccaattgatcactcggagtatagacacaaaggcgcagactttgcaacaccctctttactcgatccccaagatcgagtattcgcccaaaccgcctcaagtctcttgtcttctagtgaatctagggtttccaacattttagtataaatagatcactttgggatttttccaaaggatctatgctttatctttcagtttttctttgtgtttatgaatcttgaaaccttaattactcttaatctatttcgtttttgcaattgattgtttaagtaaagttgtttagcttgtttagatctacattttggtatgattttagtaatttctgggtttatgttcttaagaatgttgcttgagtagtgattagggttcttaaggatggattagattagggtaatctctaggttcgttaggtggttagtgtttaggtttatgtccttctggattcgcttggcccctatgcggttttcgctggctaatgtgaagattcgatgacgtccagcgtccaaaagacgttcaaatggatgtcggacctacgaattccagagatttgtagactcgacaaggagagaggcttttctgcctattggctttggtagattgtttcttaaaccgtctctgctatgtttcatcaacgagagttgagattaggaagtggtagagttatgggggtctctgtcacgagagtggattgaccctgtttttgaatctatcgtcatgggtatctacctttcgcctattagccatttgatgaatcctagagttgcccttatcaatgaatccatccttagaacttctattacatttatttgtattccctgttgattgcacttttatttacctgttatttgtatcccctatttgtatcccctgttgattgcattttagttcttaattttgtcacatgttggttctactcgacccaatgatcgagtagggctcttaagttctcatttttacttgttcgaatcctgacctaggattgttactagaaaccaaccatcattataatctgacttgacttagtcgtctctatacacatcttgattgctaacaatacagtggactggattgacaccccctataactgcatcgacatgtttgtgttttaggggaattgaactgaatcacacacatctagtataagtaggcataaaaacatgtatatcaatttggcgccgttgccaattcattgttgcattgttacattcaagatatcagaaacttttaagatcaagttcttttacatttatcaagttactaactcatattttcgtctgcttgtttttgtggtataggtactaatctttgtgcatgcaaactcgatccaaaggttctgcacacctactatcattcagagacagaattgacagaattgacagaatagctcgtgagttacaagaaaccaaagcaaaggcagtctgtgatcagcaaagaccagctgctatggatcaacagaacagaccagttgatgttcaagacccacctaatgttgatcaaccaagaaacattggtgctggtgatgccccaaggaatcatcaccaaagacaagggatagtgcctccaccagttcagaacaacaattttgagatcaagagtggtctcatctcaatgatccaaggaaacaagtttcatggtctacctatgaaagaccccctggaccatcttgacagctttgataggctctgtggccttaccaacatcaatggtgttactgaagatatgtttaagcaaagactatttcccttctctgtgggagacaaggcacaccactgggagaagactctaccctcagactccatcacctcatgggacgattgtaagaaagcttttcttgccaagttcttctctaacgcttgcaccactagattgaggaacgagatctcaggtttcaaccaaaaaaacaatgaaactttctgtgaagcttgggagagatttaaaagctacacaactcagtgcccccatcacggtttcaagaaggcttcattattgagcacactctacagaggagctttaccaaagatcagaatgctacttgacactgcctccaatggaaacttcctaaacaaggatgtagtaaaaggctgggagttggtcgaaaatctagcacaatctgatgggtgctacaatgaagactatgatcgctgaatgagtggaactgaaggaagtgaggacaaacaaagcaaggatatcaaggctctaaatgaaaagttagacaagttattgctggctcagcagaagccttgcggtatccaattgatattagctgaaagatcagtcagaatacctcatggaattctcacagacctgcctgttaaagtcggatcaataaacatccctactgatttcgaaatactggagatggatgaggagccaaaagacccattaatcctaggaagaccattcctagctactgtaggagccattatcgacgtcaagaagggaaaaatcgacctaaacctggggaaggagatgaaaatgaccttcgacattaacaaagctatgaaaaaaccaacaatcaatggacaagtcttttggatcgaagaaatg

SEQ ID NO: 13430 - DNA, 3000 bp, Unknown
  misc_feature (1)..( 3000): cDNA_ID_3030048_gDNA_ID_2214626_Annot_ID_187803 3000 nt of promoter + ATG
ttcataagacggtagaagcctcaggcaatatccgatctgactaaaattcagacaaaatcttcggtgggactatcagctaaagattcaacggtgggatcaatagtttaacggttcaaacggaagttatcagttcttctataaatcagcaaaaggaagtacattacaccaacaagtgacaatggatcatcactagcaatcgctcaaggtttccactcattcatcaatgatgcgatctccaattctgtctcgacgacctccctcataaaagataagttcaattactttcttacatattaattaagcttgattgacattctcacttatatcacaagcattcatccttctctctttctacgcaaagatgagatctcctctaacgaacaacatcttaaatgtagattttcatacaacgacgtttacaatctcaaagattcagatcgtccatgccgtagatttcatcatctctatgtccaaaccaataagataagtgttatctattataatctaacaagtacagcttaatcatatatatgcattctctgctatattttttgcgtaaacttgcaaaaacactcgtctaccgagcaaaaaggggggggagtggggtccgtatatccatactcccacttcaatttttctacttcgaattttcttggaatttgatttctaaatctttttactttgaaatattttaacgggcgacggcctattattttcaaagtttcatttacaccgcttcggttacagcgcgctatataaatattcaagataagaatctgctcgaatgtttttccgagcaggctatgaattctatcttctgaaatccggttatacttaacaccggtgccccagctcgtttctaaacgctggtaaaagattgaatcaaatcgggtcgcaaccgtgggtattcaagtctactgaaatccagttactctaaacactggtaccgagtcaaccgcttcggaaactaaaacccagttatcataaacactggtgccgagcttttgcttcggctaaatacagtttcttatctgctttggtctgcttagaaatccagttatcccgaataacctggtaccgagacgatcagctcggaacgaagtatactgaacccagctttgactcacgcaatttgtacccgagccaaccacatcagttcgtctgtagctttcctagctcgaagttcgtctagctagcagctcgtcggcacttcgcctagctgacagctcgtctgcagcctttctagctcccagttcgtctgtagctttcctagctagcagctcgtgtgcacttcgcctagctaacagctcgtctgcagctttcttagctccttgttcgtctgtagctttcctagctcgcagttcgtctagctagcacctagtctgcacttttcctagctcacagtccgtctgcagtttctctgactcgtagttcgcccagctaacagctcgtcggcagccttcctagcttgctattgcccgcctaacagctcgtcaacagcttggagttcttcaacaagtctcctagcagctttcctagctcacaacttgtcaacagctaacattttgagttcgagatagcaacacccgtcaagaacagaatctcgtagcaccaagaaaaaacaagccttactttcaaaagatacggattagtcagtttagatgcgaaagcagctggctcggtcacaccattcatgaagctcgtggcattaactcttaaccaacgagctggggggctaactgttggggtcggattcccccacaagcaagaccgagccaaacagtctaagaataacaatcacctcatggttaaacatatgattggcccctagcctagaacaaagcacctcgggaccttattcgatcgaccgtcccgaagagagtttgtaaaatggctcgggtgttaatcatatgaacacagcccgagccaatcgcgagaacgctgcgggaaacatctatatcggctcgggagacagccaactgagcttaatggacagtcatcaagcgcgccccgagccggtacataccgtttgccccgaagccacctctcaaacgaccaccgagccgtgaagaacacgcgaggcaaagacttaaggagaatctttgaagataatgttgaaatcaggaaatctccccaaaacctccgaagaataaggagaatatccttaggacgattatcctctagaaccgacctaaggataaataagaatcttccgaagaatatcgctaagggggcggtttaaggatcctatataaagtgcctcagggacttcacaagagggggatctttggatactcacaagaacacataactttatacctattgagaactacgaatggcttgatcccttcacagggtacgtaagcaatccatcatggatgcagctatacctttttaaaaccctaactctttttctgttcttgagcaaaaccctaatgtatttcataagagattagaacatcttttgtaatcgagtcttggatagaatacctaatgaagagaaattactagatttgttttccctctctaaacaaatctattgtgtgaatccttggttcaacacaactcaagttttttctcatctaatttgaaaatgtttctgagacatcaacaaatgtatgaggagaggtttctcagacacatggaggtgctgcaacaaacacgatcgacgaaatatgagccaacaaagatgggaaatcagaatctcacgggtcaggattttgatcatgtgcaacaaatgatcgatatatggaggaggtcgaagatcaatcccaaggaagctatttagaagcttccagttatccagagctcaagatctgaacacaacaccttaaaaaacaccaaaaactctcacgggaattttgtcgaacaggtggtgtgcatctcaacccataacgtttcttatgattctgggatttctaaaggctcgactgcaactcaaaacctgaggaaacgacaaactcatgttaagcgaagttaccacaaggttcgaaaagaaaa

SEQ ID NO: 13431 - DNA, 3000 bp, Unknown
  misc_feature (1)..( 3000): cDNA_ID_3030019_gDNA_ID_2214626_Annot_ID_187811 3000 nt of promoter + ATG
tttttaaatatgcaatatttaataaaataaataattgtcatattttttaaatatatatttcttacctttttcttatctcggataagttttgtaatttatttttaatatacgtatcattatatttactttttgggattcaatagataattatataaaaatcgttatactgtttactttatttaagatttgaggttaaattatttttcaacttaaaaagaattctgttaaaaaaatttggtcctataagatttgttttttgtcaaacggtccttaagattaaaaaaacgaaatcatatggttcaagaaaattaaatttaggtaaaatagaaaattaaatttaggtaaaatagaaaattagaataaaatcgttagaatgaaacctaacactcatacttaaatagagtgacatatagaagaaaataactctgattaaaacaaaactcattttattaattcctacaaagataaaaccattagtataaaatatagtacaggaatttaaattgatgagtgaaaaaaaaaaaatagaagttatccttggatctttgatgattttaattagattgaagttcatatgatttttgtaagaaaaatatatttagttatatcaacaaacaaacaaattatctgtgggtttatataagcaatttattttgtaaaagtaatagataatatatgtttattgttgtttgcttaatccgatttgcgaagatcaatctctacaacggtaattatattgttatgtgttactacatatctatactatttttaaaaacatgtccttttacttataaaacagatagctggagtgtttccaattcttttgatgttttacaagtcttcgtggatcccacgttggctgagttgggtttttttaagcaaaggtaattgtatttatttgccactaaatatatttgcttctacataatattaaacaaagtatatttttttaatatatagcataccaaccgatgggttaactttgggaagttcggaatcttttcacaagaggctctatgcaccaagaactggggatgacgatggtgattatccaaggcaaacaatcaaggaagtcctcacatcttctgatatactattcattaatttattttacctactaacctttttattacatttttcatatgtttaacttagtttgtgaattcctctttatattcatttgaaggtgggtaactgcaaaacagtttgcactgtttcggcaattgatacagattagccgtggtactatttttgttgtcgtgctcacaacaagaaagttgtcaaagaaaaagttatcaaacttgaagatatcaagctacctcaaaagccaagattttggtgtgaaatatgcattggttttgcaaaatttgttgttgccaagttagtctttatgaaatctttatattgaatgtattttgaattataatttggtgtttggaagctaataatcctatttaaattttaggttttggttacatctccatattatggaccaaaccggtgaagctagatacatgttattcgatagtcatgcaaaagaacttcttgacactactgcccctgaattgcttgatgggtcatttgatgaggtataatgcctttttaaaaataaactctttcattaaaatgacaacgttcatgttataataatctatatttttctatagatcgaagacccaactattttgcatgatgtgatcaatggtttgaaagggaagacttttcagtttctattgtgcatccaaaaggaaaacatattaggtggatatgattcatttactgttgcccgagtctacaccggtaacattgctgatgaaatcgttcaagaagactgatgcatacgttgatccatcatccttaatttcgatcgaacaggtttgtcaaataacattaaacaattccaattatttatatttatattttagggttgtctttttaaaaatgtttatgtattttcatatagggttcccttatgcttactaatggtgttgacctttctcatgtggatttgtcgtcaacctctactccatcatcaaaacgaaaagattcagatgatgttgatggaaatgatcaggcttccacaagtaggaagaagtgttctaagattaccatgtcttaggaaggctccggcgaatgatgctcattgactaatccagcttggatcgttttcttctttcttatttatttgcttaaagttatcgaagttgttttatttttttaagttctaaactatctttattttatttggttttttgggaattaataaaattatttcaattatatgtcgtttcgttttgttaaatctcagtttttgggaatacacagaactgagatttgattactccttctgttccaccaaattttatgttgtagaattttgacacaaattaagaaaaataacttttcatgaattattattattttgttagtttaactatagtattagttatatttctctcttcttttattggttaacaataaaaatattaatgatgttgatttagaacatcaatcttgatgaaagaagaaaaaaaacaaaaacatcaaattttcagaaaacaaaattgtttattattaagaaacacattattttatattataatgttaatcatactaagaactataaacaattttgctaattttgtgttaaatattctacaaaatcagaattagcaaagattttgtacactaaataatcagtcttattaaatatgattaatcatgataactcaaacaaaacaaacctattcctattttttcataaactctcattttaataattacaatttttagtaacacgttaagaaataaatgtcatcattattgttctaacctataagaaatcctactagttcttgacgattcgtttcctttttacactttaactttccatcattgtatcttttcccaattatataaaatcaaaaatttcaagcctaacacaattaggtttaactctttatctgtcgaaaaaaaaaaaaacttccttggatacacatg

SEQ ID NO: 13432 - DNA, 3000 bp, Unknown
  misc_feature (1)..( 3000): cDNA_ID_3030052_gDNA_ID_2214626_Annot_ID_187802 3000 nt of promoter + ATG
ctctaatcggtatgtttcttctcacaattcgagttttaagggtctaagatcattaaattgaaataattggaattcataaactgttgttagtagtgtttatgctctaataagtgatggatttgtataaggtcagaatcacttatcaagtaagtaaccagaaggagatgagaaaatagaagaattaggttgagaagcagaagaattcagaattagaaagaagaagaacaagagagaagagagatgatgaagaggataaacatattgttatgatctatttcgatagtgttcccgtaagggagaaagagttgttaaatacaaaggttaagggcttaagatgccaacaaattggcagcccaataacatactaaaagaggcccaataaaccacaattggatacttatcaatactccccttttgaagtatcaccttgtcctcaaggtggaaggaaatgaaactctgccagtacattgccttgtttgcccgtgcatcagcctttgttgtagcttcgagaatgtctgcaccttcagtctttaacttgatggagaagatctcattaaagtccttatgagtaatctcaaactgcttccgttcgttctcttcaacttgtatctctcacgcagttgtgttctcaattattgagaccaactttgaaaagaacagctccaaaagcttgccatcactggaaactctgtttcggaatcttgatactttccccaagaatgcaaactgtaagagagggtccttagacagtgacttccaaacatgagtgctacacgttttcttcttcatgtcaaacggtctattctccactgtcatatctatattttgggcttcacgggttgctctaaggttctcctgttcctgccattctccaaacaacagttcaggtggccgtgacgattgagacacttcacagttggtatcaatcttaaccaagtttccaagatgaaactgaaagagctgggtcgacatggtctctatcaaagtagattgatctctcacaagacaaatgaacttatttgatatcatagctacaacgtccttattgatcttgatcaacctacttgtaatcttttgttctatctctaacaagtatcccaagaccataacgacaacttccgtactttttcttaaatcgttgtgcttctgatatttctcaacaacatctctctcaaccaatatttttgaaacttcttgagttgttaatattgttgtctcatagataacctatagcaattgacgtcttggtagtggctcagtagctttaatagaacacacaaactcctctctgcccaaagagtagacacaacccaaatcaacgtcacaaacaactcttgagacactgttcttacccttgttaacatcatctttgacatttcttagtttcttctttactgtgtcgctaacccatcttctgtcattacctttactcgcccctgaaaaatccaccttgtcctcaaggtggatgaacaagaaaagagtttctttgctaaggttctcacttaagtgaacatctaacgacttgagcagcttttccaaatcaaaacctgtgagtaaaagtagcttccgcctcaaaattccttttttatacccaacacgcaactttttcaagtcccttctcatgaccttttgtaaattagtcttatcaagcttctgtattaatcttaacactccaaaatttctgtaaccttccaaacccatagaacttggctaacctctaaaccaccacgctcgcatacgcgattagctctcccagggtcagttggttgtttgttaccggtacaaactctacaggctagacgcttaacaacatcaacatcctcaaactcctagaaagccactaacccgtccaaatgaattttgtcagtcatcctctctccatgatcccaaacttggctaacgaaagtacatccaaaaaacttgttttcattcatgaacactatgtcagttattgaagaactagtaatttgtttctcatcggtaccatgaatcttccttgcataaaaatcccatcacttctttccttcactgtagtacaaagcgttcctgcaccttctagtaaactcacttcactagccttttgtagattcatcaccaagatatctcccctgtaacactcatcatcactcacagtcaattgtctaagaggaggaaacgagaatgtatgagagctgactttctcctttttctttgcaacgacccattttttattctttgatctgaatgaggcaatcacaactcgatatctatccctctctcttcgtttctgaaattggtgaaaacgttgcttgaaactagctcttggagtacctatgtggcgactttcctttaccagattcactgccatcgaattgagtctatcttctccgagatacaacacgtttcttggcgaacgagtacaaaaacttagttgtagagattgagaaagattgtcacgtttcatttttcttttcgaaccttgtggtaacttcgcttaacatgagtttgtcgtttcctcaggttttgagttgcagtcgagcctttagaaatcccagaatcataagaaacgttatgggttgagatgcacaccacctgttcgacaaaattcccgtgagagtttttggtgttttttaaggtgttgtgttcagatcttgagctctggataactggaagcttctaaatagcttccttgggattgatcttcgacctcctccatatatcgatcatttgttgcacatgatcaaaatcctgacccgtgagattctgatttcccatctttgttggctcatatttcgtcgatcgtgtttgttgcagcacctccatgtgtctgagaaacctctcctcatacatttgttgatgtctcagaaacattttcaaattagatgagaaaaaacttgagttgtgttgaaccaaggattcacacaatagatttgtttagagagggaaaacaaatctagtaatttctcttcattaggtattctatccaagactcgattacaaaagatgttctaatctcttatg

SEQ ID NO: 13433 - DNA, 3000 bp, Unknown
  misc_feature (1)..( 3000): cDNA_ID_2713737_gDNA_ID_2214627_Annot_ID_135971 3000 nt of promoter + ATG
ccaatctcccatcaatcaattgtccttcagacaacttagccaacctttataaaaaaaaagacaaaactcaatttcagattcctaaacaaaagtacaaaactagtggttgtggttttgctagatgatttatcttaccgatgaggacaccgatcttcgtaacaacgaagtgttccttcaccgtctttatacaaaacaatttgacgatcgtagacggtgaggccaagaggcgcatcttcagggacgtttttagttaagtacaatggataccattcctctgtccaatcataatccgccacctcaacacgtttctcttcttcagggtttaaaagaacatctccacctccttctgtttgatcagatacggcggttccagcgacggcggagcggcggaggagacgtagacgaggctttgtgggtatagtgcatgttgatctgtggttgtggattattggtgttggtgttactttagtgaagagaatcggagaagtgggtgtgagttgtagagaagagcttagaaatggaacagccatggcggattcttcactagagagctcgaatccaatgttaggtgttgtttgcctcttctcataaaatatatcataaggttgcttgttcaaccattggacctcgttccaccacatacatagatagtagaaactttggctaaacgacgtcgtttatttttacgttatttaaatgtcattttaacttctttttattttatttttaatcttttaagttttaacattagtcttttttgctttaatacatttcatagtgatgaaaaaaaaacataaaactatgttaatagtgattaattatttattcattgttgataataataacaataaaaaaggctatactatgcctaagaacagaaactgataacataattagcactagtacatgtaaatctactcgaagcataatcgtacacatagctatacgcagtgggacaagctcctttaaatatcttcgagtatttcgtcggcgggcaagtctccggtttactgaaagcgccggtgcaacaatactccggtttgttaaaagcctcacaagcactcttacacgccacaacacccgatgagccgttaacgcgtagctcttttggacaaatggcattcacgtccgaaacacatcccgcggttttacaattgcctgagccaccttgtggtgtgattttcacctgaacgttgtaaccgtcgacgagactcacgtcgtaagaatcttgtacggtgtatttctttccagaggagccgattctgaattctgctagtgtggctggtggtgctcctcttgcaccggtgcatttttacattttctggaaccagaggcgttgaagttgcagcccgttcgaccccagattcgaccagaccaacctggagaaacggttaagtttacagaagaacctgaagctaaggcaaatccgccgccgcggagtagtgtgcggtttgcggttaggattccgggccacacagtaaagttgcagcggtttgataaagtgaagacggtgccggagacaatagaaattgtaccttgaagaatatacaattaaaaaaaaattactaggacggacaacaaaaaaaaattatcagataaattattaaatcaaagtagtcatcttaaaatgttggaaatgttttatgtatacatgtggctatgatgaaggagaagaagagaagatgtaatttggagaaaatagccattgttaatctgagtattgaaaagttgaagttgtgatgattagtgaaagttgatggtgaggatcctctgtttatagtgtttttcttttctttagaaacaaatccattaacttattgttttggatactactaccataagtgacacttcatatttttattttttttacttttaaagtttaatgagattttgtttcttattacataaaaatcaactttattaatcttaaggaaatctccgtaagcattgatgttttggattttacacacattaaaaattaaacattattttatgactgtttattttttatattaaatatttttaataactataaactaatactcattgattgtaatctaataaatttaatcattgcatcctgaactttgtgatttataatatcagtcaataaagaagaaaagaaaaaaaaaactacaaaattaaagtggaataaacttaaaatgattagaaaaagatggagtacattttttctattattttttcacaaagctttaaacctaacattaaaaaatttgcttgttttgtttccttcgaaattataagattattgcttaattaggttattgaattcgagtccaaagccacgacccccaggttttaaaatccaaatatctccgttgcttgtttatttttgttctatatcgagtttattatctaaaaacgacaaaccttttactgatttccaccatttcttgtacttttcaggttttctgagacatgaaagacaaagaattggcttatcaacagaaactatcaacaaataaagagtttctgaagcacattattagatccttttgtacatttttctatttatagattctctcttctttttttgtatgcaaaagtgacatatactataacaagtcaaagaaagatgaattcaataagcatgagtgatttttttaaatcttcaaaaagaaatatctgaaaggtacaaaaaaaagttttctgatttttgtcacaataatggagaaattcatactattttagggtttcttacccataaaattcactgcatgcagtgattggattcaccactttcaaattcttgttttgtttgtaaaattgatgactcgatctcatggatgcatgcataagagagtaaagagattgtcattaagttctcctgactcaaccatcactatctctctctctctctgacacgaacgcacatgcatttacagttttcatttatcacaacaactacaacttctcttctctctctcggctgattaagcaacttcactttccatcttctgacagacacattaaaaaatg

SEQ ID NO: 13434 - DNA, 3000 bp, Unknown
  misc_feature (1)..( 3000): cDNA_ID_2702975_gDNA_ID_2214627_Annot_ID_135973 3000 nt of promoter + ATG
ttcttatgtatgtgtgttttgatgaagttcttacagcttctactgcatctcttgcggcaagaacaagtatatcagcacaagagactgtgccgggacaaaagatttcgaggatatttttgacgctttctatcacagcgaatcctcctagagacgcattcccagggtcgcttcgctctgtaccgtttcctcgaatcaacactgagccatcacaaccctaagacagcaatgacaagaacaaaaatctcattaaattggaaatgccttgttatgcaaggaagaggcagtcctgtgagaatgtaatgtacctggacgaagcagtcatggaagatgagacgtaggagcttcccaaggactgatggatcagaggaagaagcagatctaacggtgtttctgacgattaactcagctccaggacaagaaccggcgtagaagttgaaagagagctcagctactgaagaagaaagaagcaaaagtagaagaagagaggagaggaatgtatattttggtttgcatgaaaaaaactgcaacgccattttttaatgtgtctgtcagaagatggaaagtgaagttgcttaatcagccgagagagagaagagaagttgtagttgttgtgataaatgaaaactgtaaatgcatgtgcgttcgtgtcagagagagagagagatagtgatggttgagtcaggagaacttaatgacaatctctttactctcttatgcatgcatccatgagatcgagtcatcaattttacaaacaaaacaagaatttgaaagtggtgaatccaatcactgcatgcagtgaattttatgggtaagaaaccctaaaatagtatgaatttctccattattgtgacaaaaatcagaaaacttttttttgtacctttcagatatttctttttgaagatttaaaaaaatcactcatgcttattgaattcatctttctttgacttgttatagtatatgtcacttttgcatacaaaaaaagaagagagaatctataaatagaaaaatgtacaaaaggatctaataatgtgcttcagaaactctttatttgttgatagtttctgttgataagccaattctttgtctttcatgtctcagaaaacctgaaaagtacaagaaatggtggaaatcagtaaaaggtttgtcgtttttagataataaactcgatatagaacaaaaataaacaagcaacggagatatttggattttaaaacctgggggtcgtggctttggactcgaattcaataacctaattaagcaataatcttataatttcgaaggaaacaaaacaagcaaattttttaatgttaggtttaaagctttgtgaaaaaataatagaaaaaatgtactccatctttttctaatcattttaagtttattccactttaattttgtagttttttttttcttttcttctttattgactgatattataaatcacaaagttcaggatgcaatgattaaatttattagattacaatcaatgagtattagtttatagttattaaaaatatttaatataaaaaataaacagtcataaaataatgtttaatttttaatgtgtgtaaaatccaaaacatcaatgcttacggagatttccttaagattaataaagttgatttttatgtaataagaaacaaaatctcattaaactttaaaagtaaaaaaaataaaaatatgaagtgtcacttatggtagtagtatccaaaacaataagttaatggatttgtttctaaagaaaagaaaaacactataaacagaggatcctcaccatcaactttcactaatcatcacaacttcaacttttcaatactcagattaacaatggctattttctccaaattacatcttctcttcttctccttcatcatagccacatgtatacataaaacatttccaacattttaagatgactactttgatttaataatttatctgataatttttttttgttgtccgtcctagtaatttttttttaattgtatattcttcaaggtacaatttctattgtctccggcaccgtcttcactttatcaaaccgctgcaactttactgtgtggcccggaatcctaaccgcaaaccgcacactactccgcggcggcggatttgccttagcttcaggttcttctgtaaacttaaccgtttctccaggttggtctggtcgaatctggggtcgaacgggctgcaacttcaacgcctctggttccagaaaatgtaaaaatgcaccggtgcaagaggagcaccaccagccacactagcagaattcagaatcggctcctctggaaagaaatacaccgtacaagattcttacgacgtgagtctcgtcgacggttacaacgttcaggtgaaaatcacaccacaaggtggctcaggcaattgtaaaaccgcgggatgtgtttcggacgtgaatgccatttgtccaaaagagctacgcgttaacggctcatcgggtgttgtggcgtgtaagagtgcttgtgaggcttttaacaaaccggagtattgttgcaccggcgctttcagtaaaccggagacttgcccgccgacgaaatactcgaagatatttaaaggagcttgtcccactgcgtatagctatgtgtacgattatgcttcgagtagatttacatgtactagtgctaattatgttatcagtttctgttcttaggcatagtatagccttttttattgttattattatcaacaatgaataaataattaatcactattaacatagttttatgtttttttttcatcactatgaaatgtattaaagcaaaaaagactaatgttaaaacttaaaagattaaaaataaaataaaaagaagttaaaatgacatttaaataacgtaaaaataaacgacgtcgtttagccaaagtttctactatctatgtatgtggtggaacgaggtccaatggttgaacaagcaaccttatgatatattttatgagaagaggcaaacaacacctaacattggattcgagctctctagtgaagaatccgcc

SEQ ID NO: 13435 - DNA, 3000 bp, Unknown
  misc_feature (1)..( 3000): cDNA_ID_2713730_gDNA_ID_2214627_Annot_ID_135974 3000 nt of promoter + ATG
gatttttcggccgttaaaaaaaaacctctaacatgcgagtcttgtaagtaaatcttaactttaagctatatatgcatttaccattcaagtagttcaacctgataacattaataaagatttgatcccttgacaagttggcatgaatccatttatcttttctcaatggtgctatagaaacaaaaaataatttgaagaaagaaaatacagctagtaagatactagcctacaagttatttgctaccaaaaaacacaaaaaccaaaagcattattatgaatcagaaacaaccatttccattggcaaaattataaatatttgagggaccagaaggcatgttcacgtaaggagggactgtcactttgttgtccaagaaaccaaacacatcgtctttggcctcattaaacgacgccatgtttgtcacaaccgtcttcctcaactcctccaatgcatacttcatttcctgtaactgaaccatattcatctcctctactggcttttcccaccaattaatcatcgaccgcctcacactctcttttctcatctcttccatcgcttgacccttcttcttctcttcttctacctcgctcaaaatatgcgttaactgcatattcagttcgcagctcgctgcagggcttccttgcagttgctgcgactgagctaaggacatattgtttcgagacacgtagcgatccaatacagattcaacacttggatgtccgaatgagaaaggctttttcgcgggagaaaacacgatgatcccaatctctgcaccacacaaagtgcaaagctcactagctttcttgaagagaccggctctgcgtttggagaatgtgacttgccggtggctctctttctttatttttaccattggaattttttgtcgtccgatgctttctttcttcttcgacatcatagttttttttgtatggagggttttagttgcttttctttgttggaatatttggtggagagaaagtgtttgtttatatatacatgcttgagtctggtgtggcattattatgagatcaacttgcaaagttggtaatttatttttatattttgtaacatacatttgtaattactcggcttgcctttaattttatggatagataataaaatacaaagatatgtgtaagttataaaaatcttaatttggtaatgcaatgatttatctttctttactttttataattgtcttgtgtataaatggatgattttcctaatgagtaatttctttatgttacaaaaaggttgttttaatgagtgagtctgtgtggcattattatgagatcaaatggcaaagttagtaatttatttttacatttgtaacatccacttgtaattactggttttgtctttaattttgtggatagataataaaatacaaagatttgtgttagttataaatattttaatttggtaatgcaatgaatttttttcctttcttttataattgtctttgtgtataaatggatgattgtcctgataagtgattgtgtatgttacaaaagaggttgcaaatcaaaacgtttacacatgttaaagtattatccaaatcaaaatattgttttaagttgttaatatcttttcttgtttttctatttgataaacatgcattattatacacaaattaatatttaaatcttgaaaatttgaagtctaatttatagtgtctgacttggtaaatggtttccgaatcagcgagctcaatcgtttggctgaaactggaccttacaagcctaggcttttcaattctaccaaacaaaagcctcaatatcaagcttacctaacaaaaccttgcactcaaaaaggatttacgttacaatcacgagggcaataactttaactaagaaagtgagaactaaggttttcaaccaagggctcaagagaaatgcagttctcaaccccaaccaactttatcgtctttgccacacgatcaagagaacaaactccacgaaataggccaaatgatccaaaaaataccagtctgacattcaaaagccacattggagacgacattgagatttgaaagtttggatacaaattatcaaagtcttagtgagagggtaaatcaatgcattgtttgtcacgtaagggactctagacagacaatgtggtcaaacaacattggtatgtttaaatctttgggaattaaccccacaagccttggcattcggatacccaaacccgataagttcctttttgggttttgggtctgcgtgggtaagagagtcgagattcattcgatatttcaaaaattcggtgcggattggggttcatgtattttaatcgagaattaaaaatacccaaaataactatattttagtttcgggtcaaatttggatgttttatctatatatatacttaaatctacccaaaacacatgatagtcaaaaatacattaattacgttttacctatatataaccaagtgtatccaaaaatattcaaattacctttaaaaactataacattggttacattttatccaaatatatccgaattactcaaaactatctaatatattcaatttataattgtaattttggatatttggagtattataagtataaatataactaatattttaaagtgtatatttatattcgaatatttacaggtattagatttggttctgtttttttttgggtaattaggtttagaactcgacgtatttttaaaaatcggatctgaatcgattcaggtattttttgggttttcggtatcgggcattcgggtattttttttgggttttcggtttcgggcatttgtcaaatcggttatataactacaaagttaagagtttaacaaaaaattatacaaaaccaaatcaaattaaattgaaccgaaccgtatgcgaattgcaaccaaacgcatataaaatgaaaaattataaactgcaaacccggttaattttccgggtcggcccggaacccaagaagttttcttcttcctctctcgtcttctctcctccgcgggagactctaaaatcatcttcccatg

SEQ ID NO: 13436 - DNA, 3000 bp, Unknown
  misc_feature (1)..( 3000): cDNA_ID_2702979_gDNA_ID_2214627_Annot_ID_135976 3000 nt of promoter + ATG
taccagtcgttcgccgttttccagctactactaccgtcaaggcttcggcggtggattcacctgagagttcttcaaatttcgccaagcgtatggatcaagcttggattatctcacaggttcgtatctccagagagttgttgatgtgtataattttgttgaatctgagtaatcacaagaactgatccttgatgtagtcatgtacgagtgaagagctatatgcaattttgtatgagattaagaacttggatctgtgatgaaatgttgtaaatttcagattatgaggtgaatagtatcagcaagtttcaaaaggatttgtatcgaaaatctgtaattgcaaagtaccttttagttggtttctagcaaaaaatgtttgttcacaattcatttgatttgtgcatatgatgagaacatgttagctacttaatcaggttgtagctgttctctatgatccctgagtgatgaggcttaagcaggcttatctcgcaacgcaatgtagttttgtagctttgcatgtacaattgttggattctctgctttttctctaatattgctcttagagaatctatcaaaagttcagactttgaagcctttcttctagcacttgcaatttgatattgagctcgtgtgaattttctagatgttacttgttgacctgtgtttcgattcaatgattttctttgtctgtttttttcttcactgcagcaaccaagtcctgttggatgttcatcgtgcaattcaaagggtcatgtggaatgcaaatggtgtgcgggtacaggattcttcatccttggtgataacatgctttgccaggttccctcaaggaatacttcatgtgtaatctgctctggacaggtttgttatctaataaaaacgaaagtgcagacacattattgtgtcttcttgtttatatatcttcccaagtatgaacaaattcgattctttcaatggttttagggttctgctagctgtagcgattgcaaaggaacggggtttcgtgccaagtggttggaaaaacctccagtgccaacataactgatgaacaaaagcaagttaagctttttggtctttgatgatttcttatggaggaaaaatgtttatatattgattcaagtggaacatgaatcagatatgcatatatctttatacatgtgttaagtatatatatgtaagttcatttattcatttccccttgttctgtctgtacaaccaaaggcctacacaagagttcttgtaatcgacacgtgagttttacgatttcgatcattggagtagctcaacggaagaacattagtagcacagggtcaccttcgtatttcttttgatattttctcgttgtagggttaaatcatgtgcatcttccttacccttgatgaatctggatatggcgtttctctaatagaattgcgattatcatcatcttagatacagtttgtgcctaacaaatccaacctaagctagttacttaatcattttcttttggggaagtgaaaatggcatttgatttcaggataattcttaaccaaagctgctaagtgaagaacttgtgtcagtgtgcattccatttcccaagtgatgaggaaatcttcaaaagtgttcatgtctagagtgtaagagggcactcgaacacagtggttcgccgtttcctccattatatatacctctactttgccccttttagttttacttgtcacaaaactttccagatacatatttactgcacaaaaactaaattattttgagtaaaaattaccaacgcaccagcaggttatttttttttattttttttacggtgtattgaagaaaatttcaaaactacataatcgtaaataagagttttattaaattttacacaattagatgcattttttcatctgatccaactttctatatctcttcttttttgtgaaactgtatttttagaaaaataatgtgtttttgacggaaaatttggtggattgatttgggttaaccccttttgacaccccttagttccactaatagtttttttatcctacacataaatttctataaacttttgtaatcagatatagtcacatacatatggtagtaagaattaactaataggctatatctgaaaatggaaaatggaaaccgtctttttaataatgagctcaacaagaggattttctagatgcttgatataatcgaaatattgaatacacctaatggcttcagaaaatataatattgtttctagttctcataatgtatgttcttggaagcccaaaaagaaaattaaaaaagatcttctccatgatctcctctttaattattgtaaatgaggtattatacgcgcaatgtcattcacgacgcacgcataaccatttgactctttgattgcgttatacttaacattaagctatagttaaatgtttagtttcgagtgttttgattggataattttaatttgcttggttcctgttcggattagtttgtgtgtttttaacctttatagattgtgttatataccttttaatctcttaaataaagcaaacaaaaaacagtaataatacataatggttagttattcgggtaataaacaaaaatatgtgacatttgagtcaataagaaccagccactgcccgcagaccacagcaagtcttttgtttttgtttttttttgggtcaaaaatattagttaagtctattcacgttttatttaagttataaagaacaaataattggaaaaaggtagtgtttcacgagatcgaatattttcttgttttttgtgcaagtctgtaatcagactaaaatatcattaatttcatcgtatgttcttaaagtattaaaatattgatcgtagcatgtggaaaatgttgattattattcttattttaaggtcttcattttttgtagtcttgcgacgacccttgactttaaatcctttataaaggcctcgactaaaatgagatgtaccaacaacacaaaacttgtactcacaactaaaagaagaactcaaacgcaagacagaaagatcaatg

SEQ ID NO: 13437 - DNA, 1872 bp, Unknown
  misc_feature (1)..( 1872): cDNA_ID_3070726_gDNA_ID_2214627_Annot_ID_187852 3000 nt of promoter + ATG
cttattagtactttagtagtatactcattagaagctacctctctccattattacaatatcaatctcaaatgttgttctatataacatgtgtttactatagaatatctttattttgttcaatcagtatataacaattcccttttcgaaattgaagctaaggaggttttatgcgatgagggtgatacttacatgctcaccgaattcactcccactcgttattccgattcggtttttcttcgtgaagcgaggctcttaaagtatctgcaccggtgatcaaagtgaagtgtcttaagttagattaaaattttaatcaataaattgtaaaaatattaaacccaatcaaaaagtgacatgtaagtaaaaagtgtctttaacatatgtttcttctcttttctcctttcacaaatatttcaaatttatattaaaaaaaaatagtataaacactcgttaatataatcgatggaggtgcttttagaagacgtcgaagctatcttcaccaacatgggtctaggaagacctctctcgagagttccttgcctcattgaaagtcaaaaatattatatttttagctatttaagatatttaaatgttaataatgttgtaatacaatatttaagtcgtaaatatttgatagaccacataattatttttgtgcttcaagcctctcaaaactaaggaccggctttcacttggagacaaaaaatcttctgaagttcctttttcttgtatttttttcttccatttctattacttcacatacctaagtgcaaaaattgattgtatcatgaaactatgtatgttcgatataaaaacagaaatcataaattttgttaaatgccaggtaaaaactagcatatgttaatttgtttttgcaatttatcctaccataatactctttttctgtttaaaatttttaatatacttttagccaacgacaaaaccagtttatatgaaagttaagatgacaaaatactaatggtctacatatagcaaatacacaactagttaaattcttctgtaattttgctgtttacaatgacgattacacacattcttaaagctgtgatgacgaatcagagaaagctttaaacagctgtaaagattacacatctcaagttttagttaagtaagttattaacaagaaaaagttttgaaaaaagtaaagacctttaatagttttcttttctcggacaaaacaataaataaaaagaacacactttttttatcttttgtccttaggatttgattgtacatacatctgatctcaagtgatttcaagtggttggttctgttccttttctcgtccccgatcaagtttcttctcctaaactccagaatttggtcttgaagatctctaaaggctcttcctttttgttcatttctctacccagatatgtaagttgctagcttcttctgtcataactttaatatctgaatctttttccgatccaaatagtcaaatattcgcatctaggtcaaatcgattcaaaaccctttttgttgattgatgtgctaagtagttctgagttgattaagtctatcagtttaagagaaaaggattgtgtaagattatgattcgtacaagttagcttctttcttgattaggtccactgtgaatcatgcacacgtttatgaggaagatattagattgtgtaagattctgattggtttgatggtttcaagttagtttctttgttgattattgattgctgagtagttctaagttgattatgtcaactctgaatcatgtacaagtctatgagctagaaaatgaattgtgaattgtggagctaagaatgatgttgttgttttggctgaaagcgatgggtacatacctaagttctccgaaaactgaaaagttatcagaagatg

SEQ ID NO: 13438 - DNA, 3000 bp, Unknown
  misc_feature (1)..( 3000): cDNA_ID_2993328_gDNA_ID_2214627_Annot_ID_187851 3000 nt of promoter + ATG
atgcaccgggaaactgttcccttaactgactcattatgcggctcacataaactctgtaatcttcatcttccaacatatccgtggttaagcagcaatcaaagactgtaatacaaaaacatcaaagttcagcaaccttatagagcaatcttatatttcgtaagcagcttatagagcaatcttttgtatctttctcactaaaatagtctatttctcagagctaagcatggataagacaaggacgaatttgagaagtcatgcaacacagtgaacatacaaaacctgaaaaatctatccatgagctaaatctcaccgatcaagaatcttaagctatcaaatgttagattcagttcaattaacaagcctaacaagaagtacactataaacttaggctaaaattatgatttttaagacctaaaaattcaaactttctaaaatttaatactctaagagcaagggataagacaagcaaaaggatttgagaaatcatgcaacccagtgaccatacaaaagaaactgtttcctgacaattctttgagaatgagacatcttaagctataatagatagactttccaccaatgagcctgagcctgtgctcatggatagttaacagaatccatgaactaaatctcacccatcaagaatcttagtctatcaaatgttagattcagttcaatcaacaagcctaaaaagaactagaaactaaaacaggacactacacttatcaaaatctgatcttaagacctaaaaactcaaactttctaaaaatcaatactccaaagcccaaagaagagcaaggataagaaagcaaaccctaaacccatcacttaaaagaagaaagagcataccgtaaactctctctgagatctcaagcaacccttcaggaggttttctgtgaaagaactttctaaacaacgccattgagaggtttctttaaatgcttaactcaaaaaagcagagaggtcacacaatccctagaaataatcacttatgaccaaatgcgacccacattgcaggaaaaaccccaaataaggagaaaacaaaaacgagaaaaatgtcaggaagaaagaaggaagcgtgagataatcttattgctgggtctttaaggaacaatgcgatgtgggttttgtttcttttgtagtttggtggtttgtcttgacatacacactttcaatttcttccgttttggaattggaaacttagctttcaatcaaaacagatgtttgatagctctgcacatgcgagaaagaagaaagggaatgatgcagagagagaagagagagagtttggttatcttgggaaaagaggaactagggtttttctttgattctaagaccaagaagaagatgatatagctattgagaaattcagacagagattgaggatgatgtcggatttcagatagaagggaaaaaaaagaaaggaggacccaaagatctgttactttgtttaggactatgatacatgtcttccaatattcttttttgagttatttaagatttgctttcttttctttcctaaactcggaatttgcaatttatttccttttgccatgacttcatttaaaaaaattaaataatctttgaatgagtacacacttagatatcatagtttgtttttaagtcattaatgagaaaaatacaatttttgtaattttatatttgttagaaataattttttagctaccgattcaaccgcgaaaggtagattatggttcgttacatatatattgaaccaaatcgacggaatacttggtccgtcgaaaaagttaattggttttaagaatattggggtcacatacaaaataaaactgggatttttggtatatgtataaattcatttttctaatttaatatttacattaaatttagacattttaaatgaaaagtaagctattttttatattttttgaagttcacaaaaaacattttaacgattttgaaaagtagatttcactttaattattttttcgttacactttttaaccaaattacataaaaaaaatgtttcattcatcggccctgatcacttctcaagttttccaatatatgacattattggaggtaacaagatataatacactaatatgactgacaaactgcacaagacattttcttcatgtccctatatatggttagggagaccaaattcacctaaacaatactatagtttacggggtgatgctagacatgtcagtacaatagtctcaatcagtgggaaacgttgcacaaacggatcatgtagctgagtaaatgagttgatgcctcgttagttggtaaactcatgagccattcttgctattagttaaaccaaatcccttgtataaacacgcctctcatagtcatagatgagcttatgtcttgttctagtaaatgttataaagaagataactcaattgataattggttttagcacttggtccttgctctgttgattcgaaatccttattgaaaaaagaagaacaacgtaaattccttgttaaaatttttgaaaatttctattttctttgggccaggagtgatctcaacaaatatatccgaaaatgtaaaggtgtgtatacgtatcaccccaatagctaataggcccaatacggcaatacccaaacgtcaccatcaccaaatagaatgactagattttactttgtttactacgtttattcacgaacaattattttgtcaaaattaaaagcgagacaacgagaaacactcatagttttgcctgacacacacaacaaatgtcagtatccataattacattgtttcaaattttctctaacggttacatcactcgcaacggctacagtaacaaacatttaacgtttctttaccttttcaaaattcttcttttttcacaacaaaacaaaaagtaaataatctaacggctagttttcgaattttcaccactataaaacctcacaagaacctcctcataactcagcaatttccaaaacaacattcctaacactacactccaagcaactagcttctctactactcaatact

SEQ ID NO: 13439 - DNA, 3000 bp, Unknown
  misc_feature (1)..( 3000): cDNA_ID_3030103_gDNA_ID_2214627_Annot_ID_187850 3000 nt of promoter + ATG
ctaaccttggcttaatattttattggatctttcatatttcttgtgttactggcaaaatttgtagtatttcataatcttttctaatttatagatttttgtagatttttattttttagtcaatttgtggcagttctgagaaataataataaattgaatttataacaaaatagtagcaaggagccaaaggacaaagatctcttagctaacaacaacacaacatgtaatcataagaaagaaagctttttgaaacaaaaagctcattctaaaaagcaaactcatcacatggttccaaatcagaaccaagcacatagaccaagaacaagacctaacacaacataacaaccaccaagcctaactgagccgctaatgggagctggagccaaagctggaccatcttcgaattcaaccggagaaggagctggagagatgacactgtgacgaggactgatcacaacaaggctcagcttctgacctttctcacagtgaccattagctccactaatgaagtagaaaggaccagacctgtccaatttcaccttggtttctccatcagtgtagttagccaaagggttcgtggtgttgcagctgttgtaagcttcttttgttacttccaaaacagagtctttaccagattcataccggaaaactgaaaaagacagattgtgtcagaacagaaacaaagtctatgtcagaaacagagtattttttaatggtgggtaccaataaagtcgccgactttgaagcgagctttttgagcccactcagtgaatgagtaagaagaggaaggagggatcttccagtcgccggattttccaccgacggtgacttcatttgcagcggcgagtgagaataagaagattaaagagaagatagcaacgtgaagtgaagaagaagccatagatgccgatagaaacatagtattgagtagtagagaagctagttgcttggagtgtagtgttaggaatgttgttttggaaattgctgagttatgaggaggttcttgtgaggttttatagtggtgaaaattcgaaaactagccgttagattatttactttttgttttgttgtgaaaaaagaagaattttgaaaaggtaaagaaacgttaaatgtttgttactgtagccgttgcgagtgatgtaaccgttagagaaaatttgaaacaatgtaattatggatactgacatttgttgtgtgtgtcaggcaaaactatgagtgtttctcgttgtctcgcttttaattttgacaaaataattgttcgtgaataaacgtagtaaacaaagtaaaatctagtcattctatttggtgatggtgacgtttgggtattgccgtattgggcctattagctattggggtgatacgtatacacacctttacattttcggatatatttgttgagatcactcctggcccaaagaaaatagaaattttcaaaaattttaacaaggaatttacgttgttcttcttttttcaataaggatttcgaatcaacagagcaaggaccaagtgctaaaaccaattatcaattgagttatcttctttataacatttactagaacaagacataagctcatctatgactatgagaggcgtgtttatacaagggatttggtttaactaatagcaagaatggctcatgagtttaccaactaacgaggcatcaactcatttactcagctacatgatccgtttgtgcaacgtttcccactgattgagactattgtactgacatgtctagcatcaccccgtaaactatagtattgtttaggtgaatttggtctccctaaccatatatagggacatgaagaaaatgtcttgtgcagtttgtcagtcatattagtgtattatatcttgttacctccaataatgtcatatattggaaaacttgagaagtgatcagggccgatgaatgaaacattttttttatgtaatttggttaaaaagtgtaacgaaaaaataattaaagtgaaatctacttttcaaaatcgttaaaatgttttttgtgaacttcaaaaaatataaaaaatagcttacttttcatttaaaatgtctaaatttaatgtaaatattaaattagaaaaatgaatttatacatataccaaaaatcccagttttattttgtatgtgaccccaatattcttaaaaccaattaactttttcgacggaccaagtattccgtcgatttggttcaatatatatgtaacgaaccataatctacctttcgcggttgaatcggtagctaaaaaattatttctaacaaatataaaattacaaaaattgtatttttctcattaatgacttaaaaacaaactatgatatctaagtgtgtactcattcaaagattatttaatttttttaaatgaagtcatggcaaaaggaaataaattgcaaattccgagtttaggaaagaaaagaaagcaaatcttaaataactcaaaaaagaatattggaagacatgtatcatagtcctaaacaaagtaacagatctttgggtcctcctttcttttttttcccttctatctgaaatccgacatcatcctcaatctctgtctgaatttctcaatagctatatcatcttcttcttggtcttagaatcaaagaaaaaccctagttcctcttttcccaagataaccaaactctctctcttctctctctgcatcattccctttcttctttctcgcatgtgcagagctatcaaacatctgttttgattgaaagctaagtttccaattccaaaacggaagaaattgaaagtgtgtatgtcaagacaaaccaccaaactacaaaagaaacaaaacccacatcgcattgttccttaaagacccagcaataagattatctcacgcttccttctttcttcctgacatttttctcgtttttgttttctccttatttggggtttttcctgcaatgtgggtcgcatttggtcataagtgattatttctagggattgtgtgacctctctgcttttttgagttaagcatttaaagaaacctctcaatg

SEQ ID NO: 13440 - DNA, 3000 bp, Unknown
  misc_feature (1)..( 3000): cDNA_ID_2702969_gDNA_ID_2214627_Annot_ID_187844 3000 nt of promoter + ATG
ttcttaagcctctgtttccatagtttatatcttaatacgtgttttctctttcttttggagctttgattatctcttttaaactatgttttcgaagatatctttgttttctgccggttttgtaagatcggaaaatatatttttattttataatattaataaaaaagatgacaaaacaaaaaataatgattttctttcaaacttaatgaacataaaaaaaagggaaacgaaatcttattttgcctagctgacataattaactaatgcaactaaatgtaggtaggattaagtaaacaaaaatatgagacaaaattaaacatgccaacctccagggcatagtcaatgggtcaagtcaagcgaaagttggtctggatcttacaatgcaacttaatgtaaagtactcatttttcttcgacatgggacatccgccgaaattgttgatttttgatccatctttacacttgttttctccgattacaacaaaacataacaattcgactacgatttaacacctaacctttttaattttttaggacacgcatttagtatttacgatgcaagccaacaaatttaatccaacgtattaaacacaacttgctttttgtcaatacgtattaaattaaatagttttcttgcaatttttgtttacacatttcattagtattgtttttttccaatatttttgtttctatgttcaatcactatcatatgcataatacacattataattttggcacaattagaattacacacaaggattttataaatgtttttaaaatgatttacaaaagattttataaaaattttacaaaagtttttaaaagatttaataaaagttttaaaacgattttacaaagagttttaaaaacttttaaaggttttaaagaaagtttatgagaatttacaagaattgtaaaagatttataataatttttttagaattagaaaggagaccctcattttccacccaaatcgtcaaccttctcataattgacaagttattacactctctccacttactagttactataaaaccaaaggagaccaaatctcttagcaattatgaatttggtcttcgctataatctcacgttacattaaattggctcctgtgaacctaaatttatggactatgatcccaacaccaatccgttcgaccttcatttctccggtaaacttccggtgagtttttcaatttcttcgaaaatttcacttcaattttcgaggttgtggtgattattcgtggtgttcatatatattttattgcctgatttagaaaagagaagtctcggcttcagcttctaaagttgtagagaagaaatggttagtgaaagatgaggttagttctttcatcgaacactttggtgtgcaatactttgacctcaaaatttttgactatgagtgaatggattaggttgatcaagttctcatatctgatttagacattgaatagtttgtttagatcggtgatgctcaaaagttgaacaaatcaaagctttgtcttacagcttagtttggtaatggtgattttcattttacacagaagagaaatatgctacaagatgaaataaaccgggttaattcggagaacaagaagctaaccgaaatgttagcaagagtctgtgagaagtactatgctcttaataatcttatggaggagttgcagagtcgaaagagtcctgaaagtgttaactttcagaacaaacagctaacggggaaacgaaaacaagaacttgatgagtttgttagctccccaattggactcagtctcggaccaatcgagaacatcaccaacgataaagcgacggtttcaaccgcttactttgctgctgagaagtctgacacaagcttggtaaggagatttctactacaagtatcgttctttgagtgtattgatttgttaacgaatgttttgtggatatacgttacttgtagactgtgaaagatggatatcaatggaggaaatacgggcaaaagattacgagagataatccatctcctagagcttacttcagatgctcgttttcaccgtcttgtctagtcaagaagaaggtactttggtttaaactttgttaaagagttcttcgatatcatcttgctgtctgattaaattccctagttgtgtgtgcgcttgtttaggtgcaacgaagtgcagaagatccatctttcttggtagccacttacgaagggacacataaccacaccggaccacatgcaagtgtgtccaggacagtgaaacttgatctagttcaaggtgggcttgaaccagttgaggaaaagaaagagagagggacgattcaagaggttttggtgcaacaaatggcttcttcgttgaccaaagatcctaagttcactgcagctcttgcgactgctatttccgggagattgatagagcattcaagaacatgaaagttctctagaacatgtatatttctgttttgttctattttgttgctcattcctagtaaaaaggtaaagatttgtttgatcttgattaggaggcatagatgtcaattttaatgtgtgtgtatataattacatcaaatctaagtatccaaaaagggtcacccccattttatcttatgttgaaagagttttgttatagctcggtgtaagtatggtagattgacgctgcttcgacagtttatgtatcttccaatgttatcttgttcagttgtttgtattaacttccattagagaagaatgtgatgccattacagacataaaagaaacagagaaacccggaaacagagtaaaaccacgaaaaacagagtcggtttaagagaaccaaaccaaaataaccggtacagctataaaaagccaagaagaaaaattatgaaccgagtccaaattaggttacggttagcttccaatcccaacttcttcttcttcttcatctgtgtttagtcccaaattgaagaatcaaaagtttcgtgttttgagaatttgacaaaaatttgtttatgtaatcttagttttcgctgattttgagtaagttatcgac

SEQ ID NO: 13441 - DNA, 3000 bp, Unknown
  misc_feature (1)..( 3000): cDNA_ID_4281780_gDNA_ID_2214627_Annot_ID_187840 3000 nt of promoter + ATG
gttaaaaaaagcataacaagatagttaaacaaagaacaaaatcagaagaatcaacaaaaccaatcataaataaaattatagcactcatgcttcttgttaaggaaacaattcaaaatcaatagtaaggcgtcttgtagacatatggtggtggtggagacttgtaagtgactttaggagaaggagagtagtatggaggaggtggggagctgtagacgtatggtggaggtggggacttgtagtaaaccttaggagaaggagagtagtatggtggtggtggagagctgtagacgtatgatggtggtggagacttgtagtaaacctttggagaaggcgagtagtacggtggtggtggggagctgtagacgtatgatggtggtggagacttgtagtaaacctttggagaaggcgagtagtacggtggtggtggggagctgtagacgtatggtggaggtggagacttgtagtaaaccttaggagaaggagagtagtatggtggaggtggggagctgtagacgtatggtggaggtggggacttgtagtaaaccttaggagaaggagagtagtatggtggtggtggagagttgtagacgtatggtggtggtggagacttgtagtaaacctttggagaaggagagtagtatggtggaggtggggagctgtagacgtatggtggaggtggggacttgtagtaaaccttaggagaaggagagtagtatggtggaggtggggagctgtagacgtatggtggaggtggggacttgtagtaaaccttaggagaaggagagtagtatggtggaggtggggagctgtagacgtatggtggaggtggggacttgtagtaaaccttaggagaaggagagtagtatggtggaggtggagagctgtagacgtatggtggaggtggggacttgtagtaaaccttaggagaaggagaatagtatggtggtggtggggagctgtagacgtacggtggaggtggggacttgtagtaaaccttaggagaaggagagtagtatggtggtggtggggagctgtagacgtatggtggtggtggagacttgtagtatacctttggagaaggagaatagtacggtggtggtggggagctgtagacgtatggtggtggtggagacttgtagtatacctttggagaaggagaatagtacggtggtggtggggagctgtagacgtatggtggtggtggagacttgtagtatacctttggagaaggagaatagtacggtgggggtggggaactgtagacgtacggtggtggtggagacttgtagtctacctttggagatggagaatagtacggtgggggcggggagttgtagacgtacggtggtggtggggacttgtagtctacctttggagatggagagtagtacggtggaggtggggagctgtatacatatggtggtggtggagacttgtagtcaacctttggagatggagagtaatacggtggtggtggggagctgtagacgtatggtggtggtggggacttgtagtctacctttggagatggagagtagtacggtggaggtggggagctgtatacatatggtggtggtggagatttgtagtttacctttggcgatggagtgtagtattgtggtggtggggaacttttaacatatggttttggatgtggcgcgtacttagggcctttgtgttcatagctgggagaattgtaacttggggtttgaggagatgagtaagggtatgatgtcaccgtagccgcaatagcacttagaaccacaacataaactatgcagttctctattcccatggttcttgaggatctcattacacctattatgctattttatttctttgttttggttatgttagacttgaacatgaacaccctttatatagtcttgctttgtgttctcaacttgcgttcgtgtgtggcacttctaagtacattagagaacgtgctaagttgtatgtttggaaaagtagtgattcgtgaagaaaattaatttatactagattcttttgcaaccctcaatttttaaggattataagttgaagaattgtatggtacattaatcttaagctggttcttcttttgttaaggcaactggatgtgaatcggtcgtgtgagcaacatttgattcacgaccatgttttttcctcatgggcaaccacgttcatcccaaataaaaaaaaaaaaagaaaaaaaaagcgaagcaactatttacattagagttgcttatgctgtttcttctttacttttgtttttttttattattattggcaataaacattattcatctagtggcctttattaacatcattagacggaacaaaataaatggaaaaatatcaaaaaaatcgttaacttttaaatttgagacggaaaaacatagactttcgaagtatcattaaatttctaaagtttggtttgattttatgaaaaaaatagttaagttttgtttactgtgtcattttaggcatatcgataaatttatgctaacaaaaatatgacggagttaacttttcgtaacgtttgaaaaataaataaaccgttaaagagagaaacaagcacaacatagagttacagaaagtttataaggtatttttctaaatacatataagggattgttctaaaccaaacgttacggaaaattaactcccttatttttttagtcaacaaaaatttaacagtatgcctaaaatgacttagtcaacaaaacttaaccattttattataaaattaaactaaactttgagatttaaatgacatttcgaaagttcatgtattttcgtcataagtttgaaagttacctattttttcgacatcccccctccccatccaaaataacattaacacacatcatgttgttatttaagttaaggcaagaactccctgccgtttaggcccctcgcttctttgggtagaaaagaggcgggaaaaatagataaaccctaaaagagtgagagcaagaagtaaaattgagagagcgagagcgagctagaaacaagatg

SEQ ID NO: 13442 - DNA, 3000 bp, Unknown
  misc_feature (1)..( 3000): cDNA_ID_2685770_gDNA_ID_2214627_Annot_ID_187826 3000 nt of promoter + ATG
cttgtgtattacttttaaagtaagatttttaaaacaaatactttattacttaataggttacattgatagtatgatatgatttataaattaatagggtaattattgaagatttgcttatgcacaattggttactttagttatcatttgatcttccacataagttttagtattatctgcaactcgttacttgaccttaccattttcttaataattaaatgttaataaattcatgtatatctaatatgattattataagatattatgtgccattttagatactatgccaacaatagtaatacaaatgtgtgcatatataaaatctgaaacacaaaagccaataacaaagaaaaacatctaaatatctatccaaaataaatgaaaaacttttcaatctttctattcgtgtttagtctttgcatgtttgaccatgtatccagctctggattcaagatcacgaacgaactcaaatccaataaacttcttcggattggatgttattccaaagatgacatattcggtccaaaaacaataccaataggacaacatgttgaaatcaattttactattaatttttggcatacaacacgttttatgtgtaatttggaacaaggacctaactataaacattatcagaaatttacagcatacaaggtttccggttttatggttgaggaaggcatataggactagagagcaagagaagatggaatctatttagacaaagaaagcggcaaacatattggaaaatcgattaatttgcataaaatgtatgattggttaaattatgtttaacaatctacctaagaacaaaaaatattttatcttatcatcttgaaacaagaaaatttaccattcttcttttccttcttccccttttcttctagtttttatcattcaaaagcaatctcataatatttggttttaatacatttcacaaaccatctctaataacaaaattcaaatttcttgaaatcccaattgtaatcataaaaactagtcacaatggctattacgagaggctatttaaaggacaatttcgattataaatccaaaatgtaattcaaatccgaattgtaatcataagaaatcctaattgtaatcaaaattttatccaaaatctatccgtttcacccaaaatcaaagaaaaaaggatcaaaccatcaaatctaatatgaaataaaatcctaattaaatacaacacaatcaatagaatgaaaccttaaataaaatcctaattaaacacaacacaatcaatagagtgaattaaaatcttaattaaacacaacacaacataatggttggatcgtaaataagtgaaaaccccttgttttatttgtcttttactattttttggagaaaaaaaactagataaacatatttttttttttataatgggagctaaatagagaatgttttaacccgagaggcccgagtagattaaaatccgaattcaaccttttcggccaagaagaagaagaaggaaatggcgatttgcatgtgttgcgattcacatcttgtaaaaaaatcgattatgaatccatggaatttgcggagtagaacgaaactagggtttgtactggtcgtttgccgttttccgactactactactttcaaggcttcggcggtggattcacctgagagttctttaaatttcaccaagcatatggatcaagcttggataatctcacaggttcgtatctttcgagagttgttgagtttgttgaatttgagtaatcacaagaacgttattacaagaacaaaatgtataaacctaatttagtttgtctttctctacttagttgtttattgtactttacaaattgtctattacttttaaaaacaaatactttatttactaataggttacatagatagtatgatatgatttatagaataaccagtttattattgaggatttttttatgcacaattgaatttcttagttatcatttgatctttcacataaggtttaatattatctacaactggttacttgattttatcatttttttcataattcaatattaatagatttatgtatatctaatatgattattataagatattatgccattttacatactatgccaacaatagtaatacaaatgtgtgcatatataaaatctgaaacacaaaagccaataacaaagcaaaaatctaaatatctacccaaaaaaaatgaaaaactgtttagtcttttttattcgtttttagtttttgcatgcttgaccatgtattcggctctggaatcaggatcaccaacgaactcaaattcaataaacttctcaggattggatgttattccaaagatgacaaatttggtccaaaaacaataccaatcggcaaacatgttgaaatcaattttatgattaatttttggcgtacgacgcgttttatgtgtcatttggaacaaggacctaactataaacattatcagaaatttacagcattcaagctttctggttttatggatgaaggaggtatatgggactggagagcaagagaagatggaatctatttagacaaagaaggcggcaaacatattggaaaatcgattaatatgcataaaagtgtatgattggttaaattaaaaatatttaacaatctatgtaagaacaaaaaaaaatgttatattatcatcttaaaactagtaaatttatacatagaaaaaaattattttctcaatcatataagcaaaccaaaaacaaacaagcaatctggattttgttttgactgtaggaagaatccaaggaattgtagaggagataatgagttggtttaaatcattgaatcaatcattttagcaaacaaaaagatccaactttaatgggcccagggtccaataacccaattgggttattcctagacttttctcctcctcctgttgtcttccaatttggtatgcgagaaaaataaaataaaataaaaataagccaaagacaaatttaaacctccgatttcaaccttctcggcgaagaagaagaagaagaagagaaaatg

SEQ ID NO: 13443 - DNA, 3000 bp, Unknown; identical to SEQ ID NO: 13436
  misc_feature (1)..( 3000): cDNA_ID_2702979_gDNA_ID_2214627_Annot_ID_187825 3000 nt of promoter + ATG

SEQ ID NO: 13444 - DNA, 3000 bp, Unknown; identical to SEQ ID NO: 13434
  misc_feature (1)..( 3000): cDNA_ID_2702975_gDNA_ID_2214627_Annot_ID_187822 3000 nt of promoter + ATG

SEQ ID NO: 13445 - DNA, 3000 bp, Unknown
  misc_feature (1)..( 3000): cDNA_ID_3030159_gDNA_ID_2214627_Annot_ID_187821 3000 nt of promoter + ATG
gtggagatgatattactatttgcttcgttaggagagggatacattaacgtttgacgggagtttatttttgaaattcgttattacttattacaactcaaaatgcatactttgtggagatgatattgctatctgtttgtttttaaaaaaatacttttcattaaggttcgaatccatcttaaaacacgcataaaagatcgatccatgtggcaatatcctaaatggttcaaaaaaaacgcatgaagttccttaacagtaaaatttacattttgcaactccttctgtataaaattactaatatttaatcttttttaaatattcgtattgtctacattggagttgaaaataaataaatcaagaaattgttgattaggagaaacttggtctaatcttcgtttaattaacagcagaacaagaacgtctaatctcaccttcttcaccaactctcactcccatcaaactcatcttcaaaaaagactcagtccatctatcgaaaaaactctcctgatcattcgcaagaatctcaacaatcttcctcgtccgatcatcttccatgagagctgaatccgtttgaaacaaacccttgtgagccaacagattcttgtagtactgattatcgaacgtcgacgatgtctctggatcgttatcaaccaccgtggtcgttggatctagtgacgatgaacacttgtttacaagtgtttgcgcataggagttatcgagagacgcgtctattagttctaagttgccttttggatcaagcttaaacctgctgttgaacgtgttacaatgcgcagctccaatagtgtgcgctcctgagacccgtaatagatcgaaaattgaaggtttgttttaaagaaagatctctctttcttgaatatcaagaaagataacgtacctgagaggacaactagatcatgaacagataagcctttagaggaaaagatattgatcatcttatcaactgtgaaatcggtatctatgatgtttggtctgacatttgctgccattgagactctcccgtctctcctccctgtcggtatcggaactaccggtcctccgagctgtcccaaaaatagtattcacaacaacaagaaacagagttttaaaaaccaaaaataaagatacaaacagagcattttatgcaaaagtctggtttaagttattcagatatataaacatttcttatgtatgtgtgttttgatgaagttcttacagcttctactgcatctcttgcggcaagaacaagtatatcagcacaagagactgtgccgggacaaaagatttcgaggatatttttgacgctttctatcacagcgaatcctcctagagacgcattcccagggtcgcttcgctctgtaccgtttcctcgaatcaacactgagccatcacaaccctaagacagcaatgacaagaacaaaaatctcattaaattggaaatgccttgttatgcaaggaagaggcagtcctgtgagaatgtaatgtacctggacgaagcagtcatggaagatgagacgtaggagcttcccaaggactgatggatcagaggaagaagcagatctaacggtgtttctgacgattaactcagctccaggacaagaaccggcgtagaagttgaaagagagctcagctactgaagaagaaagaagcaaaagtagaagaagagaggagaggaatgtatattttggtttgcatgaaaaaaactgcaacgccattttttaatgtgtctgtcagaagatggaaagtgaagttgcttaatcagccgagagagagaagagaagttgtagttgttgtgataaatgaaaactgtaaatgcatgtgcgttcgtgtcagagagagagagagatagtgatggttgagtcaggagaacttaatgacaatctctttactctcttatgcatgcatccatgagatcgagtcatcaattttacaaacaaaacaagaatttgaaagtggtgaatccaatcactgcatgcagtgaattttatgggtaagaaaccctaaaatagtatgaatttctccattattgtgacaaaaatcagaaaacttttttttgtacctttcagatatttctttttgaagatttaaaaaaatcactcatgcttattgaattcatctttctttgacttgttatagtatatgtcacttttgcatacaaaaaaagaagagagaatctataaatagaaaaatgtacaaaaggatctaataatgtgcttcagaaactctttatttgttgatagtttctgttgataagccaattctttgtctttcatgtctcagaaaacctgaaaagtacaagaaatggtggaaatcagtaaaaggtttgtcgtttttagataataaactcgatatagaacaaaaataaacaagcaacggagatatttggattttaaaacctgggggtcgtggctttggactcgaattcaataacctaattaagcaataatcttataatttcgaaggaaacaaaacaagcaaattttttaatgttaggtttaaagctttgtgaaaaaataatagaaaaaatgtactccatctttttctaatcattttaagtttattccactttaattttgtagttttttttttcttttcttctttattgactgatattataaatcacaaagttcaggatgcaatgattaaatttattagattacaatcaatgagtattagtttatagttattaaaaatatttaatataaaaaataaacagtcataaaataatgtttaatttttaatgtgtgtaaaatccaaaacatcaatgcttacggagatttccttaagattaataaagttgatttttatgtaataagaaacaaaatctcattaaactttaaaagtaaaaaaaataaaaatatgaagtgtcacttatggtagtagtatccaaaacaataagttaatggatttgtttctaaagaaaagaaaaacactataaacagaggatcctcaccatcaactttcactaatcatcacaacttcaacttttcaatactcagattaaca

SEQ ID NO: 13446 - DNA, 3000 bp, Unknown; identical to SEQ ID NO: 13433
  misc_feature (1)..( 3000): cDNA_ID_2713737_gDNA_ID_2214627_Annot_ID_187820 3000 nt of promoter + ATG

SEQ ID NO: 13447 - DNA, 3000 bp, Unknown
  misc_feature (1)..( 3000): cDNA_ID_3030165_gDNA_ID_2214627_Annot_ID_187816 3000 nt of promoter + ATG
cgaacaaatgcatgtgcggtcacgagggtagaatggtaattttcaaggaggatggtattggtgctggagaggagaaaatgggagacagagagaaagccaaagaaaatgaagaaacaacgagtcagtgagcttttttgttttcttttcttctctcagtcttgtctttttttttttgttggggaattttccttcgtgttttcacgggaaatgtaaaatttactgagagaaaattttgggttatgattaatgaatgtttgcttgtaatttcctatccccaatggtggaaaactcgtttttagtttttgtaattctcaaaagtgtgataggtaacctttctcatacagctttaataccaatcagtaatagagtaaactaaaacggaataacataatagtacttaaaattcttacaattttatgtcatcactaagatctacaaaaaaatgaatcatagtatcataacactatgtttgcccaaaaaaaaaaaaaaaagtatcataacactattgatcataaattcaaagcttgcaatgtttcgatggaaacgtgattcatcccgtacacaaactgtaattttatatacattttcagaaactaatgtaatgcattaacccttttgtattacgtatatattctcacattttatattttgtaaggagattcgtttagttactttaattatgaattgttataattgtgtctcctccatgtatttgtgttactttcatattttccttgcatttatatattttatttaccataggatagttctgaatttgctatcaacttggatattttaaattaattgagactccatctagttcaccgtcaaattttaactatacttgtttaactatacttgttatataacgagtgaataaactggaaatagtattactattaactatgaacttacattcgtaatattcgaaaatatgtgcgtgagttagtcttgtcacaagaaaaggaatcatattctttttttcattaaacaaaaattggaaacacatattatggtataaatcaaaagataattcgattacttgccccatttgcctgctttactttcaatttgataatatcccatcaacaagagtcttgttacatgaccaaattttcttctgttctcacgttattaagtattttgaagtgaagtgcactccaaacaaacgtctaaaacttaaggtttgtataatcctcaatcaaaaacattttacaacttatttctatttttttatattggggtctttttcccagctactaatatacgatcacttaagtaattttttgtaaaaatcattaaaaatcctaataaactcatttgcgtagttcaattacacacatacatatgtagtaatataaatattattttccgttttaaattatcgtaaatggaatgtcatttagaattttaattttattcaccacaaatgtttttttctgttttaatatatttgtttgttaaaatttatattttcgtcgctaattagtccactgaaattataatccacaggctagataatccactgatttcaacaaaggtgaaaaaattatataactaatatttgtccattagtagtagctaattaattgaaaacgtttgttctctgaatcgaaagagctgcataagagaaaggggacacgtgtcaaaaacagagtttaatatgaaagcgaagacaatgattctgttttgacttatttgtcatttgctgagctgtctttagaggcgccgagtagccgcgtctcccgcaagaaagttccaaagcaatacttcttctttcattgcattcatttccccaactgtctcaaactttgtgccgcataagcaaaaggtacaaataaaataataataaaaataaaggatggcgaaaacaaaattacttgtatcaaacaagaacattttgttaatttttccgagtgaaaacatcacttgatatggatatgcgattttagttgttgtaagtttctctagcataattgataattcctattaacatcaattttgatatagcattaggacttcaatgtttttatttttagggtttgttctttttgacttcattagtctagtggtactttaagaccactttttcacctcacacatggatgatccagacctagtcaagctaggagtgacttttatgtttatataatttatacatgttaaattattttagttttcttttttaaaggagatgaatttaattcggtgtggatcccgtctctagaaaatatagggtctttgggcttgaacttccaaatattcgaataacaaaaaaaattattttagtttttaacccaaaaagaaaacatttgcgatcaaatgttattgtaaacaacgcacactaaaaagacatttacccttttcggtgaagagacacagggacagctacatgcgacccaaaaaatgagcttaccctctatttcacatatgtaagaatatactctaattagactcagcatgtagtataaagaaggtgttgacaaaaaagctcaaataattcgataaactaacaatgcacgggtactaattaacaaggaattctcataaaattgaaggtaaatttaaacaacaataagagcatcccaattaggtaagagatttagttaagtaattgcgatcaaggaaacaagtacaacagaagtggaagtctgtctctatatcactttcttccctgatgcataaacttacctcttgttcacaaactttgttaacattttgataatgcaatgaaatgaaattagaaattcaaaacaaaaatagagaaaagtacaaccagtggactatagtccaattagtcaaccaaagtaacaatgggccgagctgataatatttaggcccaaaaaaagcctctggacgaatcagagacactggaaatgaacgttcttcttcgcactaactctcaaagaagaagaaaagatctgagaggtggtcgaatgatccaagagaagaagaacaatctctcttagatcgtttgatctgatccaatcgaagaagaag

SEQ ID NO: 13448 - DNA, 3000 bp, Unknown
  misc_feature (1)..( 3000): cDNA_ID_2685770_gDNA_ID_2214627_Annot_ID_135977 3000 nt of promoter + ATG
atcattcaaaagcaatctcataatatttggttttaatacatttcacaaaccatctctaataacaaaattcaaatttcttgaaatcccaattgtaatcataaaaactagtcacaatggctattacgagaggctatttaaaggacaatttcgattataaatccaaaatgtaattcaaatccgaattgtaatcataagaaatcctaattgtaatcaaaattttatccaaaatctatccgtttcacccaaaatcaaagaaaaaaggatcaaaccatcaaatctaatatgaaataaaatcctaattaaatacaacacaatcaatagaatgaaaccttaaataaaatcctaattaaacacaacacaatcaatagagtgaattaaaatcttaattaaacacaacacaacataatggttggatcgtaaataagtgaaaaccccttgttttatttgtcttttactattttttggagaaaaaaaactagataaacatatttttttttttataatgggagctaaatagagaatgttttaacccgagaggcccgagtagattaaaatccgaattcaaccttttcggccaagaagaagaagaaggaaatggcgatttgcatgtgttgcgattcacatcttgtaaaaaaatcgattatgaatccatggaatttgcggagtagaacgaaactagggtttgtactggtcgtttgccgttttccgactactactactttcaaggcttcggcggtggattcacctgagagttctttaaatttcaccaagcatatggatcaagcttggataatctcacaggttcgtatctttcgagagttgttgagtttgttgaatttgagtaatcacaagaacgttattacaagaacaaaatgtataaacctaatttagtttgtctttctctacttagttgtttattgtactttacaaattgtctattacttttaaaaacaaatactttatttactaataggttacatagatagtatgatatgatttatagaataaccagtttattattgaggatttttttatgcacaattgaatttcttagttatcatttgatctttcacataaggtttaatattatctacaactggttacttgattttatcatttttttcataattcaatattaatagatttatgtatatctaatatgattattataagatattatgccattttacatactatgccaacaatagtaatacaaatgtgtgcatatataaaatctgaaacacaaaagccaataacaaagcaaaaatctaaatatctacccaaaaaaaatgaaaaactgtttagtcttttttattcgtttttagtttttgcatgcttgaccatgtattcggctctggaatcaggatcaccaacgaactcaaattcaataaacttctcaggattggatgttattccaaagatgacaaatttggtccaaaaacaataccaatcggcaaacatgttgaaatcaattttatgattaatttttggcgtacgacgcgttttatgtgtcatttggaacaaggacctaactataaacattatcagaaatttacagcattcaagctttctggttttatggatgaaggaggtatatgggactggagagcaagagaagatggaatctatttagacaaagaaggcggcaaacatattggaaaatcgattaatatgcataaaagtgtatgattggttaaattaaaaatatttaacaatctatgtaagaacaaaaaaaaatgttatattatcatcttaaaactagtaaatttatacatagaaaaaaattattttctcaatcatataagcaaaccaaaaacaaacaagcaatctggattttgttttgactgtaggaagaatccaaggaattgtagaggagataatgagttggtttaaatcattgaatcaatcattttagcaaacaaaaagatccaactttaatgggcccagggtccaataacccaattgggttattcctagacttttctcctcctcctgttgtcttccaatttggtatgcgagaaaaataaaataaaataaaaataagccaaagacaaatttaaacctccgatttcaaccttctcggcgaagaagaagaagaagaagagaaaatgacgatttgcatgtgttgcgattcacatctcgtagcgaaatcgattctaaatccatggaattctcctaggataacgaagctaggtttcgtaccagtcgttcgccgttttccagctactactaccgtcaaggcttcggcggtggattcacctgagagttcttcaaatttcgccaagcgtatggatcaagcttggattatctcacaggttcgtatctccagagagttgttgatgtgtataattttgttgaatctgagtaatcacaagaactgatccttgatgtagtcatgtacgagtgaagagctatatgcaattttgtatgagattaagaacttggatctgtgatgaaatgttgtaaatttcagattatgaggtgaatagtatcagcaagtttcaaaaggatttgtatcgaaaatctgtaattgcaaagtaccttttagttggtttctagcaaaaaatgtttgttcacaattcatttgatttgtgcatatgatgagaacatgttagctacttaatcaggttgtagctgttctctatgatccctgagtgatgaggcttaagcaggcttatctcgcaacgcaatgtagttttgtagctttgcatgtacaattgttggattctctgctttttctctaatattgctcttagagaatctatcaaaagttcagactttgaagcctttcttctagcacttgcaatttgatattgagctcgtgtgaattttctagatgttacttgttgacctgtgtttcgattcaatgattttctttgtctgtttttttcttcactgcagcaaccaagtcctgttggatgttcatcgtgcaattcaaagggtcatgtggaatgcaaatggtgtgcgggtacaggattcttcatccttggtgataacatg

SEQ ID NO: 13449 - DNA, 3000 bp, Unknown
  misc_feature (1)..( 3000): cDNA_ID_2713706_gDNA_ID_2214627_Annot_ID_135986 3000 nt of promoter + ATG
aaaattatttctatttcaggtgaatcaaaagttatattctgacaacaagactcgaagttatgtgtatacgaaagtaagtatattatcattatatgtatgtctaatatataattacttatccagttatcctatcatattttctaaaagatttttgatgtacaaaatatttctatgcataacaatatatttaatcatacagattggtgaaaaccaatgttataacagcatgtgtccagctgggattataatggtcagttcagatattgctcttggtttggatttaggtcctccttgtgttcgtggttcaagaacaatggtctcttctgaatttggtttactcaaggtttgttggttatcagtttcttcctttctattttatgatattattatcaagaaatagttcattttattgtatttatcatctatagttataattaaacaagtttatgattcaattttattgattttttctgcaaaaaaaaaaaaaaaaaactcaagtccactttttaaaaaaagtttttagcctttcctaggtctgaacaaaatatttgattcaaaaacaaaacagaatagatttcgaatcctaaaaaataccctgttaaatataaatcttaattactcttggtatcgactaagattgtgcatgtatcacccgattatcggatggatacccaaatttatctaaaaaaagaggttcacaccgatttgattcctatcctatcagatattttggatcatttcacataatttcggtagaagaacaggttacaaaatagccaacctgaatcatacccaatgatttttctccctatctacattttctttcttccaaatttatacagcgtatataacactttgttttaattaaatcatcatacaaaatatgttctgtctatcattatattattatgatctgtctttgttttttttgtgacaattgattaaagaataaggaaaatggtgattggtggctcaagttaggaggacaagaaattgggtattggccagcaaaaaaatttaaagagacttcggccaacaatatcgaatggggaggagaagtatatagtgcatttttaccgagtccacagatgaggaatgatcattttccagaaacgcatatagagtatgatgccatcatttttaatataactatagtcgacgaaaatttcaagagtgttgagcggataaagcatagagaggcattttcggataacactcgtggttataaagtatatgatgatatctatgtagaattaccgataagaaatgccatatattatggaggtccagggaatatctaaaaagcgagaaaataaatctgtaaaagttataaacaaattctataaaagcagcttgtaaccaagcatctaaaattcattattcatctttcttctttttcattgtagattatatatatgaacaaaaacaatttactagagaaatgtccgtaagtttgatgagggcatatagctgtagtcttttttactactaataacattttaacttttacaaataaacttgtaaagaaaaatgtcacccaaagaattatgggagaaaaacaaaactatatttgtcacgctcacttagtcactatgtttgttaacattcttctttgaaagtaacgtaatcatgaactcatcttcgataaattatctagaagttctcctaatgatgatagcaaaagacatatttatgaatggataaatggacaagaaaaggaggaccaatgcattccaaaccatggacataatgcacaaggaagctagctatccaacatcatgatgggttaagccgttgcaaggaatgattgtatgcaactttaatgcaatataatcatggaatgatatgacctgatcacatgagctagctggatcttgcgaaatgaacgtgagtgctacattctctcgttgtcaacaagactgccacaaacaaattcggcactggaagcgaaggaaatcttttccatgcaattcaaccgatttggtgtcaaggacactgattggttgtcatggatgaagactacaactcttactaggttctttaaataaatccgatatggttcgaccggaatacaccagttcaaaaacagatatttgactctggaaagtatttcacttgccccttctcgccaagtaaaaaggactagtggatcaggcctagtcaactttcctaacatattatttatactatttgaacatttttgatcctttttctctaaaatttctctatttctgttgtagcacctgaaatgtcacaaaaccaactcgacggatacttgaaacattttgtagacgctaaactcgacgaaaaactcaaaatacaatgaaaacacaaagactttaaaaagtagtaaaacgcaagagtatataaaatttggttattacattaaagaaacataaaagaaattgtgacttcatttgtatttaattataatcatttttaataaaattatagctgtcaaaatatagttatctattttatgtttacggtaatgtattgtaacattcagtatttaaataataaattagaaatttaaaatatatcatatctaaaataattcaactaaattaaaataacaaaatcgttatattcaattataacaggattatagataaataattatatacaaaaacaatgatattatttattcgtaaatatttaatttcatttataagtttcattttattttttaattaaaaaatatatgtttataatggatccgataaggccctaataagttaaaaggctcacccaataatacaaaaggcccataatataaaaaaaaaaaaacagagagagagagagacaaaacactgaaacagtgcagccaaacagaagatgtcgtgaatcgtaattcaggattaggtttactctctcttccaaactccgcccaatctctctccctctctccgccgcgtgcaactgtaacagctaactaacggtactctgtttcttccttactctcatcgtcttcttcgttgtgtgtttctcacttagaag

SEQ ID NO: 13450 - DNA, 3000 bp, Unknown; identical to SEQ ID NO: 13441
  misc_feature (1)..( 3000): cDNA_ID_4281780_gDNA_ID_2214627_Annot_ID_135987 3000 nt of promoter + ATG

SEQ ID NO: 13451 - DNA, 3000 bp, Unknown; identical to SEQ ID NO: 13440
  misc_feature (1)..( 3000): cDNA_ID_2702969_gDNA_ID_2214627_Annot_ID_135991 3000 nt of promoter + ATG

SEQ ID NO: 13452 - DNA, 3000 bp, Unknown
  misc_feature (1)..( 3000): cDNA_ID_2713696_gDNA_ID_2214627_Annot_ID_135992 3000 nt of promoter + ATG
tgcacttcatggtggtctacaatactcaatgagtgcaaacaaagttatttacaatattttaaaccagaggtcaacatgtgagattgaaataatctcaagaggaaagagtttcataaacatagtctaatttgagacacaatctaattttgagcaaaataacgcatcacgacttacgagccactatgtatttttttagctttggtaaaacctagtctaatttgagcataatcaagcttcaatcaaatatattttatgaaatattataactatcatggaaaaagtttgcgtttttctatatattttaaataaatatatatatatatatatatatatatatgtggatcaaaaatctaaacaaatatccgaattttagcagatatgcggacatcaaatatccagtaaatggcatagtggatacagatctgaaaaagtcaatatttgtatggaattgatcaccaataccatataaatcgtagatatccacttcaagtgcaatcttaaaatatttttaaagcttatatacactaattgaaaagtattggctattggaagaaaataagaataacactttcttttgatatgtaaaatttaagactccacctttctgattgaaggaaaaaaaaaactattttgtcaaacctacaatacactattataaaaggacaagaaatagaataaaattttaaattgattgataagttgcatcaatttcctggcgactattttggcgcaattgttttccaaagtattaaatatgaaatatttaaaaaattaaattaattgaaaatttcttagcttgatcgatttatctaattaaaaagcttacaattgttcacacaccgatttaaaataacccagataacgataaaaaaatcaacaatttaaactacgtacctttagagtatgacatcgatgttaccctgggtttcatctgatgacatgggctgtgtttcctttcaaacaaaatatcggaaactacctccttagcgacggtaatgcaatattctttttcaagaggcgtcacaaacttatagagtatttttttgctctagactaatacgtcatctcaattttttttccgagcactgcgactgccctttatgaaacgatgagaactcttcaatatatcctttgacagagaaaaagaagatttgttttagttgttatctatatcgtatagaatgtatttatatgaagaacgataaacaaaaaaaaatacaaaaaggtataaattgtagaaaaggccaattcttctgaaattgaggaaataaatcattttgttatatcgggtataaattttatgctttaaattaaattcttattttttcttggtatttgtttaagatttgaggtgagagttaaatacttacggtttggagttttgggtttcatatttgactatttaaatttaatttttgaatatataaagtattttgttaacatagtataaaacatgacatcttttcttaagagtctctttatataattaagttgtacatctaatatcataaacctacaaattcaaatttagctatttattttcttaaccaataaagaaactttattgccagtctctatatttaaattgattacacatccattgcagtcaacaaattataataggaattagtaatttttgttctttatttgttgaccaacaaaaatgaactattttttagagtgaaatttttaaaaaaatatatattatcaaaatttaaattttgttttcacttctaactaataaaacctcactaggaagaaaactttaatatgatgtttttgttattagtattttagttattcatatgtgtcatataagaatccataatcagtttaaagttttaatttgtatagaaaaagttctggacaatagcacatacattgtttatgccagttaatgactaatgcattagccgttttatagaaattataattaaatttacagttttataagcatccaattttgtcttcatactctatttatgccagcaaattacaacatgcattgggttgtctaaaaaagagataaaacagtattaaatgttagataagcgttaaatttttcttcttaaaaaagacaaaattgtaattaatgttccaactttgtcaagctttaaattttggtttcacttcgtttcttctaactgccaagccaagtagtcaacatagacacctttttttccttgtcaaataataattgtttttaaacagtttatgtatataaatcttaaattctttaacaacaaggaaacaaatcgtaaatgtacttatctcttaaaatttaatttttactttttaattatgtttgtgtccaaaatgaattgtgagtagacccaaatttaaatttgatttacattaaaaagcatctcaaaattcttcattcaactagacattcaaaaataagtatttattaacggaaattcaaatattctcgctttaaaaagtacctataacaaacaaagatagctttgtaaaaaacaaatttagtcataatataaatatatgaattgttagggggactaatacaatactaactacatttctaatgttcgcgccactttttcagatttacacattattatatatatatatatatatatatatatatatattgataaaaattgtcttttacttttttgtatatattatatattgattgtaacaagaaacaaaaagtggcttaaacataatatctaggttaaaatatacccttagttacatttttcatgatacgttttacttactcatcatcaacaacaaagtattgttataaaaaccaaaggaacaactttacattttatattttatttgtcacttttggttttaaaaaactattttttcatatccttattttatatttatatatatatatatatgtaagtgaatttggaggatgaaattcagtttacatgcatatcagaaatttttgttttctttaaatcttcttcataagaaaactgaggaactgtagtttgggctctaattttccataacttttca

SEQ ID NO: 13453 - DNA, 3000 bp, Unknown
  misc_feature (1)..( 3000): cDNA_ID_2713692_gDNA_ID_2214627_Annot_ID_135993 3000 nt of promoter + ATG
tattttatgaaatattgtaataatattgtgaaaattttaatttttctatctagtctaaatattttattttgagtagatcatatatcttaatgaatatccaaattttaacggatatgcagacatcaaatattcagtaatggcataatggatacatataaaaaaagtcaatatccgtatggaacggatcagaaataacatataaattttgaatatccaatccgtgtccacccttacgcttctatacaataatgaaaatattggcaattagaagaaaagaagactaacaatttcttttgatatgtaaaatttaagactccacctacatgatagaaggaaaaaaaccattgtgccaaaaagagaagaagatataaataaattaagttgattgagaagttgtatcaattttctggttattattttggagcaattgttttccaaagtagtgaatatgaaatatctaaaaaatttaaattaatttacaatttgctaccttaatcgatttatctaagtaaaaagcctaaagtaaaaagcctataattgtgaatacaccgattgaaaacaacccagttaaaaataaaataagaaatcagcaattaggactaacctttgattatgacatcgttgttaccccgcatatacgaagatataagatagtaatcatcgcaccatttatgttaacctcggctatgtctcccgtcaaaccagatatcggaaactatctccttaccgatgatagtgtgatattccttttcaagggtagtcatctcaaatcaaatttttagaatagtttttgctctcgactaatacgccatctcaactttctttttgagcattgcaacccttaatgcaccgatgagagaactctttaatagaagatttgacggagaaaaataagacttgcttttagttgttatctatcttatcatataaaatatggttttctgagttactaactcataggattgtgccatgtgtcaattttatccatcttagattttgacacgtgttaaataaaactttatttttattaattttaagactaaaaacgaaatttaagataaaaaaaaaaagaagaaagaaagataagttttagaaattataaatttaaaattaagtgtaaggaaactaaacaatttttaaaatgtaaatatgataattataataaaactaaaaatgtataaataatagaaaatcctaattcttttgatattgaagaaataacccattttggtatatcgggtttaaataaattatgattttttcttgggatttgtttaagattttagattagagttaagtaattatggattaagttttcaggttagagttaagtacttacggtctatagttttgggttccatttagaatattttaattttgtttgttgaaaatataaacttttttgtcaactttagtatgaaatattacatattttcttaagagtctctttatataattgagttgtagttctaaaatcataaactcaaaaaatccaaattaagctatttattttcttaaccaataaagaaatctttattaccagtttttgtatatttaaattgattacacatccattacaatcaacaaattataataggagttagttagaagtgaccagcaaaatgaactattgtttagagtgagaatgaaatatatttttatcaaaatgtaaagtttgttttcacttctaacttataaaagctactaggaaaaaaacatcaataaagaaacttttaatatgacgtttttgtatgtttgttttagtaattcacatgtgtcatgtgaactcataatcagtttcaaagttttaacttgtattatagaaaagtgttggagctggacaaataaatgcattagctgtttttatagaaaatttgtcttcagactgttttttttattcgacagcacttctgactttgtttatgtcagctaatataacatgcactggtcgtttgaaagaaaaaaaacgttacatttcgtcttctttaaaaagataaaattcaattaaatgttcgtattctgagaagcgttaaattttgtcttcacttcttttcttctaactgccaaaagtcacaacatacacgctttatttccttttaaaataataattggtttttcttttcagcaaaaataataaatgttttgtaaagaattttacatatataaatcctaatttctttaacaaaaaggagaaaattataaatatactttttaatctatagaaataatttcctaaaatttaatatttacttgtattatgtttgtgtccaaaataaaatatgagtagacccaaatttgaatttgatttacattgaaagtcttcatttaactagacattaaaataagtatattaacagtatatcaaatatttgcgcttaagaagtatttataacaaacaaatttaggcttgtagaaaacaaatttagtcataaaacaaatatatgatttttttaagaattaatacaatattaactatatttcaaatatttgcgtcactttttcagatttacacattgaatatattttgataataattgttattttattaatgtttacttttttgtataaattatctattagttgtaacaaaataaaaagaaaaggggttttgttattgtttatcatctaaattaggtagattcctttagttagtgtttgtttttatgtcttgttgagcgagtcatcaaggcttcgaacttgtattgtatcagagtcttatcattactctgtggtgcacctcacctcgtaatcatttcccctcatttgattccacacgaaagaagcgaccgccatcgtgttcgatttccaacttaagtatggaacccttgtatccctccaaggccagttagaagaagctagaaagaacctcacaaattctagaaagcatgaatattcactagtccgagaataagtaaccaagcttaacatagcggatatagtaagcaagtgacctatattccactgtccaatcttcagcaatcagagagagaaaagctagtc

SEQ ID NO: 13454 - DNA, 3000 bp, Unknown
  misc_feature (1)..( 3000): cDNA_ID_2993328_gDNA_ID_2214627_Annot_ID_135996 3000 nt of promoter + ATG
cccttaactgactcattatgcggctcacataaactctgtaatcttcatcttccaacatatccgtggttaagcagcaatcaaagactgtaatacaaaaacatcaaagttcagcaaccttatagagcaatcttatatttcgtaagcagcttatagagcaatcttttgtatctttctcactaaaatagtctatttctcagagctaagcatggataagacaaggacgaatttgagaagtcatgcaacacagtgaacatacaaaacctgaaaaatctatccatgagctaaatctcaccgatcaagaatcttaagctatcaaatgttagattcagttcaattaacaagcctaacaagaagtacactataaacttaggctaaaattatgatttttaagacctaaaaattcaaactttctaaaatttaatactctaagagcaagggataagacaagcaaaaggatttgagaaatcatgcaacccagtgaccatacaaaagaaactgtttcctgacaattctttgagaatgagacatcttaagctataatagatagactttccaccaatgagcctgagcctgtgctcatggatagttaacagaatccatgaactaaatctcacccatcaagaatcttagtctatcaaatgttagattcagttcaatcaacaagcctaaaaagaactagaaactaaaacaggacactacacttatcaaaatctgatcttaagacctaaaaactcaaactttctaaaaatcaatactccaaagcccaaagaagagcaaggataagaaagcaaaccctaaacccatcacttaaaagaagaaagagcataccgtaaactctctctgagatctcaagcaacccttcaggaggttttctgtgaaagaactttctaaacaacgccattgagaggtttctttaaatgcttaactcaaaaaagcagagaggtcacacaatccctagaaataatcacttatgaccaaatgcgacccacattgcaggaaaaaccccaaataaggagaaaacaaaaacgagaaaaatgtcaggaagaaagaaggaagcgtgagataatcttattgctgggtctttaaggaacaatgcgatgtgggttttgtttcttttgtagtttggtggtttgtcttgacatacacactttcaatttcttccgttttggaattggaaacttagctttcaatcaaaacagatgtttgatagctctgcacatgcgagaaagaagaaagggaatgatgcagagagagaagagagagagtttggttatcttgggaaaagaggaactagggtttttctttgattctaagaccaagaagaagatgatatagctattgagaaattcagacagagattgaggatgatgtcggatttcagatagaagggaaaaaaaagaaaggaggacccaaagatctgttactttgtttaggactatgatacatgtcttccaatattcttttttgagttatttaagatttgctttcttttctttcctaaactcggaatttgcaatttatttccttttgccatgacttcatttaaaaaaattaaataatctttgaatgagtacacacttagatatcatagtttgtttttaagtcattaatgagaaaaatacaatttttgtaattttatatttgttagaaataattttttagctaccgattcaaccgcgaaaggtagattatggttcgttacatatatattgaaccaaatcgacggaatacttggtccgtcgaaaaagttaattggttttaagaatattggggtcacatacaaaataaaactgggatttttggtatatgtataaattcatttttctaatttaatatttacattaaatttagacattttaaatgaaaagtaagctattttttatattttttgaagttcacaaaaaacattttaacgattttgaaaagtagatttcactttaattattttttcgttacactttttaaccaaattacataaaaaaaatgtttcattcatcggccctgatcacttctcaagttttccaatatatgacattattggaggtaacaagatataatacactaatatgactgacaaactgcacaagacattttcttcatgtccctatatatggttagggagaccaaattcacctaaacaatactatagtttacggggtgatgctagacatgtcagtacaatagtctcaatcagtgggaaacgttgcacaaacggatcatgtagctgagtaaatgagttgatgcctcgttagttggtaaactcatgagccattcttgctattagttaaaccaaatcccttgtataaacacgcctctcatagtcatagatgagcttatgtcttgttctagtaaatgttataaagaagataactcaattgataattggttttagcacttggtccttgctctgttgattcgaaatccttattgaaaaaagaagaacaacgtaaattccttgttaaaatttttgaaaatttctattttctttgggccaggagtgatctcaacaaatatatccgaaaatgtaaaggtgtgtatacgtatcaccccaatagctaataggcccaatacggcaatacccaaacgtcaccatcaccaaatagaatgactagattttactttgtttactacgtttattcacgaacaattattttgtcaaaattaaaagcgagacaacgagaaacactcatagttttgcctgacacacacaacaaatgtcagtatccataattacattgtttcaaattttctctaacggttacatcactcgcaacggctacagtaacaaacatttaacgtttctttaccttttcaaaattcttcttttttcacaacaaaacaaaaagtaaataatctaacggctagttttcgaattttcaccactataaaacctcacaagaacctcctcataactcagcaatttccaaaacaacattcctaacactacactccaagcaactagcttctctactactcaatactatgtttctatcggcatct

SEQ ID NO: 13455 - DNA, 1826 bp, Unknown
  misc_feature (1)..( 1826): cDNA_ID_2993331_gDNA_ID_2214627_Annot_ID_135997 3000 nt of promoter + ATG
cttattagtactttagtagtatactcattagaagctacctctctccattattacaatatcaatctcaaatgttgttctatataacatgtgtttactatagaatatctttattttgttcaatcagtatataacaattcccttttcgaaattgaagctaaggaggttttatgcgatgagggtgatacttacatgctcaccgaattcactcccactcgttattccgattcggtttttcttcgtgaagcgaggctcttaaagtatctgcaccggtgatcaaagtgaagtgtcttaagttagattaaaattttaatcaataaattgtaaaaatattaaacccaatcaaaaagtgacatgtaagtaaaaagtgtctttaacatatgtttcttctcttttctcctttcacaaatatttcaaatttatattaaaaaaaaatagtataaacactcgttaatataatcgatggaggtgcttttagaagacgtcgaagctatcttcaccaacatgggtctaggaagacctctctcgagagttccttgcctcattgaaagtcaaaaatattatatttttagctatttaagatatttaaatgttaataatgttgtaatacaatatttaagtcgtaaatatttgatagaccacataattatttttgtgcttcaagcctctcaaaactaaggaccggctttcacttggagacaaaaaatcttctgaagttcctttttcttgtatttttttcttccatttctattacttcacatacctaagtgcaaaaattgattgtatcatgaaactatgtatgttcgatataaaaacagaaatcataaattttgttaaatgccaggtaaaaactagcatatgttaatttgtttttgcaatttatcctaccataatactctttttctgtttaaaatttttaatatacttttagccaacgacaaaaccagtttatatgaaagttaagatgacaaaatactaatggtctacatatagcaaatacacaactagttaaattcttctgtaattttgctgtttacaatgacgattacacacattcttaaagctgtgatgacgaatcagagaaagctttaaacagctgtaaagattacacatctcaagttttagttaagtaagttattaacaagaaaaagttttgaaaaaagtaaagacctttaatagttttcttttctcggacaaaacaataaataaaaagaacacactttttttatcttttgtccttaggatttgattgtacatacatctgatctcaagtgatttcaagtggttggttctgttccttttctcgtccccgatcaagtttcttctcctaaactccagaatttggtcttgaagatctctaaaggctcttcctttttgttcatttctctacccagatatgtaagttgctagcttcttctgtcataactttaatatctgaatctttttccgatccaaatagtcaaatattcgcatctaggtcaaatcgattcaaaaccctttttgttgattgatgtgctaagtagttctgagttgattaagtctatcagtttaagagaaaaggattgtgtaagattatgattcgtacaagttagcttctttcttgattaggtccactgtgaatcatgcacacgtttatgaggaagatattagattgtgtaagattctgattggtttgatggtttcaagttagtttctttgttgattattgattgctgagtagttctaagttgattatgtcaactctgaatcatgtacaagtctatgagctagaaaatgaattgtgaattgtggagctaagaatgatgttgttgttttggctgaaagcgatg

SEQ ID NO: 13456 - DNA, 3000 bp, Unknown
  misc_feature (1)..( 3000): cDNA_ID_2703017_gDNA_ID_2214628_Annot_ID_135999 3000 nt of promoter + ATG
aacagaaacagtaaaacactcgaccaacacagctctttgcagagcattgggtgaggtcgagtgacaggtcgagtaacagacaaaaaataaaacagggatactcgactgcacagtctgttgccagacaactgggtggtcgagtatcaggtcgtgtaacagtaaagaaatgtagaaattaaacaacagatgacaagatgcagtaaacaacagtagagtaaacaaagaattcaatcagataaagaattcccgaggatggggtaatcgagtagcttcgttttctaagtttacaggtgattgacatgctcaataaattaaccctagacaacaagttcattaaccaaatctaagtgccaccgcaacagagaccctcaagttaacctagtcccagactcaatcaccattgacgagagctacctaacaggcatgacgaatcaacaagttaaagccaaaacgctccctgcaaccaataccttggtacagggtcacgaatctctggaattagtggttcagacatttcatcgaataccttttgggagcataaaatgtctgggctcaaattccagttgatcagaaagcaataggcattaagaacaactaatccagaagggatctatcaatcaatactcaatcacctagcatactcagaattctacactactctaacccatcctcagaaatctattcactactcaaacatcataacagaaagcataaacgttgaacaagttgaaaacatgataacaacagtgtaacaacaggatgataacagaatgaacaacagtaaacgaaatcaagacaaaagctgaatactgaatactgaatagataaagagaaatccggattacaaaaagactagaacacaaggtctgcggaataaaactaggtaaaaacttctttttgcgaaaatgtgaagtacatgctacttatagccaaatatcccgaaaccctaatactcaaaacgacgaagtattgggacggataaagaactgtactcgacccatgtggtcgagtgggaggtcgagtgagtagctggagtcttctttcctttcctgtgctcgagtgtctggttgagtgcggaatgaagaaggctctgaagcttgtcatctagtatgcagtcgagtggtgtgatggtgatactcgacttccaagtagagcaatgaggtcgagtagtggtctggcaatgaaggtgaagacactcgacctcgtggtcgagtgaagtgatcaagtgtttgtcaggagatactcgacttccaggttgattgacgaggtcgagtggttgtctgatgatggaggtgaagacactcgacctcatggtcgagtgatgtgatcgagtgatggagatgagggcactcgacctcgtggtcgagtggtgaagtgaagtggtgatgtcctctactcgacctgggggtcgagtggtctcttgagatcttgaagctcctactcgacctctgggtcgagtggtttatcatgatcagatccgcttcttccagatagctcgtcaacagctccaaatcacctgaaatcaacgcaaatatgcaacatgcatgcaaaactatcctaaacatgcaaagttatgacaaatgatgtgaaatggtataatcagtgatgatatgatgctaaagtgatgacaaatggatgctcaaaacatgcaaaatacacatttatcaactcccccaaacttagtctttgcttgccctcaagcaaacaatcaagaacaagctggaagtaaggtttgaaagcggggattcagagccaaagaaccagatagaccagatgaaatcaatgtccaagttgaaagttctaagctgcaagatcaaattctacttaaagacgttagccatgcctcattatcaatcaatccgactcatatgctcgacccacacatgttttcaaatctaccaatccctttaacattcattagttctggaacgtgaatcaaacaatgcatcatcaatgaactcatttggctaaggtaaaaggtcaagagacaaagatggtcccttacagaataggcttcagtaacaggggatctctcaaaaaatgattaagctttaatagaatgctaaaggtaagtcccaagctatgcatactgagataagatcccatctacacagagtatatcaaatgaagctctaatggtaattgttgattctgtaatcaaacaatgaatttgtactaagggatttagacaaattcactcctctcttagctcacaaataatcaaaggaaaagaactaagttgcttgaacaaaaagctagggtttgctctgtaatagtagtctcttgtattaggttaaaaatggtctcaatggggggtttgacccctctatttatacaatgggtcgaatataccaaaatatgataaacttctaattatcctaggtctaaatcttcattacttctattcttcataagatcctcttctcttaaatggaagttttccctttacacgacctaagaagttggttatggcgatcttgattgtcgacttaagtcttcgggcgagctcatgacttaggcccattaacaggctaaccgggataccccggttcaatcgacttctcgattttattcacattattcctcggtttaaattggtattgtcggaggtgctaattcctgcaccaacaattagtccccccccagtccggagaatccgagttgcctaattcgaaatttccgaacttagaaattgaatatttgatttaaatcttggaagacgtgaattaatcattagatctccgaatcgattcgtatttcgaacgtatttgacacgtgtcaaatcgtcgcatctgtacgcgcgcgtgaagctcaagaaccgaagcgtcccgtaggtttaatgatgacctcgtaggcttgccgcccattcgtctctatttatattcgaccaaaccctcgggaaatcattttctgccgcttgcaagaagaatcaaaggtagctttcgctctctcctctacgaattattttgtattctcgattctttatcgatttttccggca

SEQ ID NO: 13457 - DNA, 3000 bp, Unknown
  misc_feature (1)..( 3000): cDNA_ID_2702994_gDNA_ID_2214628_Annot_ID_136003 3000 nt of promoter + ATG
acattattgattcctggtccacaacaaccaggtaataatatcgatgtctacttagaacctcttattgaggatttgaataatttgtggaagaatggagagttaacatatgatgcttttagtaaaagtacttttactctaaaggcaatgcttctatggactattagtgattttcctgcgtatggaaaccttgctggatgtaaagttaaggggaaaatgggctgtcctttgtgtgggaaaaatacagatagtatgtggttgaagtttagcaggaagcatgtctatatgtgtcatagaaaaggtttggctccaacacacatatatagggaaaagaagacttggtttgatggaaaagttgaacatgggagaaagacaagaattttaactggtcatgaagtttatcaaaatctgaaaaacttcaagaatgattttggaaatgtgaaaaaatctgggatgaagagaaagagaactgtctataaagaaccagtctatgatagtgatgatgtatccagtgaatccgaggaagatgaggaagtagaagtagatgaggatgagttatatagatggaagaaaagatcaatcttctttactttgccttattgggaggtatgattacttgttttcagatttaaatagcttttatatgtttaagtatgatacatcgattacttctaaaatatatgtatgtctatattgtaggatctaccagtaaggcataatttggatgtaatgcatacagaaaagaacgtggctcacagtattgtatccacattgttgcattgtggaaaatctaaggatggtcttaatgcacgtaaggatctgcaacatcttggtctacgacacgctttgcatcctaccacacaaggaaagagaacataccttccagcagcaccttggtccttgtcgaagaatgagaagaagattttctggaagcgactatttgattttaaaggtccagacggatactgctctaacatttctagaggcgtgtcagtaggagagtgtaagatatcaggtctgaaatcacatgattatcatgtcatgatgcagcagcttcttccggttgcacttagaggactgttaccaaaaggtcctagaacagctatactacggctatgcgcattcttcaattatttgtgtcagagagttattgacattgaggttatttcagtattggaaactgaaattgttgaaactctttgtatgtttaagaggtttttccctccaaccttctttgatattatggtacacttgacaattcatctaggaagagaagctagattaggaggaccagttcattttaggtggatgtacccatttgagaggtaaatcttatctctattagtaatttaaacacttatattatctagttattgttttattattgctaatccttacattttcattttacagatacatgaaagttttaaaagattttgtgcgaaacccagcaagactagagggttgtatagctgagtcctatcttgcagaagaatgaatgcagttttgtaatgagtttctgaaaaagacaaccaatgtagaagaaaagctagacaggaatgtagagtatgtgaacagctctatattagaaggccgtccaatatcagcaggaacatcattcacgcttactgaaatggacaaaaatatagcccatctagctgtcattcaaaatacagctgcctttgatcattatgtggagtaagttccttgtgtaattttccatatcaaattacatttatctagctgattctaactcaaggtgtttatgatttggtagtatgcatttacaatatttacaagactcaaatacaagatgcagacgtgatgcttcagttttatggtctatgcatgctaagaattttgctgcttggttaaaaggagaggcaagtaaattatatttgtaatgatgagtctgtttataaatctatacttgactgaatcataattttttattttgcagatatctaattcttctgatgaacatgaagacatagttaaatggctagcatatggtccacgatgtactgctaggtcctatactggttatatagttaatggacaacgttttcacacacgctcacttgaaaggcagagtcaaaatagtggtgtttattatgaggcaacggctatgtgtagatctagtgctaaggatacttcacaagtagttgatttggtatcatattatgggagaatcattgacatcatattgctagactacaatgtgttctatgtgcctatatttagatgtgaatgggcagtaagaggtaatggagttaaagtggaagatgggttcactcttgttaacttgaatcagagccaagtaagctttctaaaggatccatatatcctagcatcacaagcaaagcaagtattttattcaagtgaagaaggatcaaattggtctgttgttatgagaggtgcttcaagaagatatagtaacgatgagtctgaggatggaaatgcagatataattggtccattaccagtagacgttgacatggatactgaaatggatgaagctgaatatgctagatctgattgtgaaggcatatatgtgccaaatgtaacttcttgattcatttatatacggtcttctatatgcttttgtttatggttgatgtgtgatttttatagatcttctatatgcttttgtataattgtcaagttataactaattaattattccttttttgcaggtgaattaaaatggctaaaggaaagaagaagagtggacaaaagagaaagaagaagtctatagatgatgaacctgagtatcttggtattgtggaacctgtagctacagaacagcgtgtagaggatcatcattcagaataaccaccaactgaaaagcaaccagctatagatgaagaacctccaactgaacaccaaccatctatagatactgagagagatgttcccaattcagaagagccagaaggagaggttgaattttctggaggacatgagcagccgcgtaaaagacaaagaggaccaacaaagatg

SEQ ID NO: 13458 - DNA, 3000 bp, Unknown
  misc_feature (1)..( 3000): cDNA_ID_2703011_gDNA_ID_2214628_Annot_ID_136004 3000 nt of promoter + ATG
aagataaaataaatagtgttacttgtaagtgttgaggttaagcattagcttctaatgataccatagctttgagatatttcatggagtgttgcaggatgtttatataaataaagctaatggataatcacctagtgagtgtgaaatggggccgtttctaggagaataaaagagaggctatattctccaaattcactcatgaataacgaggcatgttcaaggccaaaatgaacacaatagagaactaaagttctatgagaaaatgtcgatgtgcgatatatgttgtctcggtttacatcaaaatttgggtggttcaagacatcatgttcacctcctggccgagtaaacccgacatatattaaaaatgattggttcaaagctgaaaaatgttacctttcagatatagttatattttcgcatactctcgaaagtctgtctagtctagtcaaattgtgtctggtctagtcaagtctagtttagtttgttaaagtttgtcgagtctttcatatgtttagtttgtcatttctattcatgtgggggattgttgagctgatttttacaaaagcccaattgggtttagtataatcaaagaatgtgaatatcaaatgggccataatggatttgtttgctcaagatggagctccggtagatgacgggtcgaatttgaaaggagaaaacaagtcactgaaggaattggtctcttctgtttcacgatcccttgagaataggattcatggagagagtggttactccttcacgtcgtccactcctagatttgtggttgactaaatttgatttgttgaaaaacaaatttaaaccttgtaatctaatctctatataaacctacgcttcaagtctttgatagacacagtgaagtatttgatcgttacacacaaatagcaatagcaaaagctccaacaatctctctatgttaaaagtaagtctcgagagtatcgtagtaactatgttcgttagagctgagtttcgaatgatgcgaaatcagtaaatagaggttgtatcctgggatctttgaatcacacagaaatcatcacactacgagtgattcaaagggttaaggaaagagttcattaactcgactcctcccatgttttttccttaatgtttgtagtttcaatttcaattacctttatgtagtgtttacgaattttagctcctacaagaatcaatgtctaagagtgacactaaagtcaatgtagtgtttcttctcgtcacaactgaccaccccttcatagacattccaagcgcagggagcacaagagggttttcaacaagtagtgttttattcttctcaaaagtcgagaatatgcgcaatgctatgacgatgttctctagaaactcgagattcaagtctcctgaaatagagagcggaaacagagagcgaagtgagcaacttggcaatggaatcagggattttggcgacaaagtaaacacaaacagtggaaaatctcttggccttgagggtaagctcttttgcagtttctgtctgatcttcaatctaggaaggagaggaaatacgctgaagcaatgattcaatgtcaccactgaacaggtcaatgacttcatcagatggttttggccaatcaaaaatgcgaattcgacaacattccataataacctcgttgatcaaatggtttggtatcataaaacggtggtaaaggacttgtttggttctagggcatgtacgtcactacaacaaatatggacattgatagcagacgaggatagctcatttaccgtacctgctataaaagatgtgatttttttcggttactttataatagcacctaagaaacgctatgatagaaaaattatggagcggaaaaaaaaagtgacttagtccgccaatacttagtgaattattatttcttctaaaaaaaaaaaaactctcgatacttctctctcgtgaaaacctaagctcaatattctctctctcgtgaaaacctaatttcttcttccaaattctctgtgtgtacaagtgaaatctctatcaaatctccagcattatcgccgttcgtgaaaagccccaatttcgctgttcgtgagaagccctaaatctccatctcagctcaattgaactctcatcgaaggcatgtattctatcctctgtgatttcattctctgtttcatatctctgtgatttcgacctgtttgattgagatttcgacctgtttgattgtgatttcgacctctatgtgtgataatagtttcgactcaaatttagattatgatttcgactgatttgtttcataaacgatttgtttcctaaacgattgtgaaacttatacaaattagggtactgatttggttacagatttgttgcataaacgattcatgtttcaatctgtaacgattcatgtgtaaacttatattgaatgagttttttttttccaagtgctggtgattgcaatgttggggaactgaagcttctcatttctctgtactcacacaacaggttagtatcattcaacaaaattagttgattgcaatgttctgtcctttgagtctgattcgtatatagcttgttaatgttgttgtttatgtgatgagattagtatacttgcttaattatcttaagttatcgtgagattagtttatgtacatggaattgcttatgtgcctgatttggtgtactattgactgatttctaatatgaaaaactcttttaaagttgcttatggtttgaatatttacatggaattgtctgaattgttgcttattgtggattataattggaaaattgtataatctgtatctctattttatctataaagggttaaatttatattataacatataatgttggacaaggcatgggttcatctaaacaggtaaggaattataattatagttaggtttcatatggggtttggatacttagagtttctatttttttctttacttatccattgaagagctgatcctggctatgaaagaggtgcttggaaatttgtacgggatgttgctgcggtgttaggagacatg

SEQ ID NO: 13459 - DNA, 3000 bp, Unknown
  misc_feature (1)..( 3000): cDNA_ID_3030232_gDNA_ID_2214628_Annot_ID_187877 3000 nt of promoter + ATG
tgttgccaatcagactttaacagctaaagttttgaaagccaaagtgtctacaactaaattctctacagctcaaatttttacagttaaagtctttacaaccaaaattaagagtcgttaccaatcggcccctaaattgcttcatgtttggaggtaatattctgttaaggccggtgaatctatcgaaaagattttggttgatgaagctgtacgtattatagttttaacattatattttgtccagccttatagtgtggtcaagcatcattttcacttattaatgattatttttgtcttatagggtaataagatgtatgctgctttgagaagagagcagatcaagaagtttgaaaggtgcttaaccgagggtgtttggaagatcattacgaccatcactttaaatcctacaagtggtcagtatcgtatttctgacttaaaatacaagattggttttgttttcaaaaccattgtctctccatgtgatagcgtctctaatgctttgtttctctcccttgctaagtttgacgtgatcctctctgggtccgctaacgctaatatcttgtacggttatattaaaatttatatattaattttgaccatacatgcattatctcttctatagtctatatattcatagatttattctctttgtctatatagatgtaatggtataggttgttgatcggtctgaaatccaagatcttaacgctaacaacaagtccaccaagaaaatcgatttccatttgagagatcagcagtactaacaatctatattcatattccttcttatttagatgtttattatttatttactatttactaataaatttattcttttcatttaagtgacactcgcttggcatgtacactttgggggaagtatgctgagatcggtgaccaagcttgccagcagttaaccgatggtattgttgtttgcttaatccgatttgcgaagatcaatctctacaacggtaattatattgatatgtactactacatatatgtattgttttttaaaacatgtccttttttatacacagataataggagtgtttccaattcatttgatgtttcacaagtcttcgttgattctacattggacgagttgggtctttttaagcaaaggtaattgtatttctatttcactaaatatattttcttctttataatattaagcacggtatattacctttatatatagcataccaatcgatgggttgactttagaaagttctggatctttccacaagaggctctatgcaccaagaactggggatgacgatggtgattatccaaggcaaataatcaaggaagtccttacagctacttatgtactattcatgaatttattttatctactaaccttttattcttctttttttttttctttttttaacttagtttgtgaaatcctctttatattcatttgaaggtgggtaaatgcaaaacaatttgtactgtttcggccattgatacagattggccgtggtactatttttgttgtcgtgctcacaacaagaaggttgtcaaagaggaagttatcaaactttaagatgtcaagatacctcaaaagccaagattttggtgtgacatatgcaatggttttgcaaaatctgttgttgccaagtgagtcttttgtgaaacctttatattgaatgtattatgaattataattcggtgtttaagagataataatcctatttaactcttaggttttggttacatctccatattatggaacaaactagggaagttagatgcatgttattcgatagtcatgcaatggatattcttggcactactgcccctaaattgcttgatggttcatttgatgaggtatatcgcttttttaaaaataaactctttcattaaaatgactacgttcatgttataatagagtagattttttctgtagatcgaagacccaactgttttgcctgatgtgatcaatggtttgaaagggatgacttttcagtttctattgtgtattcaaaggcaaaacatatttggtggatatgattcattcattgttgccagagtctacaccggtaacattgctgatgaaatcatacaggaagactctgatgcatacgttgatccatcatccatagtttctatcgatcaggtttgtctaataacattaaacaattccaatcatttatatttatattttatggttgtcttattaaaatattttttgtattttcatataaggttcccttatgctcactaatggtgttgatctttctgatgtggatttgtcatcaacctctattccatcatcaaaacgaaaagatttagatgatgttgatggaaatgatcaggcttccacaagtaggaagaagtgttctaagataaccatgcctgaggaaggcttcggtgaatgatgcttaatgactacttcatcttggatcgttttcttcattattatttctttgcttaaagttatcgatgttgttttcattttttaggttttaaactatctttattttatttgttgttttggaattaataaaaaaaatttcatttatatgtcgttttgttaaacaattttattattttagttatatttatgattaagaaacatattcttttatattacaatgttaatcagacggagaactataaacacttttggtcattttaaacaaaaaaaaccaacaaaatcagaattaggaaagattttgtacactaaataatcaatcctattaaatatgattaatcatgagaatcttgaaaaacaaacctattcctattttttcatacattctcctttaaataattacaattttttagtaacaggctaagaaataaatatcaacattattgttctaacctataagaaatcctattggttgtggacaattcgtttcctttttacacatcaactgtccatcattgtatcttttcgtaattatataaaatcaaaaacctcaagcctaaaacaattaggtttaactcttatctttcaaacaaaaaaaaaaacttccttggataaacatg

SEQ ID NO: 13460 - DNA, 3000 bp, Unknown
  misc_feature (1)..( 3000): cDNA_ID_3030224_gDNA_ID_2214628_Annot_ID_187880 3000 nt of promoter + ATG
atctttacatatgtatgtatgtatgtaaccattgattcatgctatgtttattatttatgtatatgaattctgaagaatactatttagaccaacaaggatgataaaaataaaatgattatttgttaaatggatctttcatttttaaaagaaagagaaaaaaaaaaaattatccaaaaaattgtgaaacaaaatatatataaatttgtagagattttttaattattatggaagaagaaaaaaacaagttttctacgcatttgttttaacaaccgtgtatttgagggttttaaaaaaaaggagaaataaagaagaaaaattaaaaatggctttaaaaactttaaaaaaaataaagcataaaaagtttgattggtagaaaaaaaaactgtgaggactttagaatactcttaaagtcctggaagtcatgtgccaatcaccccctttaacctgaatacgccaagcgtttttgtaaggcttaagcgatttcaaaggagtaaatggaagaggattagcgagcatcatttaaaaaaaacaaaattagaaatgaatgtatgagtctaagatgagtgagtagattgaaatgaggggtccgatatttataagaataagtggttaagtaaaaaacaaatacgcaaaagatattattcctgaaaatcaagtttattccatatcacaaaatctcataattataggaaaatgtttagcatttaccgtaaaagtgggtatgtatatatggaatacgtgtggaaaatgtaagataattccaaatgaagatccaaatggaatattagatgtgctataattatggagaagtgatatattcgaatgctggaaacgaagatacgcaataaattaaatgaaattaatacgattcgttgcctgatatatagtcagataatttttttgcatgaaactacaaaatcgtacggctagtaattaatctattcaatggctaggattaaacggagaatccgacttttttaaaaaagaataaaaagaaccgcgttttttttttgggaaatacgaaatcgaaaggctaaaaacaactcaattcaatggccaggattaaaggcgagtacccaaatttttaataccaggtaaaatgatccgcgtgttttctaagtgaaactgcgaaagcgaacgactaaaaacaattcaattgaatggccaagattagaagttatgacccattattttaaaatctgggtcaaaaggatccgcgtgttttgtaagtgaaaccccgaaatcgaacagctaaaaacaattcaattaaatgaccaagattagaagttatgacccattattttaaaatttgggtcaaaaggatccgcgcgtttctaaaaaggtttttttcatgacataaaatttttaaccttatggcaaatttattattttagcgaaattcatgcatactttattaaacgtaattatcaaataatagagtagattataattgaatagtataaacatattttcattttatttttgtttttgtttaactaagctcacagcgacacaattccgaatattagcaattggagaaagaataaaagacacagagcaccatattattcttttagcccaaaaatttccacaagtacaaatccggcaaaaacacatacatagaccaatttttggtttactgacgaaattttcagatcagaaaaccggatttgattcaagtgggtccctaaaccgtcggttttaaacaatattttcaacgatgagctttttcaagtcaaactagcgaaacagctatcagacctagacaaaacattagaaacacaatcatgatgattatcttgatcgtctttagatggactattaggcatagatctaagcattcttggtgaatctaagctttttctcaagatctgtctcatcgcagagatcaaatgtcttgtcagattcgatggtgggcttgaggatttgaacttattacacttgttcatgtgtctcgccatagcttcttcttctgttgttaaaaatctttttgttctcatgactttgtacttcacagcttcagaacaaaatccagagatccatttccctatgtaacgctctcttatcatctctgtgtacgattctgtacactcgtcggttaatccgcaacagtcacacgtcaccgaatctagctcatcgctggatatttgtgtcaccggaaccgttgagataattattacatccggtgttgaaattaacattgttggatcactaagtacactatcagacatggtttcttgatttaaaaccctgttgagaaaatttcgatcaacaatctgattcttacttcaacataagaaactataaagaaaccaagaggagaagttttatcagtagcagaagatgagaagataacgcaataagcttgtgatatatcttctttgttttgtctctgtttctgaaacagagaaatggtttttaaaaagggattcttaaaagaaattggaatacatttttttttttttaacgttcgttttgccactctctgtcttctaaattactttcatctccgagaaaaatttcacaaaacaaaaccattgcaaaaacagagtattaaaaatgctttttatctttggcttttcttgaaaacaaatagaaaaagttaccgtttctatttacttcacggaaaaaacattagaagttcataaaaattcactcgaatctctcgttacttcagaagagagaaaaaaaaaagtattgttttggaaatatatgaggaagagaaaatgagagaagaagtagtgcaggcgaaggagaagcaatgtttggtgttttataagagagacgatagtagtaactagtgacgtggaatattgattttaattttttagttttattttatttattgaacattttatcaaaacgccgcgtattagagaggatgccctagtttaatgtcttggtataaaagcctatattttgcatttttcatccgactctctgcgttaggtttcattttagcggcagacgagagagcaaaagcaaggagaaaccctaacc

SEQ ID NO: 13461 - DNA, 3000 bp, Unknown
  misc_feature (1)..( 3000): cDNA_ID_3030240_gDNA_ID_2214628_Annot_ID_187875 3000 nt of promoter + ATG
gaagagttgaaagaattgtggatcaccattggcagctttgtaccgttgaatacttccaggtcaaagagcaatcagatacgcaaccctgtcatcaggtacttccagcgttctatagccaatgtactctactcccgagagattacagggactgtcactaactctgatatggaaatgatcgcaatggccctcaagggaactctccgccaaactaagaatggcatgtccctccagggtgaaatcaatgactcacctctctctatacttcttctgatccatctgtgtggatacaagagctgggctatcagcaataatcgcaagagagcacgaggcgctctgtgcataggtggcgttgtgacaccgattttgatagcttgtggagtcccaatcctttctgctggactcgagccacgagcaatggatatcgagcacctacgtcactgcgaattcctggagtttgcaatggttgacgatttccacaggttcaggtttgagcactctacagacaggagagctaacatccttctccctagccctgaggttacaaggataatagagggagataacattgattttaggcctgaggttggacgcctctactatgagaacgctccgccattggatgaggacgatcttcttgaagaagccgcttcggatgggatggatgaagatagggcagtggcgttcgacactagcatgtatcactttggtgaacatgtacctccagcgaggcagagcaagagcttgactgaagctcataaaaataacagtaaactgtagaagtggtgcaagaagcaggacaagctgctcgccaagtgtttcaagactatcaagcttctgacagataagctgagttgttcctcctccaccactgctattccacagggacagcctcctctggagatgccatcaaggagatttgatgagcctgagcacaggcctgagcttagcgagcagagagtatcacatgtcctggctaggcattcgtcgttcgaatcccgggagcacaagagaagaaggaaggctacactcactcgatctagcagcagatcacgcctcattcacttgagaaggtcactcgaccgcggtgctggccgcagcagaaggagagaggtcgagtttcctcagagcggtgctggccgccagagagctgatgaggtcgagtacccacttcctggagctgatacagaacaaggtggttcgtctatggcctgggagcaatcacaggcagccattgacgagcaactacgttcattcttcaactgaggtaagcgcctcacttcaccattgtattatatcatctgttgtgatttgtttcttcattttttgtttctatgattggatttgtcctgagtactctcttccaagtttattcgcacagtggactgtgtgatttaagtttgggggagggctcagaaagtgtgtgttgcattgtatatatttttgagtctgcattcatctaaggcatagaaaaaccaaaaaattttgaaaattttcagaaaatgatttcacaaaaaaagagtgttcatgtagttgcattacatttaggatcgagtctagagtgtttcatttaggattgttgcatatgcataggggatgatgatgagatagccttgtaagcattttgatttacctgataaactcagtgccctcgttgctagttgtctgttgcgtagtcaatgaatttgaaataacactgaaccatgcctagattgctctactcgaccacactgtcatgatctgataccattccctatcaatttgaacctgaatctgatctttaattatcatgtctgcatcagatttgaactcatggttaccctaaaatacttggattttcttatttattttgatcactcttgttaatccaagtagctgactctccttattagagcagttaacccaaacccaaacctagactttctttcaagccctatatcacttgtgagtgtttgtgaggtcttattccgattaagcttggtaaaaagtgttaggttcgtaatgacagagatagtgtttcatgtagttctagttcgcattttcggactagataggactaggtggacgcttatactttgggttgggatgtgtttaaaagaaaaaaaaaagagggggttgattcattgataagaaaagaaaaaagactctaggtgaagtaagctaaagaagcagaaaaagtctagtaaaggttttgggatttgtaaagaaaagaaagagttcttgttagctattggagatgggcaaaagcccttggttttgaaatgttaaaaacaggaaccttagttgttaaagaaatccaaatccgctagatgtaacaaagtgttgagaaagcttctcctagagttaagagaaaaggaaagaatgattagaacaagggtttaaaagattcatgaatgcaaagggtagagttaagttcttatattgagatgggagatgggattactgttggtgcaggaattaacacctccgacaataccaatttaaaccaaggaataatgtgaataaaatcgagaagtcgattgaaccggggtatcccggttagcctgttaatgggcctaagtcatgagctcgcccgaagacttaagtcgacaatcaagatcgccataaccaacttcttaggtcgtgtaaagagaaaacttccatttaagagaagaggatcttatgaagaatagaagtaatgaagatttagacctaggataattagaagtttatcatattttggtatattcgacccattgtataaatagaggggtcaaccccccccccccccattgagaccatctttaacctaatacaagagactactattacagagcaaaccctagctttttgttcaagcaacatagttattttcctttgattatttgtgagctaagagaggagtgaatttgtttaaatctcttagtacaaattcattgtttgattacagaatcaacaattggcgcgccaggtaggggaatataaacaaattttctctacgctcctttaatcaaagcaagcatg

SEQ ID NO: 13462 - DNA, 3000 bp, Unknown
  misc_feature (1)..( 3000): cDNA_ID_2713744_gDNA_ID_2214628_Annot_ID_136011 3000 nt of promoter + ATG
tgtgtgtagctttgtttggggattctgagcagtctaaggagatgtgtcatggctggaggcaatgctactgatagccctagtgatctctgaaccatccataccaaattccatctccaaatcacaaatgttaagagagatctttcctctcttcacatcaatcctagcaccagctgtagttaggaaagctcgcccaaggataagaggatctttaggttcctttccataatccaagaccacaaaatcagcagggattaaggaattaccaaccttaacaggaacatcctcaaggattccttcagggatttgtttggaacaatccgcgaagacgagagtgattctagtcggcgtgtagttagtcatgcctaatctttcagcagtggtctgatcaggagtgatagtgcaacgtccactctctgtgccttctctttcttggcctttggtagcatctttttttattttttcttatttatttttttttaattttaaatttccattaaaaagttacatggcaacagcccaacaaggcacacatgcacaaaagaaaaagaaaaataaaaaaggaaagaaaacttacaagcccaaaggccaacaaagcacacaggcccaaaaacaaagaaaggaggaagcctagaacagaaagcagcggatggcttgagaccgaagaaaaagcacctgaaacagagaacgaagaagaagaaccaaaacagagaagcggtgactaatcaactttggaacacagcaaaccaagtcatcagaagcgagtcacccacaagaccctgacccatcctcctagaaagtggatcaagacgggcccttacaatgagctggatttccttaatgagctgagtatgattcaaaaatgaggatgtgtgaatccgagagttgcgctccctcaacaacagataaatggaagcctaaaagaggagcttgattataagtgataggttctttgacgtcgaagccgtcttcaaccagaggagagaagccatgaaggacgttggaggagatagtccaacacacctagtgaaataagtccagacagcgctgctatacgggtagttgaagaagaggtgttctctagactcatcccctgagttacagagcacacacactgcaggaatagagaaaccccaacttttcagcctatcccttgtatgcaaacggttccaagccacaacccaagagatgaaagcatgcttggggacccgatccttgaaccaaattgatctatgccaattaacctggacacccggagggtgaagagccatccaagtctttgaagcagagaacgagtttgaaggagcatgagcatcgacttttcacagataaacatcatctttagtacactcagccatactccccacaaccggtaagcagggctttaaaagaagaatggaggggttacgactcctactagcagacagccatcaaacaccacctcttaagccatcttttacctccgtattcagaggcaaaccaactaagataggtccagtaggccccgtcagattaatgagaagaccaagactcgttcaattgtcttgccagaaacttgcagtttcacctgaaccaacatcacacatcaagaagggtctcgctaaaggtggtatcttacaaagcttcctccaaatctaactaccagaggaagacggattcaaatcccaaaagcatttgtgtctaatgagattaattctgacccacgaaacccacaaggaccctgcagctgtaaacaataaccaaatgagtttgagagccataaccttgttccaatctatcaaacgtcgaagacccaacccgccacactccttaggggaacaaactgtttcccaagcaatttttgctcctcaaacggagtttggagctgctttccataaaaaagcattacacatctcctctagctttgtgagacattgggtaggcagcaggaagatcgaaacccaaaagttaattgttgaataaattacagacttgagtaactgtaatctgcccgtaaaggaaagatgcctagtagttcaagtagagaacttaaatttgatcctatccaaaagaggctgataatcatgttttttttcatcttttgggccattaggggcactcctaaatatctgactgggagggctccttgtttcatccgaaaggtagccgctaaagaagaagacctggcatagtctcctccatctagcataagagcggttttggacttgttaatgcctagtccagacccaagcttaaacgcctccagaatgttgagaatccctgcaactgggctcatggacccatcaaagaaaaccaaaacgtcgtctacaaaactgagatgagtaataaagggagccacacacctggggtgaagattgaataggccattgatagcacccctatccagtaatttagcaagaatatccattacaagcacgaacaggtgagatgacattgtgatctccctgtctaataacctttttactacaagaaaacagacaaataacgactacaaaaagcgacaacagatgtcgtcgtcatttttggcgactacttgacgacagtgttacgacaactatacgacaacctgaacattagtagtcaaatagtcgttattttacgactaacttcgttagtcggcaactactcgtctattaacgactatttaactattatattattgaagggagacgtttgtcgttacatagtcgccaatgcacgactacaatttccgactacgatagttagtcgcctgattggcgactaaaataatacacatttctgcaatcgtaaaatagtcgcaacttagtcgcagagtagtcgacttaagcagttggaaaacgttttcgcattgccaagtaggtacacctaatttgtttgttgtagtcgtaaattagtcataaaaattcgtatatataatcaaaattcaggacactcttctttcaccaagaaatcaaaacaacaatcaaaaggaaaaaaaaaacgattgaaacgaaaaaaaatagaaatttagtttattctata

SEQ ID NO: 13463 - DNA, 3000 bp, Unknown
  misc_feature (1)..( 3000): cDNA_ID_2703045_gDNA_ID_2214629_Annot_ID_136013 3000 nt of promoter + ATG
tttgcaatttaagaaataatgtggagaaaaatcaggctttcaagtagaaaattaaactataacgactttgtgaacatgacatgtgatgtggtacccctcaaatataaatgtgtataagcccaaaactacatatgttgggtaaattgatccaaagagactaacaaatacatgcaaaaggtatacaatttctcagtattaattccttataggcttatactaataaagacatgaatcgaattttttttttagtaaaaaatctgaaatgtaaaagaatagaaagaaactaatccttttaaaattaactttttgctatatggattaaaaatccacagaacttatgtgatcctggattaggtaaataatttgcatacgattgacatggtggtatagaaaataataaataaaaacataagaaaatgaaagagtaagataatgaaaaataggtgagcgacttgaaaaaatgatgagagaaaagaggtcgctaagcataatagtaccaaacacggacgattcatggaaactcgcgtcacatgttgttggcttattagttgggacaacgacaccaatccccaacactctccatttatgccttcttttatattattctctttcaataacaattatattttgttaatcctagttattatgtttgataaataacacttctactttgtttaataaaggattcaccaaatatcaattgagtttccgacttaggtttttgaaatttcatacgctgatcaggatctcaaacttctgtttgttgtgtagatcttttctagtaagcgttttgagacctaaattgtctcaaattgtgactatcaacattgatatttttctaagtgattattacgatttgtctataaaattttgattttgttgattggacacaattcttattgtgttttaatgcatataaatatggctactttggttgagaggcaacttatatgatcatgccgtaaacctatttatacaccaaattattttgatgaagataattttgttctagaacatgatcaatccattgaacagattaaacgtatagttgaaattgaaagacaaaccaattcactttcgattaaccatttttaacatattccgtggtctgatcttgttctcgaacaaagtcatcttctttggacttatttgaggttttgggtctgatcgttcacgtagcctttgcaccaaagtagtcatatttatctgtagtagaacaccaagatctgtttgtttttggcttgtgtttaaaaatcagctttcgattaaataaattacttttttaagagaaagcaggttacagtgggtgatgtcgtgcgtataagctatgacgaagtgtaccaaattctatttaaagtcgttggaacaaacaattatgtgatggtaagtaaggtgacatcgtcacccgtaacgcccacacacacgtacgcattatccactaatgctagtgttttttttgtacatgatctaattgtaaaccaacattgaatgatagacaaatataaatgagggcaggtgtttatccattcacatagatatgcgttacaatatcatccagtctacgtgtagaaaaactagaaattttatcacttctatcaaatttaataatgtttttgaaaataatttgtttacaaataatggatcggtgatcaataattgtggttgttgaaatataaggatggtcgaagttaccttcattcattgtcctgtacagttttcatccttaaacataatcattccccatgatccaaatgttatacttgtatgggacacaaaacctgaatttgtacgaacatgataagaatatatctacataccaaaggttgattaagtatctcatataatcttttttttcatatatatatatatcttatcatgattggattcatatagtttaccatcacataagcaaattttaattattatagagattttgaatgtatgttgtgacttgtgagcgaagcgaactaaaccgtaaccagattaaaccactatatttttagaaaatagtactaatcgccacggaccaaatttatatttatgtagaaacggttgtaattagtccgcgccatttttttttccgatctgcagtactattagaatgctactatatactatgcaagccgcaaacggatttattcgctataacgaccacgaccatatgagatgtgataaaatcatgaagtactgtagaaaaatcatgtagagatttttcttttaaaattacaacgtagttgagtggttctgtggtcgatatagtcaagtactcaagtcacattagcctattttgagttcgaaattagaatgtggctaaaccacaagaccgataactccaaaattacaatcaaaatcaaagctcgtaagtcgtagttaccaccaccaatccattgtcaccgtctcatcaatatacgtagctttctctaccattaaaaccaccacgtgtctcattctgtcctaccaaagtaccaataaaatcattaggtccaccgtaacaaataactctgagaaacacttgataactccacccaccttcttctcctctcctttattaacttgcttcttctctcggctactactatacccgcgtcttcatcactctacaaaaacttaatcaaactgattaacactaatcctttctcttaatcttcttctcccccgccattcttcttaaatccgagaccaagaagacgacgacgatgatgcaattgcaatgcgtatacgcctgaccaaaataaaaagcggtaatcaaatccaaatccaaccactaaagcaatacatttctcaacaaaatcatagcaaaagcgaaagagaaagcgaaagcaatccatttgcaaaatctgtgtaggtgtgataaaatgcagtaacacaaaacggtgaagcaacaggtgaatcagaaactgaagcaaaaggatgctttactgtttctacaagcctattcttaataaatagatcatatcgatctctcaatcagattagattatggaaattgcagcgaaaatg

SEQ ID NO: 13464 - DNA, 3000 bp, Unknown
  misc_feature (1)..( 3000): cDNA_ID_2703042_gDNA_ID_2214629_Annot_ID_136014 3000 nt of promoter + ATG
agaaaagtagcaaaacattgtgaatcatcggagagagtgggaaacatggagaaaaacaagagagctatcggatttttacttctggtcgtacttatcaatggagttatgatgacgagatcaaatgggtatgaaggagaagaagagtggggaggagcaggaggaggagagtggggaggagcagaaggaggaggagcatggggaggaggaggtggaggaggaggagcatggggaggagaaggagaaggaggaggagagtggggaggaggaggagaaggaggtggtggaggaagaagaggatggttcatgatgagagagtcgaggcaagtgatcaaatcagaaggtggagagatgagagttgtgttatcaccaagaggaaggatcattgagaagccaatgcacattgggtttctaacaatggaacctaagaccctctttgtccctcagtatcttgactcaagccttctcatctttattcgtcaaggtatctctcgctctctctcaacatgtgtgtatctctttctttcaacatgtgtcactctcactctctatacatgtgtttacttgcaggtgaagcaacccttggagtgatatgcaaagacgaattcggagagaggaaactgaaagcaggagacatctactggattccggctggttctgtcttttatttacataacacaggcctaggtcaacgccttcatgtcatttgcagcattgatccaacgcagagtctcggcttcgaaaccttccaagtacttagcactaatcacagttgcattgattaataaaattttgcatttggctaacttgttacttctgtgtagcctttctatataggtggagggccttcgtctgttctagctggatttgatcctcacactttaacttcagcattcaacgtgggtacatttgagcctaaatgattatttcattcatttcaatcacacacaaaaagggtggtttgacactttgacataatttataaatatattaaattttcttatcccaagctagtcttttttctatgaagcacaaaaatcaattctatatcttaaaacggagaaagtattaattaggactttgcaactgtcgatatattctcatatcgcttctatgcttatattataggtttccctacctgagctgcaacaaatgatgatgagtcaattccgtggcccgattgtatacgtcaccgaagggccacaaccacaaccacaatcgacggtatggacccaatttttggggttgagaggggaagagaaacataagcaactcaagaaactcttggagactaaacaaggatcccctcaagatcaacaatacagttcagggtggtcttggaggaatattgtaagatcgattttggatctaacagaagaaaagaataaagggtcaggatcttctgaatgtgaggactcgtacaacatttatgataagaaagataaaccaagttttgataacaaatatggatggagtatagctcttgattatgacgattacaagcctcttaaacactcggggatcggagtatacctcgtaaatctcaccgcggtatgattactactctaaaattagatcaatattcaatagtcaagtatattagcaacttctagcaaattttctatctatgggagtagaatttgttagttacatagttctgtacgtaattcttggataaactagacctactaaaaattattgttttggtatagggtaaaccaatttaagtctagattggattggtttaggaaaaaaacaattcttaaaccgtatttaatttgaaatttcaacaattgtcagggagcaatgatggctccacacatgaacccaacagcaacagaatatggtatagttttagctggctctggagagatccaagttgtatttcctaatggaacttctgctatgaacacaagagtctccgtaggagatgtcttctggatccctagatacttcgcgttttgccagatcgcatctcggaccggaccattcgagtttgtaggattcaccacatcagctcacaagaatagacctcagttcctagttggatcaaactcactactcaggactttgaatctgacgtcattgtccatagcgtttggagtcgatgaagagacaatgaggcggttcattgaggcgcagagagaggctgttattctccctacgccagcggcagctcccccgcatgttggtgaaatggttagcgaccgctttgtttgaggaatgtgtgaaagggtttctttttgtatgttatgtatgtagttaaacatgagtatgtatggatgtatgtttttgtttctttgaaataacattaataaaggtgatcactaaagcatgttatgtatgtagttataactatgagtatgtatggatgtatgcttttgtttctttgaaataagattaataaaggtgaccactaaagcatgttatgtgagaaagtttgattacaaataatgggcctgttaccaacactgctactttttctataaagcccatagtttatgttagtaataaagaatctgatccacataatgggcttgttagttgccgaggcccaattagaaaaaaactcatctctctctattttggttctctctgtcgccgagcttctcctagccgtcaccacctccggcgaagccggctgctgattctctaaaccacatcgctgagaatttaatccatctcactccactcttctatcactctgatttgaggaagccaacttcgaatccttcaaagcaaaaactttctcaaaccagcaccatagaggtttctcaggtaaaggtttgatattcaattattcatcctttatctccgatatggattacgattgtatgtaaatgtctacgagtattcaattctcaaagtattttgttatttcgtagttttgctcaccacttgttcgacgaaatgctccttagtgaattcttttggctaaatgttcgattttgtagcagattatataaaaaagctcgagtcttgagatgatttagccaaactatg

SEQ ID NO: 13465 - DNA, 3000 bp, Unknown
  misc_feature (1)..( 3000): cDNA_ID_2703035_gDNA_ID_2214629_Annot_ID_136016 3000 nt of promoter + ATG
tgtgaatgaataaaagaaaccaaaagacctttcctgacaaagaaaaagaaaagaaaagagggagagctttcgttagtacctcaaaaatcaaagaagcccttttttccttacttaatgtgtccaaagagctgaccaatttccaccaaacttatcctaaatatgtcccccaattgagtaatttagtttctactataatatgatcgagctaattaactcatataactcttagaaagttgaataaattgatatggttgagagaaagttgaaagatagcgttgtcttgattgtggcaggagagacagaaatatgacatagcacacccaataactcttttagaaacaaactggcttgctcgaccactgactacgtgtcgttcttttgcttctcggacgacaagtagttgtaacgtgcatttttcttctgtagttgacgtctaagttttattcatttttctataaatgaagaattttgagtttaaattcagattgtttttcaaatcttgtgaaaatatcatacatttttttttgataacgatttttaaccactatttaccactataagttagtatttttattccatagttgacatgttaatttttaatttatttcagtgaagtattttattttatattaattttcaatttatttcagtgaagtattttcttttatattaatgacagtccatacgttataattcgtaccgctgggaagtagcagcctatatgtgaaaattaaactattttgcctgtcaaaaacgatatatatggctgtattttcatagaagtatcgaaactatattatatattaagaaaaaaaaaggagaagaaagagcttagaagaataattagtacaactaactaaattattgtcatagatattaagggacgagtcatctataatcatgtatttctaaacaaggctttaaagagaatgtagccacgctttacaaagtcagataattagttataaattgtattctaaagctaagactaaactgaatatatatttcgtatttgtcctaaatgcatcaattaatatgtcatgtcgtaaagaaaaacgttgaaacaagtggggatacgtccataattctcatactaaacaaagacaataagactttataattatgccaaaattctttctttcattttcttttgtcaggttcggccaaaattcgttaatgttcggtcttcttttctcttaattataaagaagaaaaaaggtttataaagactccattgttttggatatatcctagtaccatttcatagaaatcgttatttcaaaagagaaaagtcttacacagttatactcaagaatttaagaataaaaaaaacaaaaaacaaataagaagacatttatattaccaaaattaggcaaccatttggattccactaatttccttaacattatattactgcatgattattttttttaccttttattgatatatgtggtttttaaggaattctacagattgtatttcggtttgtttctatcagtttttgagtattttagtatatatctatgaatattttgtaaattttaggtatttttgacaaaagagtcgaaattagaggtaaaacaaaacaaaacaaatggaaaacataatttacaatcaagatgatttaacgggaaaagttcaaaacttcaagcaaacgtcatttcgagcagaagtctttctcatatcggaaaacacgacggcaaaatgaagatctaggtaaaaagaaactaaagaaatctgagtgaagactaatgtaaataccactgaaagatcactatcagaacactaaaaccaaaatgtacataagttatccttcggttaagcgaccagttggaggagaaaccagaggagtgacggtgttggcaacgaatagtgcgacactcaaagatgttccaagttttttgtggttgtagtgcagttgaatggttcgtttccatcaatttttagccgattaagtcctcttatatctattaacgggagtccaatctcgatcatcatctacaaaaacatgcgaatatgtcaatcttgatcatgattaatcgattttgttatattcttcatattaaatgtcatcaatgatatatcaaacataaccaacttgatctctagatgctgaaaatttctattaaagaggtttgatgaaattacataattaaccaatatttattagcatttcttctttagccgttgagagttttcgtaaacatgattatgacgaacattttgttgttacaatcttgaagccattctgaccgtgccgacattttgacaaagaacctaactcgattcgctttcatagttgaactatccatcttacacttaacgggagtctagtagcataaccaacatttctccacgatgaaataaattcaattcccaacacttgtcatcacaataaggattctattctcttagagatcatttaatagtgccgaaattagcttggcattcacatcaaaatcaatttaactcgttaataccttcgagcaatttagtttctttttaaatatcaaagatagtaacgcgtttgtacttcttcacacatattttctataaaattaatatttgcatataagggagatgtgtgagaacggggaacggattactcctttttaagactactttaaggataaattggaaatcaaatataaaaaaagtttagcttaagtgcgaatgtggaaataattaattgagccgccaaagtcaatcaaccgttgaaacaaaaaagctcaagaggaatttagtagtagtcaccgtaaagatataaaattattccgaataaaaacaatgacatcataactcaatatttatatcgtcacgtaatcattctctttagtatgtctctctctatatatacactcacaatcctccttaccataaatcacttcactctacaaaacacactttggttcatcaattgtttcaaaagaaactcaactaactgactcaaaagaaaatcaaataagcccccaaaatattttgagaatcatgctaaagatg

SEQ ID NO: 13466 - DNA, 3000 bp, Unknown
  misc_feature (1)..( 3000): cDNA_ID_2703032_gDNA_ID_2214629_Annot_ID_187912 3000 nt of promoter + ATG
caaggtgtctacattgctttcttttaagatctccagatattttaatgatacaaacaagtagctttgtttataactattccttgcatgattggtaattttagctaggaatcaaatcactaacgatacaattatcataatttataaattatatgttttgataaatgattaagctagtctgttactatttgattaatccttttatactatctctatttagtgatttttctctcttttatcaacacataaataaaaatgtgacatatgaacgaatagagacacaagtctcccacattaaacttctatgcattgatgatcctcatacggttggctatgtcgtggtactataataagtatcgagccactaaagatcaattgattgcacatcatatttcatagatgaattaagcaaaactatcaaaatagtcgattatggtttctcaatcattaatcaatataaagaaaactaagtgaacaaacgaccatgcaagaaaaacaaataagcaataggcaaacaactatatgacatcaactattgattaagctcgggttaaagtgtttctcgttgtagcatttttagtattcaatttatcctaggttctagagctagaaaatcatccaaatgaaataatatattttttatgcatctttgtacattgttgttcaagtttgagatccatatattattttcaagaataaaaaacttggagtttaaagtgtacatgtaatttttactctacataatgtaaagtaacgttgtccacataaaataaaaatccatacatacgagaaagagaaaacagaagaaaacaaaactatatacaatacacaagttgttaaataatgagagaatcacgtgttcttcatgcacatgtaagagactatgaaataaggataacaccgtagataatatcttattgatcaaatgaagcctaatcttttttttaagattagcgttaagacagatattctctatatttgagtaaatcccagccgttggatcactgacctataccttattgaccaatcccaatcgttagtacaatgccgtccaagaaagagagcttgcaatcgcatgttttagatgtatgctattaaccctaaatcctcaatttctcgatctcaatcttgctatgtggtgggtgatacatcaatggtaattgatatattattcttttatatatttgtggttttgttaaagaaggtatcaaatctgatgctctgaaaaagtgtgatttttttactggattttagtctatgtaagtatgtattatggacagagtttaaacttgaatccgaaccatttaagaccggaaaaatttcatgctattctcaaactaaaagaaacgattaaccataattagatctattaaaagtggatacatcaatcaaataataatatgggctgtgataatatagttgtatcaatactcgggacaaaaatgcaacacgctacaatggtagattcaattataccgtatgaatgaaaacattgcatgtgggctacttcttacgaagagacatgttcacttccaaaactagtactagtcaaatgattcgacataacctgaataccaaatgctatatcaaaaatggcaaatattcaactaataactaaaaagaacaatacttttaattttcttattaaaaaagttctagataataaccttttgagatttgattttcgaagatattaataacggcagattactaaatgcaaaattacaagaaaaaaatttatattatgtgattttctagtaaatgtcgattctaccgtagttgactacgtgttggcgatgaatcttctgagcgaattttcgggaaagtttgacaacatcatctatgtcatcaatcaccatcccccgcttcactgaggcatgatcaatgctctcatggtagcatacaaagtcaaacataagtcatactcatcacccacaattctacaacaatatgcttatcataggacattaaaatcaaggacgaggaaactacaagagctaaagacatcgcggacaaaaccatataagtagtggttaatacaacaaccgttcactcatacgattagcactataataacacctcggtcatatacactaatcaaaaataccaatccactaatcctagacctatgactcaaataccatctgcccatgtccaagtccaacatcccatcctctaatggcatacttggaccaatatccatcaagccaaattggtgcacacactcaatctcaaaacacaccaacgtacattcctaattaactcatgcaatcaacactatgtcaccccaaaacccaaaccaaacgacgtgaaaaaacatgtaacacacgaaccaaatcacattttactcttgttaacattaacgaatcaactacacctacaaaaatctaatgtaacaagcatgggttaaaaaaaacaatactgcagcgatcattactcttgttttggtcggaactaaaagttgatgtttcatttcatgtattgtattgtctcctttgaaaaccaaagcattgaccaaaagcagtacgtaccggcaaaaaaaaaaaaaaaaaaaaccggaaacttacttagccggtataccactgccaaaaaaggaccaacaacaatatgttaaaattttattataaagttattatacacatttatagttacagagagagaaaaacaactttattataaataatgatcatcctctaaaattgggtctgaaatgttccctcacacgtctccttctatcttcttctccactttaaaaaaaaaaaatatccgtctcactctctcgccgccggtaacatttcccggcgacaaaacttctctactctcaccattcctccatcgtaatctctaaattcttctccattctcttcttcctcccgatcatctcgagctcttcgtgagagattatgtgattatgtaatcgttgttgctgtagaagacgatctctaacaactgattccttcatcatcaccttcgctagatttgtaattttcagagcttgagatg

SEQ ID NO: 13467 - DNA, 3000 bp, Unknown
  misc_feature (1)..( 3000): cDNA_ID_3030267_gDNA_ID_2214629_Annot_ID_187911 3000 nt of promoter + ATG
aactcctctgctttgtctttttttttttgaatctttataaccgaatctttcaaattgatatttgttatgccgtagtagtaaatgtcagaagtggacaatttagatctctttttggagggtttcagttttttttttttatataaaaatatacatccttgtcatggatttttggaggtttgagatataaatggaaccttatgttggctatacccattttataaacaatacataatcttttaacattagagttgtaatggtggtgatgaaatgtatttgtctcggattccagatcgtaagattttgatggtgaggttgtgttatgtatcagacacttcgtcctaaaaattgaacaagttcttggctggtcgagcagacattttattgttcaatcaatcctgcatctaaccgaaccatatgaacttttgtttgagttcaacaaaaccgaatcaaatccaaattgaaatcagagattaaccaaatgtcagatggtaattctgatctttatttattagtagtaaaaaaaacaaagaggctcgttaattgtggttctttaaatagagcggcgactttgactcgttcatatatttgaccaattgttatcttcaaaatatcttagctagcatcttatatccaagtagagcaaatttcatgcattgacttcaaaaagaaaaggagggagagtgacctttcttgggtgtatatttgtatgcatagaggaatatattactctaaacgtaacaatctcatcaagtttgggtttgaagaatctgttttcggctcacaagttggtgaaatgcattcaaagaccaaattggagacaaagatcattcaagagattatcttttccagacagtcatgggtattctgaatagcctcgctatatggaagtgtagcatgttggagataaagatagagaagacaccatcatgcacaagtccaacaagttcatgcttctctaacctctcatatgtgttaatgtgagattgctcgggtctaatggatttgacgtggttgttgtttactccaaaccttattgatcttaaggttggttcgataaatgaacaagtatttgatgatataataagaacaagcatagtgtcgaaaacttagaaagcttccattcgactctaaaagtggtgttgttggtaaagaacttgtcataaatcacgtagacgaggaattgatagaaagagttaaatgggaagacgaggccacaagacttcgtttctcatcttcttcctacaaattccaaaaagaaatgtccaaaactatctagctccgcgggaacgtgtgtaactacaaaaatgcataagttaattaaaaagtcagctccttactaagtccgtcttgtccaagtacttcgctccgatatgtttctaagtcattattctttgtagattcataataaacccatctctttcttggtattccaaacattccttgactcatattttgatattattgtattcatccaaactttttgtgtaaaccaaatcactataaacaaaagtcataagaaagttaagaatttcatttctttgaataaccgctcaaatatcaattatcttatcattcaaaattgacattaaattcatcattaagcagaataaagctataataatccaccactagctagaacttattggttcaaccgtaaagaagtgataataacctaaataccattaaataactcatcaatgcttgaatgatttgagaccgaacccaccttcccagtactggagcgttactttccactttctagactaaagaaatctgagtagacactcaaatcattcagatatttccgcaggtaaaccaattttagaaatcccaagttgataactaaaccttaagtagctcaagtcgaattaaaccccaaatcctaaatctgagtgatattttttcccgaaaataattggtttttacgatatgaatttatcaccgtaacaactaccttactaacaccatgtcacaacaggtccgagacatcgagacacaactctccacataaaaactggactaaactaaagtgttcgacttcaaactcaaaataaaccggactaagtgtttgaaattaaattaataaaccaaaaaccgttaataaaccggactaaagtgttttaactttttaaccatcactaattaccaattatccaaaataaataaaccagaataatccgaaataataagaaaaataggttttagaatacctagaaagtaactggtcgcatgagataaatgtacttttaacatgaaaaaataacttgccgtcaaaacaaaaaaaaagaacatgaaaatgaaaaataaattaggtataataattattatttaactatattaattgacaaaaaaaattgaatttgacatctttgaaaaaacaccagccattggcagaacaaaaggtttagccacagtttttttttttctcctcgtctcttcgcaaatcctcttcttccttcgattctctctgaaaatctcttctccttcctcaaaaaccgatactctcttcttcaatctccctctcttatctctccaagctaattctccaaaccgtcttttctcaaaccctaacgtacggattagggtttttgttcgttgattccaaaggttacgactttcaatttctccaccaaattctctgtaaaggttaaagatttctactttcttttgagttcttagcctgattctttaaccttttcgttgtcattcgtcggaattttggagtggtcaaagtaataatctttatcacaattcaagctttttgagagttgattggttaaaattgtttctttttgtttttgcgagtttaatttagtttgagatttgtcttcactggtttctggttttgattagaagttgtttctccattgtttaaaaagtaaggagtaatgtgtagttgcagtagttttttttttttttataattgagaattgtggattatgttctgattctaatgattgtttaataatttgtttaattaaaatatatgattaggtgacg

SEQ ID NO: 13468 - DNA, 3000 bp, Unknown
  misc_feature (1)..( 3000): cDNA_ID_3030271_gDNA_ID_2214629_Annot_ID_187910 3000 nt of promoter + ATG
ttcatacagttgattcctcttgtgttatgttgcctctattttgatttctagatggatttcaaaactctcatgcaatttatcgaatccctggtgtgcgtagaaagtatgagaatgaaaaatgtacaaatctgaaaacaaataacatatcaaacattcggaacattagcatgaagagatgaaataactgcgcacaaaaagaagggggaaaaaagaacaatattttttgggttaatagtgagattgcaaaatttataatccatagtcgataaaacaaaatgttttttatagtcaaatattcaataatcagatttataagatataacatctcaatcattactaccaaaatgtatagaacatctgaacatataacatctcaattattactaccaaactgagttttcttttttaatgtaattcgaaggccagccggtcaataatcctagagttggtcttgtaatgtgaattgataggtgaatttactgtttttatcgaaaaaatcacatttttaatcctgaaagtgtcagtggatactatgttaaacctcgacattatttcacaaacattataaaccaccaaagtaattttattaataatataaaccttaaaactgaataaaaacatacatagtaatggccatttcttcttcataattatgtagtattatatatgtaaaaacttctgaggccagaaatagttactatgtaatttatgtatagttaacacacataaaaaaaatgctatgtaatctttgtctctctgaggctattactctcattttaacaaacaactgcacacaaaatgaaaaagagaccgtacctatcactacacacaatgacgatagaagatattaatcgagttgacgattctgctgccttcgtatctctccctcacgcacgttctatagagcgcataattttcatcaacaaaactgatttttttcatatttctctttctctctcttttttttttcttttgtgaaaccatgtttctctcttaaccaattagaccaattcatagttttcttcttatacttaatcgtctcgcttttcttttaatatatgttttctggactaaagtttcttacaaattttgtctttggtatctaataatcgtctctctattctgcttcccaaaaatacacttcctttcacgtactaataaaacgtgacatttagttttcttaatagatgtcacatactatataatatataccgaaagtcaaactagcgaaagagtttcttcatactttacattgatgaaaattataaatactctaaatggattttgtattaatgttgatatttcgtgatatttaaattttatatgaatgttgatccaaaaacccattttaccaaaccaccataaaactcattctgccatataacatgttaagtcatgtaacttatcttgccatataatccgtcatgcaatatagtctgtcttatgctttttttttatatatttttaaattttccataatattataaatttttgttaattttaatccaccctatattgaaacagcgagttgataattttttaatttattaatgttgatccaaaataagtctcgctaggccatcataaaatctcgtcccatgttactttttattttaaaatgtttaattgttcataatattataaactttctatgctctcaaatatatcgattataataattcgtgtaaaattaaagaatttaactaaaaaccgaattaatatgtatacaaactttttaatttggatgtttgttaagtgaaggtttccagctcgtttagatttatattcattttgatcttatttataatataactctgaatcattatctaaacattttaaccgatgtgggacattaaacacatattttttcattaattgggtaatatatgtctgttttaaaatttttaaattacaatatatgtagaaaaaaattgagatttttttaactctatgtattataaattattcaaaggagttaaaaaataatcaaacaaagatggaaaaggaatcttaaatctaaatcattaatttgaaatatcgaagcataattagtggacacagtccaattttggtaatattggtattcgacttttaggaaaaaaaactggtgggagatccatgttaaatataacctgacccaaataaatttttatgaataatttttcttaaagaatcagataccatttgtatctaaaattattttaacccttcagccaaaaaatgacttcaaaaatactatagagataataaatgaataattattgggttcatccataagattaacctttttattcacctcattttattccatctaattattaaacttatttaattataaaatccaaacttttactacttttttataaactcaaaccgatatataatctcgttgtaattacataatctaaattttaattctcttttgtaaactcaaacagatattcaacctcgtttattgtaaaatataaactctaaccattcattctaaatccgaaccgatatataatctcggttaattataaaatttaacccttttataaacctaaaccgatatttaatcacgtttaattgtaaaatctaaatccttttataaattaaatctaaactttttaatgtcggtttgaatttataaacgggattataactaaaaaaaattctgttatgtttttagtcataaaatgttaatttgtttatgattatttttgcaaccatttgttttgtgtttataattgttttcaaccgaatgaaaatgaatttccaccagacttataccggacgaaaagagtcttttaatttcaattttttaattggagatgcaaaatcctcgttttctcatgtcagttgtcgacgggaacaaaaactgaactccgcttctaagatccttcgacggagagaaagatatttcagatctgatcggagagaatcattctcaaaatttctccattctaatttctctttctcgagagagtgaagagagacaacaaggaaggaagaggaaaa

SEQ ID NO: 13469 - DNA, 3000 bp, Unknown; identical to SEQ ID NO: 13465
  misc_feature (1)..( 3000): cDNA_ID_2703035_gDNA_ID_2214629_Annot_ID_187907 3000 nt of promoter + ATG

SEQ ID NO: 13470 - DNA, 3000 bp, Unknown; identical to SEQ ID NO: 13464
  misc_feature (1)..( 3000): cDNA_ID_2703042_gDNA_ID_2214629_Annot_ID_187904 3000 nt of promoter + ATG

SEQ ID NO: 13471 - DNA, 3000 bp, Unknown; identical to SEQ ID NO: 13463
  misc_feature (1)..( 3000): cDNA_ID_3030283_gDNA_ID_2214629_Annot_ID_187901 3000 nt of promoter + ATG

SEQ ID NO: 13472 - DNA, 3000 bp, Unknown; identical to SEQ ID NO: 13468
  misc_feature (1)..( 3000): cDNA_ID_2713761_gDNA_ID_2214629_Annot_ID_136018 3000 nt of promoter + ATG

SEQ ID NO: 13473 - DNA, 3000 bp, Unknown
  misc_feature (1)..( 3000): cDNA_ID_3030267_gDNA_ID_2214629_Annot_ID_136020 3000 nt of promoter + ATG
tcaaaaaccgatactctcttcttcaatctccctctcttatctctccaagctaattctccaaaccgtcttttctcaaaccctaacgtacggattagggtttttgttcgttgattccaaaggttacgactttcaatttctccaccaaattctctgtaaaggttaaagatttctactttcttttgagttcttagcctgattctttaaccttttcgttgtcattcgtcggaattttggagtggtcaaagtaataatctttatcacaattcaagctttttgagagttgattggttaaaattgtttctttttgtttttgcgagtttaatttagtttgagatttgtcttcactggtttctggttttgattagaagttgtttctccattgtttaaaaagtaaggagtaatgtgtagttgcagtagttttttttttttttataattgagaattgtggattatgttctgattctaatgattgtttaataatttgtttaattaaaatatatgattaggtgacgatgaatgagaaaggagaaaagacttgtcctctatgtactgaggagatggacttgactgatcaacatcttaaaccttgcaaatgtggttatcaggtttgatacattacaaccacttttcctcacaatgtggctctcttgtttgtttattgtcactgtttgagtagaatgtgtgttttggggtcttgtttatagtctgaaaccgttgggtgttgatacgtttcattaagggtattgcaatttgctatgggcagagttttttctcaccctattcttttgagtttaagcaccaaagaatctaagcttctgttaattctgtatgctgtatatattaacacatgcctctgtggagagttgtcttctgcttgaaaaggaccacgatgtgtagtctcagatttcgaattgttttataggttgtcccacattgtctataagcatcttgtgaatggaccttttcttataatcgatgtttaaagctgacattacccagccttatattgttgcctgttcatttatgtttgaattattcagtgtgccactgtggtgatctataagaaaccctttttatgtaaatacatgtactttgtgcagatatgtgtttggtgttggcatcatattatagagatggctgagaaagataagacagagggtcgttgtcctgcatgtcgtacccgttatgataaggaaaagattgtagggatgacagtcagctgtgaaaggtagatctgaagctgaaaacaaacccttttttgtttctgtgaaacgtgtaaaaacttatctttttcttgttctgataattcactaggttggttgctgaattttacattgaccggaaaaagtcacagaaggcgaagcctaaacctgcggagggaaggaaagatctaactggtgtgagagttattcagagaaacttggtttacgttatgagcttgccttttgacctggcagatgaagatgtaacttaaacagccttaacttatctccttggcactcacatttgctttgaaaagagataacctttttcatatcattaatctgggttgttatgtatgcagatgtttcagcgaagagaatactttggtcaatatgggaaagtcgtcaaagtagcaatgtctcggactgcagctggggctgtccaacaatttccaaacaatacttgcagtgtgtatgtatccgtatttctttacacattcgaatgattgtatctagttcttgatgaactaatatttgtgagtccatatagctaagcacaaccccatttctttctgcggtctatttgacatgtttgcttttaacaaacttcattgagctaacattttcgtttttgtctaaaattgaatttcccagatatattacttactccaaagaggaggaagcgattcgatgtatccgatcagtacatggatttatattggatggtagaaatttgaagtatgttatgttttctttttttttcaaaaatagttatggtagcctgtggttcaatttctaatatatttttggatgtcgttagggcatgttttggaaccatgaaatattgtcatgcgtggttgagaaacatggtaagcagatattgacttgcttttgctcactaggtccctctatatacttaaatacaaatccaattgtgtttcgtggatgcctttttgtttcagccttgctccaatgctgaatgcctttatttgcatgagattggtgcccaagaggatagtttctcaaaagatgagaccatatcagcgcacatgaggtaaattaatttcaataatctctgccttttagttaaatgaaatagattgtggttgattcttgtttttcgttgatgttgatgttgggctccgttagtgaagtatactttaattgacattaatattgcatttagctcatgttttgtggatgcagatgtgaacttgttcactagctggttttctttgaaagttttaacacccatcctttcttgaagctaggagagatttgattttatatcagtaatttcttctgctctatatgttgtgctcgttaggtggttatctgattcccgttctgtttgaataggaaaatggttcaagatattactggttggagggatcattatgtgcggcgttcagggagcatgttacctccaccagttgatgattatgttgataatgagtctagcacaagaattattccaaaagttgttttgaatgtaagttgccaactcttcttggagcttcctgaattttttctgctctcagcatattcacatgccgttatactttatgagaaggactagatgcgtttatgtgtgataaattctgcttttgacttctttcttattcgcccttttttttcctttgcagaatgtacatagtgccgcgaaaaattctcctccaaatgacagcaacagtcactctgttactcttcctgctggagccatgtggtacactgaattcttatgataatgttttttttaattgctttgtctgagaaacttaacttgtttttcagggga

SEQ ID NO: 13474 - DNA, 3000 bp, Unknown; identical to SEQ ID NO: 13466
  misc_feature (1)..( 3000): cDNA_ID_2703032_gDNA_ID_2214629_Annot_ID_136021 3000 nt of promoter + ATG

SEQ ID NO: 13475 - DNA, 3000 bp, Unknown
  misc_feature (1)..( 3000): cDNA_ID_2703028_gDNA_ID_2214629_Annot_ID_136022 3000 nt of promoter + ATG
ttggtcttcacagactccataaatgtcaagtttctctgcaaagataaaacattagtgtgtgtaagaagcaaatctacaaagaagttgaaaacatataaaacaattattgtaaaacataaatatagtgtttaagaaacaaatctacatatataaaaaagaattaagaaaatcatatgaatcttaaagggttctttaattcagaaagaaaggtacagataaggctagtcttgcttcttgttaaagcaagagacaaatttcttattagaacaaatgttactaaaaatgtttttttgctgagaagaggaaagaaaagtagaaggataagaagagagatggagtttaatttataggcaaagaaagagtaaagatagctccaaaatccaaattaattaattattaaacatgattaggaattggtcttctgtggaaaaattgctcagaaatgtggtaaggttcggtgtttattcagaatgcatggtgggtcaatggtttctaggggcacatattatattttattaatattttataataccttgtacttttgtcatgaatattcaagaatgctttaagaaacaccactggaggtgttctaagaagcttatgaatacgtgtgtgtgtgtgtgaatacttggggtcatgcacctaaaagtcacgaaacaagttgaagtagatcaaggtaagtgataaatgaaataaaacaaaaaggaatcatcttatttaaaatccattgccaaactctaatggaaacaaaagagagtcttcatattaaaacaaaatataatgttcattatattttcattaataaactatagagttggtgcatatatagactagtccaattagaaactcatgaaccttagtctaagggatgataacgtttcatatatttaagatttaagatgatccaaacttcaatgttatgaaaattgcatcactaaagatgtgtagtaagatttagtgacaatatgaagtgtttttagttttttacagataatgtgaatttattttagtttagctttttgggttgtttcacaatttagtttagttagtttctagatgaagaaaggaaagtctcgagcaagttcggtcgttgactttggtgaaagaaaacatttcttttgttttctcttaccatagagaaaaatgtatttcgtaaagtgatttaaacacgtttaaatatgtaattgcttttaatctggtagtttaaaagtatagtatatggttttaccatttggaccgcaagtttgtgtagtattagacaatatgttttctacattgagattgcatttagatttatcattttaacagcatccaatttttgtagattttttagaaaaacaaaaataagcatttgaagtttattaaccaaacaagcgacatattcaatttttactacaaagattttgaatttcagatcaagagccacattttcgtcatgtccacaaccattaacattttcttagtatttttaacctctcaaatttgttttttggcctatatattcgaatttttaataactttaccgaatgaatattctaggaaattcattgtagttgtaaagtatcactctcatataacgaattcatcaatataatataattaagtggaccaacaaaaatgtcaaaaagacttcatccaccgtccttattgaattggtatgaccccattctaaagctttttatgagctttcatgacttcaaatcatccaaacatgaatcacattaattagaccgtccttccatttatcactagctcagacttttggattgtatagcttaatgagtttccctagttgtatacacttttatgtacctagaagtacgattagtgaaatacaattttaaaacgttcacaatggccaaaaagaaaccatgtgacgaatcgtagctcttacaaagctcatcaatcactatagcttctcccaatccaatggtcaggctcccattagattgattgtgttaactctttcattgtcatattctgagttggtttttaaagttcacgcgtttttattttgatggttggactaaaacctctacaaagagtatcttatttatttatatactcaacaactataattaaaatgttaaattttattgtagttgtttgtctattcaactttctgtggattaatcctgatattaatatgtcattggtttatcaaatactaatcatgcacgttatttgtgacgttccttcactttttccactttccttcttttatacttgaccaaataagaaaatcttaaaagttcaaagcacatcaaacaaatataaactactcaaaatcaaatttaaaccagagttaacaaagatacactgcttagctggatccaatgttttgaaaaagacttgctagttcctcggaatattattataagttcaataaaaattacaatataaacagaatccgcaacttaattatttatatcttttggcttgtatcgttttatttttggtcaacaatgatatcaacgtttattgtttatacattattaagatttatatttttctattcgatcaaatttttttataatgcattcatagattcaaacaaaaattgagtttatgtcgttaccattcactcaaattttatttactatttcaaattttcacataaaggatagtcaggaaacaaaagctataatatattataatttttagtaaacattatttggcataaaattgtaaaaaaaaaaaatcgattttacaaacaaaaaaatatactttatgaatgtggtattcattttaaatttttcgccaaaatattatttattttgatagccaaaacggcaaaacccaaaaggcccaaaacgaatcttaaatatggtccgggtcatggataatacaaaacgggtcaggcctaatcatctctttaaggcccaatatggtttagtaaggaaaggactctcaatttggcgggagagagaaagagaagcttctctaatctcttcaccgtctaaagaatatttccgacgccggagacgaaaacaaaaaatg

SEQ ID NO: 13476 - DNA, 3000 bp, Unknown
  misc_feature (1)..( 3000): cDNA_ID_2994527_gDNA_ID_2214630_Annot_ID_136027 3000 nt of promoter + ATG
gcaatgataatcagtaaaagggagtttttcctaattgatccatgttttctaaagctacaatatatatatatatatatatatatatatatataaaattggttgtatatatgccatgtaatacagaaaccgatagaagcgttgctaagtgtaggatttttcatttttgactcaaaagttaactatattatttgcaggaaacaatggatttagatatgattattgcattgcagaatgttcagaacattttttagatgatgtatgcaagccagtgtgtatagacaaggggtactcggatggaggatgtattggtttagcaccaaattttaaatgttgttgtaagaaatgatagaaaccaataatctttatagtaaaacggtgatggtgatttgatatcttgtatgttcttcgatgaaataaagctaatcttatctttgataagcttcagaagtcttaataatttcacaaaagcttagcattatcgatatcctagagataagaaggtataaaaaagagtaaaatttatattgaaccaaacaattcatgggactgttttatcagaggatttggcgagtaatggcaccggaacgagtccgtgtttttctctggttagtggtgcagcaagtgatcataactaatgtggaaagatatcgaagacacttgagtgatacgagggtgtgtcagatttgtcaaggcggggaggagacgattctacatgttctccgcgactgtcccgcaatggcagggatatggagccggttagtccctcgtgatcaaatacgacaattcttcactgcttctttgctggagtggatctacaagaacttacgggaacgtggatcatggccgacggtgtttgtaatggcagtatggtggggatggaaatggaggtgtggcaacatctttggcgggaatggtaagtgtagggaccgtgttaagtttattaaggatttggcggaggaagtggcgatagcgaatgcttttgtgaaggggaatgaggtgcgggtgagtagagttgagcggttggtgtcttgggtatcgccggaagatggttgggtaaagttgaacacggatggggcttcgcggggtaatccggggtttgcaacggcgggtggggttttacgggatcataatggagcgtggattggaggttttgcggttaatataggtgtttgttccgcacccttggctgagttgtggggtgtctactatgggttattcatcgcttgggggaggggagctcggcgggttgaattagaagtagactcgaagatggtggttgggtttctcacgacagggattgcggattctcatcccttgtcattcctattacgcttgtgctatgactttttatcgaagggctggatagtccgaatctctcatgtgtatagggaagctaatcgtcttgctgatggattagcgaactatgctttctcgttatccctaggtttgcatttgttggagtctagacccgatgttgttagttctattttgttagatgatgtagcgggggtttcgtacccgagacatgtccaagtgtaatttttttattttcttttaataaaacgggagacgcagtctccctcattctaccaaaaaaaaaacaatgcagatatttgcaaatttttcttctttttagatacagagtatatgtaggcatgtagctaaagatacttgatttggtgtgattttgatcatctggatgtaaaaggtatggtgatgcgtctagtgttggagcacttgaggctttggttattggtgttgtggtcattgttaattagtaccaatgtgaagcacctttatcgatttcacagggactggaccatagtgatgcttgagtgacgactcttattcgtcgtggtctaagccgcctctttatcatttttagggctctttggtcgactaattttattttatttttccctttcactagggtttcctgacttgttaaacaagctttagctctccgattaacagctaacagctcttttaccactcagaccctttatttttttatcccggccacctattatttattttgcttgattttatttcattaataaaatttataggaaaaaagaaaaaatttaaaaataagaaacaagaggtaggctcttctagcgaactcctttcatacgttttctctctactctcatcgcttttcttatctctctcggagctcttccgtcgtccaccattgattacggtaagattcaccttctcctactcaatttcataactatagataaataaatctctgtcttctctgcctctgttagtttttttctacgattgaaaccatcaaatcaattcaaggttttacacagtttcttatgcttgtcctgattgtttcgttcccggagagggagaaattacggcttttggaatccgcccagaaaatttcccgcccagctcggattttgatagaaatgttttgcctttttggtttctgtaaaattgatattcttattgtactttgattgaagtatgtgtgttcaattgaaattgatgttgtgtatttcttaagtttgaatctttgtgtaaggattgggggtttagggttttgactcatgattgctttctgcatttttaaagttaaaaagccagactttgaggcttagagctacttatattgtgttgcagggagtgtattgagctaaatatggctataatacaacttggaagtacatgtgttgctcaatggagtattcgtcctcaatttgcagtcagagcttattatcccagcagaatcgaatcaactcgccatcaaaagtatgatttttaagtctctggattgcattcagttctgtggctttaagcctttcaagtattttgatttgttcacattgcacatcttaagattagtcttcgtagaatgaagtttgtattatgtgatttctacactgagagttttatatatgaaatagcattaaaggttttccttttcacaacttttacagttccagtagccaagtaaattgtttgggagcttcaaagtcgagt

SEQ ID NO: 13477 - DNA, 3000 bp, Unknown
  misc_feature (1)..( 3000): cDNA_ID_2703053_gDNA_ID_2214630_Annot_ID_136028 3000 nt of promoter + ATG
atttgaatttgatcatgcaggatgtgatttatatggttttactggtgcttcaggtgaagtaccggtgaaagcggatgcatcaacaattgccatcagttgctggagagggaaggctagtttggctgttatggccactgtcgcagattgccaggagctgctagagagatttgccgagaaaacaccaaaaacagaaggtggttcggtaaatggaagcaacggcgattcggacggtccactagctatggagacttaagccctcccttcttcataacttcaaattgtactcctttgttgtggtttgactattcccttactacctccaaattatttttcatataagcataatcatgatgacttttgttggaacgacataaaaaaaatgaaagattttgttctaaaaatcaacgtacactacacaaaactcactatctaaaaaccaaatcaaaacaatatttttgaagtatatgaaatggtttattttattctaaactgtaatggaccaaatcgagaagactgacttattgagctgcaacacacggtggtcttagaagactgacttgtgagctgcaagacacggtggtcttagcgagattcttcttgttcaccttgttgaagatctcagtcaagagagtgttgaaagagttctcgacatttgtggagtttagtgctgaagtctcaaggaaaaaaagcccttccttctctgcaaattccttggcatcttccacaggaaccgatctctggttctctaaatccgtcttgttaccaatcaagatgatgacaatgttcttatccgcgtgcactcgtagttcttccaaccactgaggaatgtgctcaaagctttcacgtattgtcatatcgtaaactaacattgcaccaacagcacctttgtagtaggcttatgtaatagctctgtgtctactcacagcaaaagaacaagaatgtcactaatcaaaccaaccacattgctatgtacaatggagaaaacatgccatgcacaatgattagccacttggatgtgaatgtgatcatcactacataatttgattcttcaggagaatgctataacaacacattacaatgttgccgaagaacaaaatcgaacaattccaacactaatggtccaacttctaaaagagtcgattactctctagtcaaaatgaggtcactctcaggtacacacgaagatcaaaatcgaaattgaacagcaacactgtaacatcatcgagttcgaagcaatattttatccattgttaaatcagagaagatagaactaagatcggagaaggatatagtaccgtttctggcctgcgatgtcccagatctgagctttgatgttcttatcgtcaataacgagcgttcgagtattgaaatcgacaccgaattgtggctttggaatccatactgaattcgtctcttgtgaaccgagctcgtagctgtgacttcccaaccgctgaatctccgttcaaaacaaccttgaatacgtagtcaacctcttcttcagccatcttcttcttcgctcgcagtcggcgatcgaacgacgtcgattttctcgctgtttttacactctccggtggactgagagattaaactaatcgtagggttaaaatgtaatcctctacggtagagagtactagagtgtatggtagtcaaagtcgtcatacgtggatttgattaatgattgctacacgtgtatcgcattgataggttctcttgctcggatcactaatacataaacttggatacaacccaaagcttgacctatttttgttgaacacctttttgtttttatatttttcatcctctgaaacaagtccatagactcttgtattaatatatcctgatgatatttggttttacatttgcatcttgtatcattgtaaacaattcataagccttcccacaaaagcatgcttggcatttgacaattggcaattcataaatgatgcattataagcataaatatcaacttggatattcaacttggcccgtgtattatgctacctctacaaatttggtgaggtaggttaaaatgaggccggtttgagttaccggtatattagacgagcattaacatgattacacacttgaggatattattgacgaatgaagaaactaaaatggtttagttaatgcaaaattgaggattcattcgtctattgaaatagagaagaattgtttgaggctaaaataaatatatttacatttttcctattctcctccaaacttttcgtaaacatggttatttgacttatttttgaactttttatctaataatttaaaggattgtggtgatgtagtggccacttaatctacacaacatcgcaataattttgacaaaattttctacatatttcttgtcaacaattataaggaattaacacattctacttagtagacatttacagtaatcacaaccaagatgaaataaccatatataaatatcatttgctatgttcataaactttatcgaaactagttgacttcttaaaatgccaactaattaggttagggttcatgaactttttagcaaagatagcacaaactaaattctatcttcaacctaactaatgacggtttactccggttaaccggtggttatgttctcatcatgcggccaactaagctaatgggctatttggtgatcactaatcaatgaccgagatgcactagagtttttattatgatcgagttcccaaaaaaggggcaacaagaaaaaacgaaatggcctatacagggatcgaacctgtgaccttcgcgttattagcacgacgctctaaccaactgagctaataggccatcttgctttatctacagctaactactatataacaactacacaagtgattctagtaactagctaaaattctccggtgttaaaaaatctcagattcgctcccgaggacgatttaggaagctttcgttagtttttccaatttcggatttggtcttgttgagaatatatttacgattttaattgagagattttgtgatagctcaatg

SEQ ID NO: 13478 - DNA, 3000 bp, Unknown
  misc_feature (1)..( 3000): cDNA_ID_2703094_gDNA_ID_2214630_Annot_ID_136030 3000 nt of promoter + ATG
gaaactcgaaaagtgactgacactacggaagtcgtcatcatcatgaccttgcgttctgaaactctaaaaggtactgatacgttgccgtttttaagagattatgttgtccccatctttagttgtcaatttttggttgaaccaaaaaaagaggttgtcaattttcgtatgcaaatttattacacttcggagaaacggtcacaattaattaatacataggactcggaaggtatctagtttcctaagaaatttatagaattcgaaatcaggaaatgggacgcacatggaggtcattgtatttgaggttcaccaaaccaatccttaccaaaagaagagaggatatcaataaatattgacccacattttaattcattaaatatgggttttttaatattccttccgtttaataaagagtatcattttgacatattcacacaattttttttaattatgtatatatttgtttctgtttaacaaataataaataatttattagttttaggttaatgttaaatcaaaaaaactcagtgtataaatcatgttgaaaaatgtaaaatgacactcttaatgttactatgtttttattaaactggccaattaatacacaggagatgtcatttgagtttttttttgccctcaaacccatttctatactagtttagaccaaagatgccttaatacaaaactcagcagtttcattcagtcccattagttattagtaatctcatattccgaaaatagtacactcaacgagctcctcatatgccttccaagacaatgtaagcgatcataaattttctcagattccggtctcgatttatccctaacgatgaactcacagacaattccattaacctcaatggaactacaaccaggaatcttctctacacctctctcgttcatcatcctcctcgctctctttgcatcttcccacatattagcctctccatacatgccatccaacaacacatagatcccgctatcactgggatcaagttcgagaagtttcttagccgctttctctcccagctcaacattaccgtgcatcctgcaaccgaataataatgctccccaaaccgcagcatctgcctccattggcatactttccatgagcctgtctgcttcttctaatagcccggctctccctagcagatctaccattatagagtaatgtttcaattgagggtttaggttgaatctagacttcatctgagagaaataatcacggcctgtttggatcattccaccatggcaacatgctgataatagtcctatgaaagtgatctcgtctggggcaatccctgcatcaatcatttcgttgaagtatgatatagcagtggatgcatctccatgaagggctaaacctccgattatcgctgtgtatgtaagcgagtttcttgtttgaattccgtgaaaaacactgagagcttctgagatgttaccacatttggcgtacatgtcaaccaatgaagttcctagcgcaacattgagactaagactgtatttctcgatgtaacgatgaatccaaatgccaacatcaagagcaccaagctgagaacaagcagataggcaatgtatcatggtgatttcgtcaggcttagtgttacttgtttgcatctcctggaacaatgccaaagcgtcttgaccacgcttggcttggactgatccaccgatcattgcattccacagtacaacatctttttcttccatatcatcaaaaagcttccttgaaacatcaagcaaaccacatctagcatatcctgaaatcattgtagtccacgacacaattgttctcttttccaagttatcaaatatccttcgtgcctcgtgaatatctccgcatttcgagaacatatccatcaaagcatttacaagaggaatcgtcattctcagtccattttcttttacgtattcataaaactctttcccacgattcaaatctcccaacattgaacacgaagaaaccaacccaatcatcgtcacatcatccggcttaactccttcagattccattagcttatatacatatatcgccttctccgcctcaccaatcttcttatacccattaatcaaacaattccaagaaaccaaatccctcacaggactttcatcgaacaccttcctcgcattttccatatcaccacaagaagcaaacatatgaatcgacgcattatgcacatgactaaccaattccaatcttagcttaagaacatgcccaagaatcatatgacctaaactactcaacctaagatcagcacaaaccttaaacaaaacagggtaagtgaaatgatccggtctggactcacaacaaccatgtctaagcatctgcttatagagcaaaaacgattctttaggattctcactctcagagaatcctctaatcgttacattccaagagaatatgttagggttctcaatacctttaagaatcttcacagagtaatcgagatatcgagattccgataatgcacagaaagcaattaaccggcttgaagcaaatgggtccagaatcaaaccatttattatcatctgagcttgaatttgcttcaaatgtaacaaaagtttgcatttttcgagcaatgaaagtagaggattgtgtagaacgaaactgtgagtagagttccagtttatgggtttgtctctgtgatgaggaagtgatcgagtacgacgctgagaatgagaatacagagaacgattcagttttggtgtaagaggaggaggaagaagaagaagcttggccttcgatatgttcatcggccgttgcgcgtcatcggcgaatttgccgggagaagaaccttaattatcagtctaatgggctttatacggcccaaaaaccaaaaccctaaagcccaattaaaaagccatgaacaaatttgagaagtaaaacggagaagaaacagctctcacttcttcagttcttgtagattttttcccagagattttttcgaatccggcggcggatattgaactttttggtttcttcgacggaagctacgaaaaatg

SEQ ID NO: 13479 - DNA, 3000 bp, Unknown
  misc_feature (1)..( 3000): cDNA_ID_3030312_gDNA_ID_2214630_Annot_ID_187945 3000 nt of promoter + ATG
tctgaatcttttctctcgccatcacaacgaacaaaaaaaccctagaagcaagagagagagcttaggttttgattttaatggatctttcgagaacgggattgattttgatggatcaagattcaagaatgagagatgattaaagagagagtaaagagaagagatggaggaggaggaagaagaagccagaggaaataaattttgtgagagagagaatttttgctaaaaagggagactttaaagaagagagagagagtgacaagacgactgaaatggaaagtaaatcgtgttctttttgctaaatttagaagaataaatatgatttcaagacagtaaaaaccctagtttttgaaagatttgaaagaaagaacacactcagtcttttgtgagaagaattagatctagtcgatgaatcaacaaggaaattagagaggatcaaaagaaaaaaaactcaagaagaagaagaaaactaaaggagaaaaaaagctaagggaatatatttaattttccacctcaaaggtcgaggagagaagaagacatgagaaggttttgattggtgaaggatgagatattttcagggagaggtttattaattttataatactatcaagatgatggggtttcttaaatgattatttttggaaagaaaacgatatatattatatttttagttttagttttttttttggatattggtctgtgtgtggtggttattggatatggtgaggtaataggatttataagtctccaatgagatgagagagagaagagaagtgtgtgtttgggtcagtggggaatttctttttatagggaagcataaaatgagttgtctcactttgttcacttatactccttgtaactaattggttggtatttactgcaaaaactaactagaagacctgaagaacatcaagggctacaacgtattttcatttttgtaaatctacgtactatatggtaatggtacctcataacaaaattcagaaagaacaaaataatatcaactgtatattatttttatttatgtaaaaacatttgggaagatgacatttcagaatttttctgaggacaatgttttgtttttactgaaagaaataagtttgtgagttcggccttggtttgtaagaatccaactcggaaatgacaaaataatttgttaatttcaaagacattagtgcaataatttttgaaaatttagtagtcaatcatgtggcatataacttgtcgaaaaattgtgtccttaaaaaaagaggtttgtaacctaatgaaccatatctactcagatacatgtagtccattatacaattacaatctatgcactaatttggaaagtttgtcatgcacaaataaattttgttcaatcccagtaacaattacacacacaatgggggtatcaatcatcactgaagtatttttttataaaaccaattgaatatgtaactcaaaataaaatttaaatgaaatcactttcttacgaggttatttatcatttaacattttaatacataagctcaacattacaaatcacatatacttcaccaacgtcaacaacagaaccaaacatatgatttcaatcgccacaatcatcattccatagactaaaaagcaatttacaaaaccgtgattaaaggtaagaaaataaaattaaagggtttttaaaaataaaataatgtttaagcataccttcatacgaagaaacagtgaatagagggaccctcgaggcacgagccagagtaaaataaaaagtgtcgaccactaaaatttttcaaagggacccaaaaccagacccgaagcagccacaagaaatctgattgggacacgatccattgtccgtacagaattttatttctaaattaaagttttacccaaataaagatactccacgcaactactacaaacccattcttcttctctttattactccaagtttgcaataatctacccttcaagaatacatgtggctcgtatcactcaccccctatttgagtattatttactcttccgacgaaactcttgtgttgtattattgcgaatttattatgatactatatgaattatgaagttgcaaacggtaaaaaagtcatatggttgatgtgattaatacggtgttaaatataattatggtttgcgttaatttactgtaaactcttttcttttcttctttaactcttttctatctaattgggtaatcaagcaaatatagttgaattataatttgaaatttttgttgacaacaaaatattaatatggtttgcgtttgtgttctacgagtaatggaattatggaagtttttaaaacaaaaatgtagtattttttgaaaattttgatgacgtatattagaaaacactagaaaacaaaaccttctagtggttaaagttgctaggagaataactataagagaggtggcctgatcgatattacttatttcggcataatacatattcctttctaacgtattttaaacaaagaaaatcgttgagtttttttcagcttggtttggtttcgaaaaaaaaaaagtttgttcactcacaaaattattatcaagtaatgtttattcatatttgtcatggtttggtaaaagtagattaaatttggtagaacatccatcaattggcgtttggaaccgcatgaatcatttatatttgaaattgaatagtgtttagaggcgcacgtgacacaactggtgaggtctttgagttttgattggtcaaagtgtcagagtttttatgagtagacgactcgtgacctttcccttaacagttccaagcctctctaatgaaacattgcacctaaccttttagccattttaggcttctttctttctacacagtccctacactacacactctctctgacacatcaaggaaactacagtcaccgttatcataaagcggagtccctaatgggctttttattattattgggcttttattaggcccaaattttccttacgagtaaaataagtattattttggttcagtttctcgccggatcctgaaaatg

SEQ ID NO: 13480 - DNA, 3000 bp, Unknown
  misc_feature (1)..( 3000): cDNA_ID_3030325_gDNA_ID_2214630_Annot_ID_187937 3000 nt of promoter + ATG
tggagttaatccagcggaaggaccgggagcaggagcatcggtctgaggaggagaagcaaccggggatgttgttggagaagtggtaggagctggagttggctcgttaactggaacaggcggtgaagcaattggtgaaggtgtttctgctgtcactggaggaagcgccgttggtggaggagtaacggtggttggtgctggtgcaggagcttgagcgagacatgaagtggccaagaaaccaagaaagatcaaagcttgcattgccttagaattcatttttagattatctcttctttgtctgaatcttgaaactctctctgtttaatgttataaactcttctttatttttgttgatggtgtagaacaatgagagaagagagctctatatatacgcgatggttgggaaatagttaataattaattattggtgtgacactaatcatgcgaaccacatacaaaaatacaacatggcttagcttttcaatggcggtttaaaataattgttgtcttttttctttcttaaacttgacgtgtttgagtttttgaagttttcttgaagaatcatctacatgaaggagcaccaaacggatacacagatctctgccacgtgttttctcttaacgatgttaattctgagatcagttaagtattgacacgtgttatgtttatattggtttttagatatgatttgactctgcgtaatttgctttttggttaaccgcgttacaatgccaggcgtaaattaacttgagttttgcctaatgtttcgtggaaataacgcgtttacgagtaaataattaacattatacgaaaaatgggtcattatttaagttcatattcatatatagtatgtctatcaaaattttcaactgttaattattttagatgtatattataatcgtttctgttgaaaaaagttattttatatgtttcgttgtaatgtgttatctggactgattatacgagcaagggctggcaaaagctgtcatattttcatgttaattaaattaataaattagtagatcattatagttatatttatggtttttattttgttgcaatattctagtgacagattacttggtggccattattgttacaaacttacaacgaaacagtcaagcaaacgcgcattgttcatattctacagctatatcattattacggtgtgaaatgcttcatttcaataagaacctacctaacaattatttatattccttgaataataaattgttagactcttgctttgaccttaatatgcattgtatcagtatcttcttcataagaaaattataagttgaaaacttttttcctgccagctttgaccaaatgaatatattaaaaagttaccaataaagaaattttaattaatttgattagtagtacaagtttggacgaggccttggcaggcctctctttctagcttttcgtggatgtggcctaacctcgtaacttttcgtattttatcaagcccaaagtagctttccgttatcacttatatgaaaaaatctaagatctaaggggagttattgattagtattttaatttataatctatatacattaaagaaaatagaacatcttgaaacctctaaataaatacaccgtgcttaaaaaacttcacgagatattcaattgatttttttttgtttagaatattaaataatcaatactccattagatgtcatttacccaaaaaaaaaaaaaaaaaactccattagatgttattattgtagattgtaccaataaactctgatatataagtccaacaaaactccattagcagtagtgttggtaagctccccatattcttgggctttagtttcagaagatttcatgttatccgtcggcttagtttatggaattatcttgttaatcgccacttttatataatttcatatataatctatcttttagtgcaaaaaaagtaaaaaaaataatttcaacgaaactcaagtttggaaccgcaatccaattattttaatcaaatcattgactaccgaaatatttttccaccttcaaacaatctaaaaagaaaaataatttttttgatcaattcaccaacgttatttagtttataaaacatgataaaagatcctccaaaaatataaaacctagactttccttaaattttaagaagtgtacttttgttcactcaatttattatttctctgccaaattctctatattcttcacacgtaattactatctagttctcgtccatttcctttatcattttctcattgtcttgtaaattgaccactctaatgatctctattatttcctctagaatagagtatgatttatctccaatctatcactctatatatagagtaatcctacaattttctctattttaaagtaacatatagaatgaggatggagagaatgtactatatcatagagttttagaggacaaaattaaagtgggattggagatgctaagtatgtaaatttggttcggttagctatcataagggaccgagtgctatatgacaatgtattataggtaaaagaagtgatattgtctcctgtagatttagtgtccttaaccgttcatcaaatctatgtgaatctcagtagtaggtagttgggtgaagaacgtgtgaagtctatacaactcatattactcctcaaacattttctgataatatattgcatacattgaacctctttttaaattcaaaacatcaaaggtattgatcttacatagaaaaaaacatagactcttatgttcatgtccctattgatcttagtcatacctcataattgtctaacaaagaaaatcaaaggtatcataattatcatcatatgtaatgtagggaacaaatctgtatttactggtatatatatataacacaaaaaaaattaccaaagaaaaaaaaagagcaaagggaacgataccattagtcccaataccaatccttgcaaaattcaaactcaaacaaaccgtttatctcacgcgccgccgtactcgccacgatccgtctttggagaccaattt

SEQ ID NO: 13481 - DNA, 3000 bp, Unknown
  misc_feature (1)..( 3000): cDNA_ID_2703102_gDNA_ID_2214630_Annot_ID_187932 3000 nt of promoter + ATG
aaccaccgccgtagaatatcactgtgtgtgtttttcgccggtgatattttttggtgtgctgacgtggcagttgtatagatatttttccatttatgggtaagcacgagcggaacggcgtcgtttaggaattgaatacgatgtcgtattaggtggaaacacaaatccccattgagatcatcttgtgtcggtgccttgactcgttttatttacgtttctattacacaaaacgtttttgattggataatgattttcttcaccaaatttacaccttactttacagttttcctcttttatttttttttataagaatggagcattgtatcaaaatagaaaatcgagtagattttgttgcatttttttttttttttcttcaaacaccatttatattaagttatcgggaagagactctccgctagagagagccatttaggaaccaatgtgcttacatgggaaaaaaggctattgcgagcccgagctttcttagctaaacaatctgctcgagtattagaactacgagaaagaaatctaatacgaaaagaagggaaaaaacaaactaaagaacgatatgaagccaattccgctgcaaaagtcagccaatcgtcttggttatcaaggatagcaatcaagtctgagcaatccgaagcaaaagtaccagaagtatcaccaatagagatcatgcactccattgcctataacaaagagttaaattccgcatgaagcggtgataaatttcgacgagtgctcttaaggccaaggtggatgaccaagtcttgtcgaacaagtacccaaccatgcccgctcaatgtgtcatctacatgccatgatgcatcgagttgacattcagggagcaaggtggacggggtctgagaagaacctacgaacacgattggacgagtggaatcatcctcttttagagttgcttgtttccaaacagctgtctcttgaagtgccaaaaccaaagtttcagggggaggttccctgaagttctcaaaaacaaaacgatttttacttttccagatataccaaattatccatggaaagagttccaacaccttttctccaattccaaattctcggtcacgccaaaaaaggaagtcgaaattatagaagagagagtttctagggaaaatattccctgaggtaggaataggcgataaagcccaaatctgtctcgaaggtggacaatgaaacaatagatggttgattgtctcttctacttcttcgcaacggggacaacctttatctgtacccatatggcgatatgtcaatctttgacaagtggctaaacaacccgagatacattgccacacgaaatgcataagcttccgcgtagttttaagctttcatacttgtgcctgaagtgccgaaacacctggtccctgaaaaggggggtcacaagtaggacgagaaagatctctcgcgacccaatatcctgacttaacagtataattaccggatttagtgtgagaccagctaaagccatcactcaagtaggtacgacttgggcgaatccctaaaatgagtggaatatcaacgggatcgatcagtgcttggagacggtccaatttccacaaatttgtgttttggtcaattaaatcattgacatagagtagagaatctcttatgttaagaatgctctttgcaggccgcgctaggatagtgggaatccatggatctttccatacgcgagtcagcattccagaacctatggtcctccgaaatccaaagacaagaagaggtttggcgcattttcacctctaaaataaacacaatttcatgttgatattaaggttgttagtttcgatccaaaagaattattttgactatagttaagatgatgttatacctaaaaaatataatttacattttataaagaaaacaaactaattatattatcaatggatgataccggatataggaacttataaggtgaaaaaaatcaaagaaccaaaaacccaaaaactttccaaatatataagagaatataaatatgttttggagaatcaaaagaacctaacccaaataaaaagaaagcaaaaaactcactcttgttgctgtcatcgaggcccaacagctcttgtctcatttttgcattgccacgaaagtcatcaccctataactttaatttataaattttttaatgggttagagaaaataaaaaacgcatataatccaattattacaactttaacaaattaaagaagacatgatgattagattaccatgcgaataagacaaacatattttgtaaaatgttgtcaaaaaaatatctctaaagcattcatgattttagcatttaacaaaataattctgataaccaattttgttacacactactataaaacttctaaacacaatattgtgatgttataataacttttacatggtgaatagacaatttcaaaagattaataaaaagaaaactcgattattcaatttttaaaaatagattattaatttaacacagagattcctttccacgtatagcttgagtggagctgagccgattagtataagccgagccatattatatccgtttgagattaattttattttaattgattttttaatcttctcttacacgagttccagtgataccggaagaaacctggaggtaactgggtatagccggtggaccccctcaaatttattttaacaaaaaaaaaaaaatcatttacaaaagaaaacacccaagacaatatctacttaaccatggttactttctaacccaacctttgagtttatttaaactgagagaaagtgtgaaaccaagcttgttcatatggaaaacgctcatcaacctcaacaatctctctcctctctctctctgtatatagaagaatctccattgtctttaatttctctccatttctctttctctcttccttcaaagttttctcttttcttgatgggtttaagagagtaaagatcatcaagtactatgcattaaattgagaagttattaaaaatttcgaaagtaattaaagattgttgatgatg

SEQ ID NO: 13482 - DNA, 3000 bp, Unknown
  misc_feature (1)..( 3000): cDNA_ID_3030296_gDNA_ID_2214630_Annot_ID_187929 3000 nt of promoter + ATG
ttgatgcagggattgccccagacgagatcactttcataggactattatcagcatgttgccatggtggaatgatccaaacaggccgtgattatttctctcagatgaagtctagattcaacctaaaccctcaattgaaacattactctataatggtagatctgctagggagagccgggctattagaagaagcagacaggctcatggaaagtatgccaatggaggcagatgctgcggtttggggagcattattattcggttgcaggatgcacggtaatgttgagctgggagagaaagcggctaagaaacttctcgaacttgatcccagtgatagcgggatctatgtgttgttggatggcatgtatggagaggctaatatgtgggaagatgcaaagagagcgaggaggatgatgaacgagagaggtgtagagaagattcctggttgtagttccattgaggttaatggaattgtctgtgagttcatcgttagggataaatcgagaccggaatctgagaaaatttatgatcgcttacattgtcttggaaggcatatgaggagctcgttgagtgtactattttcggaatatgagattactaataactaatgggactgaatgaaactgctgagttttgtattaaggcatctttggtctaaactagtatagaaatgggtttgagggcaaaaaaaaactcaaatgacatctcctgtgtattaattggccagtttaataaaaacatagtaacattaagagtgtcattttacatttttcaacatgatttatacactgagtttttttgatttaacattaacctaaaactaataaattatttattatttgttaaacagaaacaaatatatacataattaaaaaaaattgtgtgaatatgtcaaaatgatactctttattaaacggaaggaatattaaaaaacccatatttaatgaattaaaatgtgggtcaatatttattgatatcctctcttcttttggtaaggattggtttggtgaacctcaaatacaatgacctccatgtgcgtcccatttcctgatttcgaattctataaatttcttaggaaactagataccttccgagtcctatgtattaattaattgtgaccgtttctccgaagtgtaataaatttgcatacgaaaattgacaacctctttttttggttcaaccaaaaattgacaactaaagatggggacaacataatctcttaaaaacggcaacgtatcagtaccttttagagtttcagaacgcaaggtcatgatgatgacgacttccgtagtgtcagtcacttttcgagtttcagataatttcttgtttgattgctaaaaaatatgaaccaatggcctgaaattgttgcctccctttctcacaacaattctcttatctcaagacaccaactcactataatattttatccactaaagtgttgttatataacaaaatacaaaaaatcaaaacaaaaattgacatctaaattttaagtaaattatgcataatttagaattatattgctaatctttttatcttaatttattaattttatccttaaattattagccgtagagtaactatagcattgagcactacgacgacactgatcacattaaagtattaaacaataaatgaataaaagatgcatgcttttttgtaaaaaaaaatatagtatgaattatttggccaaccaacgtgaatgtgaagataaggttttgtatgctttttacaaagtcaaaaagtgccttgaccatacgttaggtttaaaatcaagagttgaataattcactcacaaattcatcgtgacctttaaaagcctatcaataaatgtgtgttagttacactatttgattatgaacattgaccaggattaatgtttggttctagctagatcattcgcatttcataaatagtacaattttttcattattgttatcaatagtattaattatagcattatttcttgtatacgttacataaacaaaattcttgtataaatatttaactagttgttgaatacaataacaaaaatctaactattcatattatacaaaaataatcactattagtattaatgtatcttattaatatggagtagtaattatttttgtatgttatgaatatatatttagatttttcttaagatgtttttaatagtaattatttttcataagatgtttcttattaatgtatttttaggattttcacacatcttaaaaaacatattaaaagttgattagaaatatattattcttcttgaagtttacacatcaataataactagtaataaatattgcatagaaattttaaaaatgactatcttttcgaatcaaaaaaatttcctacaaaatacaataataaacaaagagagtagtactgttcatctaaatactgtataatggatgttttaccaattttaacaattacgtacaaaagtttcacacctttataaaaaaaatttgatcaattatccttttatcttctttatttttgccagctaatatacactgcaataatccaaacttaacaaacatttaacattacttcagattcatcattcaataatttcacaaacccataattttaccaaattactacactaatcccccattggcaccaattctataattagaaaatttatttctttatttatttatttatttatttctatttattaaagaaataaattatagaaattggaatgcccaccaccaccagagaccacacttgcacaaattccatctataaacacaaaagcctttagtatcattctcgaaaaccaccaaaaacctctttataacccaacaaacaaagtctctacttcttcttcaatcactgaaacacaacaccaaaaaagaaaaaagtatgtctcttcttccccatctcatcctctacctaacacttttgacggtggttgttactggagaaactctccgaccaagattctacagcgagacatgccctgaagctgaatccatagtaagaagagaaatgaagaaagca

SEQ ID NO: 13483 - DNA, 3000 bp, Unknown; identical to SEQ ID NO: 13478
  misc_feature (1)..( 3000): cDNA_ID_3030346_gDNA_ID_2214630_Annot_ID_187926 3000 nt of promoter + ATG

SEQ ID NO: 13484 - DNA, 3000 bp, Unknown
  misc_feature (1)..( 3000): cDNA_ID_2703053_gDNA_ID_2214630_Annot_ID_187923 3000 nt of promoter + ATG
atttgatcatgcaggatgtgatttatatggttttactggtgcttcaggtgaagtaccggtgaaagcggatgcatcaacaattgccatcagttgctggagagggaaggctagtttggctgttatggccactgtcgcagattgccaggagctgctagagagatttgccgagaaaacaccaaaaacagaaggtggttcggtaaatggaagcaacggcgattcggacggtccactagctatggagacttaagccctcccttcttcataacttcaaattgtactcctttgttgtggtttgactattcccttactacctccaaattatttttcatataagcataatcatgatgacttttgttggaacgacataaaaaaaatgaaagattttgttctaaaaatcaacgtacactacacaaaactcactatctaaaaaccaaatcaaaacaatatttttgaagtatatgaaatggtttattttattctaaactgtaatggaccaaatcgagaagactgacttattgagctgcaacacacggtggtcttagaagactgacttgtgagctgcaagacacggtggtcttagcgagattcttcttgttcaccttgttgaagatctcagtcaagagagtgttgaaagagttctcgacatttgtggagtttagtgctgaagtctcaaggaaaaaaagcccttccttctctgcaaattccttggcatcttccacaggaaccgatctctggttctctaaatccgtcttgttaccaatcaagatgatgacaatgttcttatccgcgtgcactcgtagttcttccaaccactgaggaatgtgctcaaagctttcacgtattgtcatatcgtaaactaacattgcaccaacagcacctttgtagtaggcttatgtaatagctctgtgtctactcacagcaaaagaacaagaatgtcactaatcaaaccaaccacattgctatgtacaatggagaaaacatgccatgcacaatgattagccacttggatgtgaatgtgatcatcactacataatttgattcttcaggagaatgctataacaacacattacaatgttgccgaagaacaaaatcgaacaattccaacactaatggtccaacttctaaaagagtcgattactctctagtcaaaatgaggtcactctcaggtacacacgaagatcaaaatcgaaattgaacagcaacactgtaacatcatcgagttcgaagcaatattttatccattgttaaatcagagaagatagaactaagatcggagaaggatatagtaccgtttctggcctgcgatgtcccagatctgagctttgatgttcttatcgtcaataacgagcgttcgagtattgaaatcgacaccgaattgtggctttggaatccatactgaattcgtctcttgtgaaccgagctcgtagctgtgacttcccaaccgctgaatctccgttcaaaacaaccttgaatacgtagtcaacctcttcttcagccatcttcttcttcgctcgcagtcggcgatcgaacgacgtcgattttctcgctgtttttacactctccggtggactgagagattaaactaatcgtagggttaaaatgtaatcctctacggtagagagtactagagtgtatggtagtcaaagtcgtcatacgtggatttgattaatgattgctacacgtgtatcgcattgataggttctcttgctcggatcactaatacataaacttggatacaacccaaagcttgacctatttttgttgaacacctttttgtttttatatttttcatcctctgaaacaagtccatagactcttgtattaatatatcctgatgatatttggttttacatttgcatcttgtatcattgtaaacaattcataagccttcccacaaaagcatgcttggcatttgacaattggcaattcataaatgatgcattataagcataaatatcaacttggatattcaacttggcccgtgtattatgctacctctacaaatttggtgaggtaggttaaaatgaggccggtttgagttaccggtatattagacgagcattaacatgattacacacttgaggatattattgacgaatgaagaaactaaaatggtttagttaatgcaaaattgaggattcattcgtctattgaaatagagaagaattgtttgaggctaaaataaatatatttacatttttcctattctcctccaaacttttcgtaaacatggttatttgacttatttttgaactttttatctaataatttaaaggattgtggtgatgtagtggccacttaatctacacaacatcgcaataattttgacaaaattttctacatatttcttgtcaacaattataaggaattaacacattctacttagtagacatttacagtaatcacaaccaagatgaaataaccatatataaatatcatttgctatgttcataaactttatcgaaactagttgacttcttaaaatgccaactaattaggttagggttcatgaactttttagcaaagatagcacaaactaaattctatcttcaacctaactaatgacggtttactccggttaaccggtggttatgttctcatcatgcggccaactaagctaatgggctatttggtgatcactaatcaatgaccgagatgcactagagtttttattatgatcgagttcccaaaaaaggggcaacaagaaaaaacgaaatggcctatacagggatcgaacctgtgaccttcgcgttattagcacgacgctctaaccaactgagctaataggccatcttgctttatctacagctaactactatataacaactacacaagtgattctagtaactagctaaaattctccggtgttaaaaaatctcagattcgctcccgaggacgatttaggaagctttcgttagtttttccaatttcggatttggtcttgttgagaatatatttacgattttaattgagagattttgtgatagctcaatgtcaatg

SEQ ID NO: 13485 - DNA, 3000 bp, Unknown
  misc_feature (1)..( 3000): cDNA_ID_2994527_gDNA_ID_2214630_Annot_ID_187922 3000 nt of promoter + ATG
taccaccggagattaaaaggggaaatcactttcataggatggccagtttgggcttcacactgcaattttcatttaagcttcgaaatcggagattcatgaaacgtttggccggagtttcgagcaaaataaaataaaattataggatcgattaattgacagagatggtgttgttcagctaagaaaatcacaattctagagctgtgtaaaagttctcgagaaaaaatgtacggtcaatgcttttaattggattgaaacttgtttatgtgattaaggaaaataatgtattttcaataaaatgaaattgtctattcttgttaaggcaatgaaaagttctacttttagcaatgataatcagtaaaagggagtttttcctaattgatccatgttttctaaagctacaatatatatatatatatatatatatatatatataaaattggttgtatatatgccatgtaatacagaaaccgatagaagcgttgctaagtgtaggatttttcatttttgactcaaaagttaactatattatttgcaggaaacaatggatttagatatgattattgcattgcagaatgttcagaacattttttagatgatgtatgcaagccagtgtgtatagacaaggggtactcggatggaggatgtattggtttagcaccaaattttaaatgttgttgtaagaaatgatagaaaccaataatctttatagtaaaacggtgatggtgatttgatatcttgtatgttcttcgatgaaataaagctaatcttatctttgataagcttcagaagtcttaataatttcacaaaagcttagcattatcgatatcctagagataagaaggtataaaaaagagtaaaatttatattgaaccaaacaattcatgggactgttttatcagaggatttggcgagtaatggcaccggaacgagtccgtgtttttctctggttagtggtgcagcaagtgatcataactaatgtggaaagatatcgaagacacttgagtgatacgagggtgtgtcagatttgtcaaggcggggaggagacgattctacatgttctccgcgactgtcccgcaatggcagggatatggagccggttagtccctcgtgatcaaatacgacaattcttcactgcttctttgctggagtggatctacaagaacttacgggaacgtggatcatggccgacggtgtttgtaatggcagtatggtggggatggaaatggaggtgtggcaacatctttggcgggaatggtaagtgtagggaccgtgttaagtttattaaggatttggcggaggaagtggcgatagcgaatgcttttgtgaaggggaatgaggtgcgggtgagtagagttgagcggttggtgtcttgggtatcgccggaagatggttgggtaaagttgaacacggatggggcttcgcggggtaatccggggtttgcaacggcgggtggggttttacgggatcataatggagcgtggattggaggttttgcggttaatataggtgtttgttccgcacccttggctgagttgtggggtgtctactatgggttattcatcgcttgggggaggggagctcggcgggttgaattagaagtagactcgaagatggtggttgggtttctcacgacagggattgcggattctcatcccttgtcattcctattacgcttgtgctatgactttttatcgaagggctggatagtccgaatctctcatgtgtatagggaagctaatcgtcttgctgatggattagcgaactatgctttctcgttatccctaggtttgcatttgttggagtctagacccgatgttgttagttctattttgttagatgatgtagcgggggtttcgtacccgagacatgtccaagtgtaatttttttattttcttttaataaaacgggagacgcagtctccctcattctaccaaaaaaaaaacaatgcagatatttgcaaatttttcttctttttagatacagagtatatgtaggcatgtagctaaagatacttgatttggtgtgattttgatcatctggatgtaaaaggtatggtgatgcgtctagtgttggagcacttgaggctttggttattggtgttgtggtcattgttaattagtaccaatgtgaagcacctttatcgatttcacagggactggaccatagtgatgcttgagtgacgactcttattcgtcgtggtctaagccgcctctttatcatttttagggctctttggtcgactaattttattttatttttccctttcactagggtttcctgacttgttaaacaagctttagctctccgattaacagctaacagctcttttaccactcagaccctttatttttttatcccggccacctattatttattttgcttgattttatttcattaataaaatttataggaaaaaagaaaaaatttaaaaataagaaacaagaggtaggctcttctagcgaactcctttcatacgttttctctctactctcatcgcttttcttatctctctcggagctcttccgtcgtccaccattgattacggtaagattcaccttctcctactcaatttcataactatagataaataaatctctgtcttctctgcctctgttagtttttttctacgattgaaaccatcaaatcaattcaaggttttacacagtttcttatgcttgtcctgattgtttcgttcccggagagggagaaattacggcttttggaatccgcccagaaaatttcccgcccagctcggattttgatagaaatgttttgcctttttggtttctgtaaaattgatattcttattgtactttgattgaagtatgtgtgttcaattgaaattgatgttgtgtatttcttaagtttgaatctttgtgtaaggattgggggtttagggttttgactcatgattgctttctgcatttttaaagttaaaaagccagactttgaggcttagagctacttatattgtgttgcagggagtgtattgagctaaat

SEQ ID NO: 13486 - DNA, 3000 bp, Unknown
  misc_feature (1)..( 3000): cDNA_ID_3030296_gDNA_ID_2214630_Annot_ID_136032 3000 nt of promoter + ATG
aatgtggtaacatctcagaagctctcagtgtttttcacggaattcaaacaagaaactcgcttacatacacagcgataatcggaggtttagcccttcatggagatgcatccactgctatatcatacttcaacgaaatgattgatgcagggattgccccagacgagatcactttcataggactattatcagcatgttgccatggtggaatgatccaaacaggccgtgattatttctctcagatgaagtctagattcaacctaaaccctcaattgaaacattactctataatggtagatctgctagggagagccgggctattagaagaagcagacaggctcatggaaagtatgccaatggaggcagatgctgcggtttggggagcattattattcggttgcaggatgcacggtaatgttgagctgggagagaaagcggctaagaaacttctcgaacttgatcccagtgatagcgggatctatgtgttgttggatggcatgtatggagaggctaatatgtgggaagatgcaaagagagcgaggaggatgatgaacgagagaggtgtagagaagattcctggttgtagttccattgaggttaatggaattgtctgtgagttcatcgttagggataaatcgagaccggaatctgagaaaatttatgatcgcttacattgtcttggaaggcatatgaggagctcgttgagtgtactattttcggaatatgagattactaataactaatgggactgaatgaaactgctgagttttgtattaaggcatctttggtctaaactagtatagaaatgggtttgagggcaaaaaaaaactcaaatgacatctcctgtgtattaattggccagtttaataaaaacatagtaacattaagagtgtcattttacatttttcaacatgatttatacactgagtttttttgatttaacattaacctaaaactaataaattatttattatttgttaaacagaaacaaatatatacataattaaaaaaaattgtgtgaatatgtcaaaatgatactctttattaaacggaaggaatattaaaaaacccatatttaatgaattaaaatgtgggtcaatatttattgatatcctctcttcttttggtaaggattggtttggtgaacctcaaatacaatgacctccatgtgcgtcccatttcctgatttcgaattctataaatttcttaggaaactagataccttccgagtcctatgtattaattaattgtgaccgtttctccgaagtgtaataaatttgcatacgaaaattgacaacctctttttttggttcaaccaaaaattgacaactaaagatggggacaacataatctcttaaaaacggcaacgtatcagtaccttttagagtttcagaacgcaaggtcatgatgatgacgacttccgtagtgtcagtcacttttcgagtttcagataatttcttgtttgattgctaaaaaatatgaaccaatggcctgaaattgttgcctccctttctcacaacaattctcttatctcaagacaccaactcactataatattttatccactaaagtgttgttatataacaaaatacaaaaaatcaaaacaaaaattgacatctaaattttaagtaaattatgcataatttagaattatattgctaatctttttatcttaatttattaattttatccttaaattattagccgtagagtaactatagcattgagcactacgacgacactgatcacattaaagtattaaacaataaatgaataaaagatgcatgcttttttgtaaaaaaaaatatagtatgaattatttggccaaccaacgtgaatgtgaagataaggttttgtatgctttttacaaagtcaaaaagtgccttgaccatacgttaggtttaaaatcaagagttgaataattcactcacaaattcatcgtgacctttaaaagcctatcaataaatgtgtgttagttacactatttgattatgaacattgaccaggattaatgtttggttctagctagatcattcgcatttcataaatagtacaattttttcattattgttatcaatagtattaattatagcattatttcttgtatacgttacataaacaaaattcttgtataaatatttaactagttgttgaatacaataacaaaaatctaactattcatattatacaaaaataatcactattagtattaatgtatcttattaatatggagtagtaattatttttgtatgttatgaatatatatttagatttttcttaagatgtttttaatagtaattatttttcataagatgtttcttattaatgtatttttaggattttcacacatcttaaaaaacatattaaaagttgattagaaatatattattcttcttgaagtttacacatcaataataactagtaataaatattgcatagaaattttaaaaatgactatcttttcgaatcaaaaaaatttcctacaaaatacaataataaacaaagagagtagtactgttcatctaaatactgtataatggatgttttaccaattttaacaattacgtacaaaagtttcacacctttataaaaaaaatttgatcaattatccttttatcttctttatttttgccagctaatatacactgcaataatccaaacttaacaaacatttaacattacttcagattcatcattcaataatttcacaaacccataattttaccaaattactacactaatcccccattggcaccaattctataattagaaaatttatttctttatttatttatttatttatttctatttattaaagaaataaattatagaaattggaatgcccaccaccaccagagaccacacttgcacaaattccatctataaacacaaaagcctttagtatcattctcgaaaaccaccaaaaacctctttataacccaacaaacaaagtctctacttcttcttcaatcactgaaacacaacaccaaaaaagaaaaaagt

SEQ ID NO: 13487 - DNA, 3000 bp, Unknown; identical to SEQ ID NO: 13481
  misc_feature (1)..( 3000): cDNA_ID_2703102_gDNA_ID_2214630_Annot_ID_136033 3000 nt of promoter + ATG

SEQ ID NO: 13488 - DNA, 3000 bp, Unknown; identical to SEQ ID NO: 13479
  misc_feature (1)..( 3000): cDNA_ID_2713769_gDNA_ID_2214630_Annot_ID_136043 3000 nt of promoter + ATG

SEQ ID NO: 13489 - DNA, 3000 bp, Unknown
  misc_feature (1)..( 3000): cDNA_ID_1450489_gDNA_ID_2214631_Annot_ID_136049 3000 nt of promoter + ATG
ttctttgtcgtctttgaaggttaccaccagctatatttcagcttcacaatgtcaaatcaaagatcatttcaacatttagagcttaaatcaaatgtaggaaaaaagagagaagcttttttggtttgctttatttctgtttgatggagtttgggtgtgtgtttgtgtcttttgggtctttcttgttcccataggagagggttttttggacgtgtttgtattgttttggacagctctctactaaatacttcaagacagaggaaacaatttttcttttcttttttttcttctcccttttatgaatgagaacaaaatggttccaacctttaatttctgacacaaacaaagctttaattctttactaagacatgttctaatatttggagaattattagaaagtttagttattttcttttaaacgtaattcaagccgtgtatttataaactactagagtttggagcaagaaaaattaaaactaatgaaatatgttggaactaatagatatattttactttccagttccacttcttattctaaaatgttccccaatgtcaaacaaatagtggatacatgatgataatagactgaaggaaatggaccttaatatgagatatgataaataaacatataaaaataatgcaatctccttcctaattgagatttcagttgggtcatgcaatctcgcttttggccacaacggcaatggaccccacttgcaacctcctaattccttacattttttctcaaatggtcaagggtatttatgtcattttgactccagtttggtaacatttttctttttgacatcacagtttggtaacagttaagcaattaggaattaggaatggtaggttaagtatacaacctcataaaatggttttgctctcaatggaatcggaaggggatatgcggaaacaagaaagaggttttttttgttttgttttagaaagcaggtatatgatagaactattatacatacaacttaaattttactacaccgaagaaagtgagaaaaagaaaccacaaatgatgagggaaactttacacactaccactttctatattgttcgcaaggattagactcgaattcaagatggctacaacaagagcttatacagaatttgctagactagtttaagaactctctcatcatgctcatcaacattctcgttatctactaaagagaagtttcttctccctcttaacattactaatatatcaaccttttacgatcttaaaccatattcagtttacctaagctttaggttgtgcaatctgaaacaccagaggttatacagtttgacatagaacatgaaactgtgtttacacaaatcaatccacagagaatacgaattattcattacattaccataagttttgaatagacatagcaatcttgcttgctctcagttcgctcgttcgcgtaacacttcaagatcaacctcagtaggatcagtagcttgaatctcatagtgaatcccttgaagctccctacttaactggtctttagaagtcgagtaaagcaccttggctcgaattccagaggtcgaaggagacctacaacatcagtagtcccaaatcaaaatgttttagtctcaacacatcaaaacccttatagacttactaatggtaaaaatcaaactaaccaagcaaagaagaagattttgctcttttgacaattctcagaagtaacgaaatcaaagtcataaacagcgtatctgcagtcattatcaggaagtgaagctaagaaatcatcgtagctctctgtaggatttccagttttctcaacaacaacttcttttttggattcatcaatcttgaagaccacatagcgatgagtttttttcctttgaagctctagaaatgtggttttgctctcatctgcaacacccattccagatattgcatttggctacagatataaaaccaaaacacatatcaaaaccataccaaaagattcgatttttaatccaaaattcatcgaattgacttcatctagtgatcttaaaccctcaataagagtaaaaatggagatgggtttagttttttttaacatcgacttcataaaaatcaaatttttaacattgaagatgcttgcgacatagacaagagtacatcgattttaagcaagaagagaaaagtttttttttgtaattttaccctgctaagtcctctgaaagacatggatttgattctgctttcttcagacaccacagaattgggttagagagacgaagacgacacgaacttatcaaacaaataaaatcggatgcgtcgctttgttcttcgtgcacacttttgcttagtaattaagtttttgaatttttaactttttttggtttattgcagaagaaaaagaagtgttcggtcggtggcgttagaacaacgcgataagaaaagtcgtgtttctttttaagtgggccatatttgttgccccttaactagtcgccgcgtatctatcaatattgggccttaattaagcccattagtgaatagtaacaaaaatcatttgggcctcagaagtagaaaaggaacgaagaaacgacgtcgttgttaagataatctctttgattttgtttttagacggctctaggcgattactgttgtggtggttcactccaactccggcgactcttaacgttcggaacctgactgtgccatcgtgtctcagagatgcagtttcttgtaggatttcacaatctttattctattgtatttttaatctcattttatgattctccaaactatagtgaatgactttgtaacttggggaacgaagcaggagaaggtgaagttgataaagaaggaagacccagtaatgttgaagagccctgaagactttccggtttactggttcgaaacctctgattctgtctctcaccgttatcagttccaatccgacggccacctctctgtaaatctccctctccctcgttcttgtctctcttatgccattgctctcaacttgtagaatcattatgtgaattatcacgttttagatg

SEQ ID NO: 13490 - DNA, 3000 bp, Unknown
  misc_feature (1)..( 3000): cDNA_ID_1807426_gDNA_ID_2214631_Annot_ID_136050 3000 nt of promoter + ATG
ccaagcaaatcttgtccccgtgccatcgagaaatctatcagtataccatcctttagcttgcacttgagataaaaatggattgaagacatcgttcattttgtcatacgcgtcttgcaatataatgtcatcagggtcattatatatctttgtcattgacttgacatatgctgcaactaaccaccctcgcaatgcatcttcaccggttgcatcgtgctctaagaccatatcggtccatgactttccatgactcaatagaaacttctcttctacaaacacttgttttagtctttgtacctcagaaggcttcacagctttatggagagcccttcccacttttacatttcctgcgtcttggattggtctctcggggaacattaggtcttcttggaatcttaaatcaggagggcttgggactttaccagtctgagaagatacaacaacacctcttatgtaattaaaagaaatcaacaagatggtttacagaaaaattgaacaaaagatgatgctaattaccttgagaaaattagccacaatcaaagcggttcgctgtggattcagtgtgttgattggtacccctcgcatttgttctacaacgctatacacatgtacaaccgaaagaattgacccaaccaccaactgcagatatcagccttttcataatagagttgcaatccaaacaaatagaaactgcattttgaaatagagagtaacgatgtagcagaatgacattacctttccctccattgatgaacatattgtggacgcaagttgaataccagcacctatcccggcaacattgaaaagagtagagatagcttctccttttgcaaaaatgtcactaagatttccttctttggcaaaagatgaatatattggtaatcttgttgcccttgctgcaactgtagccattccctatttaaaacaaacaatgccagaaaagtatgaaaaacaggaaaccagtgaagctgattgatgtataaaaggatggtctttagaaagctaatatatctcataggtctcctattgaagctgctgaggaaagcaggcacagatgttctaagaaagatatctataccttagcaaaattccccagaccagccatttcaagaaacagatgcgggcataatggagaaacgagttccagaccagtaccaagatcgtaaagcacgtcagctgaaaattatgaatcaatactttttatagttaacgctataaagacatcagcagaaacatgtagctacagaatggtgcatacccagaatcctccaccgtttaggctcagagtccattcttgcacccaaattgctacatattagctttccgacatgttgcatcccatccttcaatatctacagaaccaatagagtaaacaaaactttcacttacggacagggactgaacaagcaaacgaacaaacaaactgaagtggtttaacatacccagctaacaacagttgcttgtgccggtgtaggccgcaagcctgcagcaaacaacagtgactgcaaaggaatgatacaaaaaaaagttatgtgtccatgtgaaaacctccattacaacagctcaagtaaacaaatgcaattttcccaaaatcaataatcaaagctgaatcatgaagaagacctgagtcgataacactgataatgctgcactagagaaatgctgaagtgctcgaaactgtgtgtacctaagatatccttcgttgacactatagagaagaagtaaagaaagaaacttggttaaaacacatgctttaaggctaaagcctagagactctctaaaaacaaaagttccaaactttgagttcacctgtatggataaccagaaggaaagaacttgttaaggaaagattcaaccatcttctgaggaacaggtcttgcatcatcaacaactttcatctaaaacgtgataattcacataatgattctacaagttgagagcaatggcataagagagacaagaacgagggagagggagatttacagagaggtggccgtcggattggaactgataacggtgagagacagaatcagaggtttcgaaccagtaaaccggaaagtcttcagggctcttcaacattactgggtcttccttctttatcaacttcaccttctcctgcttcgttccccaagttacaaagtcattcactatagtttggagaatcataaaatgagattaaaaatacaatagaataaagattgtgaaatcctacaagaaactgcatctctgagacacgatggcacagtcaggttccgaacgttaagagtcgccggagttggagtgaaccaccacaacagtaatcgcctagagccgtctaaaaacaaaatcaaagagattatcttaacaacgacgtcgtttcttcgttccttttctacttctgaggcccaaatgatttttgttactattcactaatgggcttaattaaggcccaatattgatagatacgcggcgactagttaaggggcaacaaatatggcccacttaaaaagaaacacgacttttcttatcgcgttgttctaacgccaccgaccgaacacttctttttcttctgcaataaaccaaaaaaagttaaaaattcaaaaacttaattactaagcaaaagtgtgcacgaagaacaaagcgacgcatccgattttatttgtttgataagttcgtgtcgtcttcgtctctctaacccaattctgtggtgtctgaagaaagcagaatcaaatccatgtctttcagaggacttagcagggtaaaattacaaaaaaaaacttttctcttcttgcttaaaatcgatgtactcttgtctatgtcgcaagcatcttcaatgttaaaaatttgatttttatgaagtcgatgttaaaaaaaactaaacccatctccatttttactcttattgagggtttaagatcactagatgaagtcaattcgatgaattttggattaaaaatcgaatcttttggtatggttttgatatgtgttttggttttatatctgtagccaaatgcaatatctgga

SEQ ID NO: 13491 - DNA, 3000 bp, Unknown
  misc_feature (1)..( 3000): cDNA_ID_2703156_gDNA_ID_2214631_Annot_ID_136051 3000 nt of promoter + ATG
attgtgaaatcctacaagaaactgcatctctgagacacgatggcacagtcaggttccgaacgttaagagtcgccggagttggagtgaaccaccacaacagtaatcgcctagagccgtctaaaaacaaaatcaaagagattatcttaacaacgacgtcgtttcttcgttccttttctacttctgaggcccaaatgatttttgttactattcactaatgggcttaattaaggcccaatattgatagatacgcggcgactagttaaggggcaacaaatatggcccacttaaaaagaaacacgacttttcttatcgcgttgttctaacgccaccgaccgaacacttctttttcttctgcaataaaccaaaaaaagttaaaaattcaaaaacttaattactaagcaaaagtgtgcacgaagaacaaagcgacgcatccgattttatttgtttgataagttcgtgtcgtcttcgtctctctaacccaattctgtggtgtctgaagaaagcagaatcaaatccatgtctttcagaggacttagcagggtaaaattacaaaaaaaaacttttctcttcttgcttaaaatcgatgtactcttgtctatgtcgcaagcatcttcaatgttaaaaatttgatttttatgaagtcgatgttaaaaaaaactaaacccatctccatttttactcttattgagggtttaagatcactagatgaagtcaattcgatgaattttggattaaaaatcgaatcttttggtatggttttgatatgtgttttggttttatatctgtagccaaatgcaatatctggaatgggtgttgcagatgagagcaaaaccacatttctagagcttcaaaggaaaaaaactcatcgctatgtggtcttcaagattgatgaatccaaaaaagaagttgttgttgagaaaactggaaatcctacagagagctacgatgatttcttagcttcacttcctgataatgactgcagatacgctgtttatgactttgatttcgttacttctgagaattgtcaaaagagcaaaatcttcttctttgcttggttagtttgatttttaccattagtaagtctataagggttttgatgtgttgagactaaaacattttgatttgggactactgatgttgtaggtctccttcgacctctggaattcgagccaaggtgctttactcgacttctaaagaccagttaagtagggagcttcaagggattcactatgagattcaagctactgatcctactgaggttgatcttgaagtgttacgcgaacgagcgaactgagagcaagcaagattgctatgtctattcaaaacttatggtaatgtaatgaataattcgtattctctgtggattgatttgtgtaaacacagtttcatgttctatgtcaaactgtataacctctggtgtttcagattgcacaacctaaagcttaggtaaactgaatatggtttaagatcgtaaaaggttgatatattagtaatgttaagagggagaagaaacttctctttagtagataacgagaatgttgatgagcatgatgagagagttcttaaactagtctagcaaattctgtataagctcttgttgtagccatcttgaattcgagtctaatccttgcgaacaatatagaaagtggtagtgtgtaaagtttccctcatcatttgtggtttctttttctcactttcttcggtgtagtaaaatttaagttgtatgtataatagttctatcatatacctgctttctaaaacaaaacaaaaaaaacctctttcttgtttccgcatatccccttccgattccattgagagcaaaaccattttatgaggttgtatacttaacctaccattcctaattcctaattgcttaactgttaccaaactgtgatgtcaaaaagaaaaatgttaccaaactggagtcaaaatgacataaatacccttgaccatttgagaaaaaatgtaaggaattaggaggttgcaagtggggtccattgccgttgtggccaaaagcgagattgcatgacccaactgaaatctcaattaggaaggagattgcattatttttatatgtttatttatcatatctcatattaaggtccatttccttcagtctattatcatcatgtatccactatttgtttgacattggggaacattttagaataagaagtggaactggaaagtaaaatatatctattagttccaacatatttcattagttttaatttttcttgctccaaactctagtagtttataaatacacggcttgaattacgtttaaaagaaaataactaaactttctaataattctccaaatattagaacatgtcttagtaaagaattaaagctttgtttgtgtcagaaattaaaggttggaaccattttgttctcattcataaaagggagaagaaaaaaaagaaaagaaaaattgtttcctctgtcttgaagtatttagtagagagctgtccaaaacaatacaaacacgtccaaaaaaccctctcctatgggaacaagaaagacccaaaagacacaaacacacacccaaactccatcaaacagaaataaagcaaaccaaaaaagcttctctcttttttcctacatttgatttaagctctaaatgttgaaatgatctttgatttgacattgtgaagctgaaatatagctggtggtaaccttcaaagacgacaaagaaggaaaaagatcatcatcttctaacttttggtaattagataatttcattctctaaacaaagtctgatttttgaatcaatactaaaaaagtgatagaagagaagctatcaaaacacaaaaacagaggatttttcttttccaatctaaaagaaaggtgcttaagggaattagtttgagattaggttttaactgagtttatacaaactttctttatttaatgaaattaacttagattggcttttgtcttaaagattaattatggttgtgaaaattagttttggttgcagaaaaaaatcagttgaaa

SEQ ID NO: 13492 - DNA, 3000 bp, Unknown
  misc_feature (1)..( 3000): cDNA_ID_2703152_gDNA_ID_2214631_Annot_ID_136052 3000 nt of promoter + ATG
atttggttgagaagaaaaaatgcggtgcaaggcacaacaacattgaagtagacaataaaaacacgatttatgggactagcaagatagagcatccattctccaaaaacaaaaacacttttaactgtttgattcgtacacttagatttgtacaccacttttagtgtacatatatatataaaaatacacaacgtacactttacatttgtacactaaaagtgttgtacaatccaagtgtacgaatcaaatagtgaaaagtgactactttgcaaattatgaatagtaaagtgactacttttccaattaagtttgaaaaagtgactagtttgccaacacacccaactttctttagagctgaaaatgtcaagacaatgttatataagaaagatgaatgcactttgattacggagaaagaaaagaaggaatgattcaaagaaaagaagcagtgatgaatgatgaaattcatccccaaccccaagcatctacgatgaagcatcatgcataatatataagagtgatcaaattaatcatagaccactttgaatagacttgtctattgttagagatattgtgacgtgtgttttagaccggttaagtcgggtttgtagaccgataatttttagagaagtgcaggccctgttaaactaatatcaatttctatgaaatatctgtagtgcaaccgtcaaataaaataaaaatgatacgattcattacctaaatgaatccaacccaaccccttttctgaaactattggctatgtatggaccgaatcaagcggcactacatttttaatatatcaaaaaccaaatcgttggtttggtccggcaatacattttaacattttctgagtaatcagagtttgtactgtttagttaggatggggacagtcgcagtgtaccgtgtacgagagaggtaggtgaccagaattttttcagtttctgtcgaatttcaagaataaccctaattcttttttttactaaatcaaatataaagtatattattatcccattcttggatgtgggacctacttccactacttctcaaacaacccgctctctttgctataaacagaaatcgcatgacccaaccgctcaacaaggaaacttatacaattagtttgatccaaaattgttatttatttagaaaaatttaatagaaaagattgaaatataaacatatatgaatgaaatgaattatttatattcaatacagtccatgttatttttttaccagattctctattatacatctcttcaagtatctaaatatttttcttatggatgaatttttattttatcattttatgttatcgattatacacaaagaaaggaagtgttaaattagattaattaagtgagttgtcgatatacattacaggaagtgtttgagatagaaactattctatgatggtttagttgttgaacacagtttacttataaaattagaaaacccaggggtttaagtatttatacttctatttaactatgatatacatacataagttttatcaatgccatgtacaacgtatagatgaatcaaactagatgatgtgataaataattccatgattgttgatgataaggtagttaatcatccataaattaaaactgaacactttttatatacaaaacatatccatttaaaccgtgcattagtatttttggttcttgtattaagtcgaagagttttttcaattcgagtatataataaaatacgattgcataaacataacacatattaaacatgagattaattatagaagtaaaacatacatctaagacaagaaaatagtttcgcgttaaaatacttttatcaattacaattttgtatttgggatatttttatccaaattttactaaaatgaaaggaaaagggtagaaatgggaaagagcaaacggggctacttggtttgtcggtgtgagttagtggagcccatatcatattggtcagagagaagatcgtatttgctgataatgacggaaatacccctaaagtcgttgaaaagacctgagagattcggcaagggacccatctgttgattcttctaaccaacctttatgtttggccacaatgataaatcacatgctccaaccaaaacagcccccaaaaaaaacccaatttatattttcttaaaagtgagcttataacgtaaaagaaatatatacaatgctaattttcttacaactggttaagtgttaaaagatatgtttaggatcatattggtatttggtaatcaggtttcaacatttgaaatgattaatcaaaaaataagttgcatagaaaatgatttaaaaaatgactataaacaagaagtaatttcacaaaccatgtaacaaatcaaaaccttaataaatcatgcatcaaagttggattagaaacatagcttaatggattatatacaacattttcgtttaaattagacacctagaatatacatgttatccaataatttaactttgccatctttttacccttattgtattgtgtgtctccatctacaaatgtccgtatatttcaaacacagagagggagagagagactcttgtttaaaaaacttacttcttctcctgaaaattgagaagacagacgtagagaagaattaattgtaacaaaggttctaattttcccagctctgattactcattatcttacatctctttctatctattgtcaaattcaaacccttaacccaatgtttaatcttttggatcctaacaaacatttctatggtttcgtttccaaaattataaaagagctaactttttttgaaattagtttcaaatttttggtttttcttcttcttaaagattgttgaatgttacttttgatttgcaggtgttaaagaatcatctagagtactcgttgaaccatttccatggaaggtaacaaaatttcattatttggtctaatttctcatgaaagttgctacctttttcgttctggaagatctaaattagtgtttgagttacaaacgcagaagaaagagaaagcctttacgaggaa

SEQ ID NO: 13493 - DNA, 3000 bp, Unknown
  misc_feature (1)..( 3000): cDNA_ID_2703140_gDNA_ID_2214631_Annot_ID_136056 3000 nt of promoter + ATG
ttggcagatgaagcaaccggatcttcagatctgcgacgagatccagcggcttgacgaatttctttcactgataaagccacagatcggtttctcgatctactaagcatgttctcaagtggtttttccggcgtaggcaatgctacagaagacggatttggattcccggtttgagatttcgaagacggcgaatccatcaccaatcgtttcttcgatttgaatggaatggatctagaagagcctggtgtactcatttttatcaacaatgtctatagagtgtcagatgcagagaggagatagtggaggagatagatgaagacgatgaagacgacggaagaagaagaagggtttagatttatttaggtctttggcgcgcaatcctacgtgtaccaaagccacgtatacctcccgcgcctattaacccgttgcttcccgcgaaaacacttatctacgaagaagcccattaattaggcccattatgaattgctgtctctgaacgaatctaatagatgcaaaccaaagagaccagatttctttttttcaacttgtgattttttttatatgaacatgatttatataaggtcgtcgtgcaatgtttatgctgcttgttcagtatttatagtttttttgaaaaatcaaagataatctcatcataaggaatcttatcaacagtaaaatattaagataaaacagttagcccagcaaatcaaatataatcaatggtttagtttatgttttctatgtttctctttctaaactttgaatatatttaccacatccttattttaaatcatagaattaaacagtttttaaatgattatgatattttttctattgtcatttctaatattttactaacaaaactttaattttatttgtctattaaatgttatatttttccggtattgttatttctgtatatacttgaactttttcttattaaggttcgtcgtttccattttattttatattatatttgctaatgaggaaatctatataaaatcatgaaataaatattgattattaaaagaaaacacataaatattaaacattgaatattaccacatccctattctaaatcaaagaattcaataaattttcaatgattatgagattcttttcaattgtcattactactattttcttactaacaaaacttcaacttttctttttattaaatgttatactttccgatattattatttctctatatactcttatttaaatttgttgttttatgtcaatatatgaagttttgatgattataataataaataccaatttttatttcttttatcggtttatcgtctagttgacaaaaaaaaatataatgccgttataaaataattataactttcatgagtttttatttttgattaacatttaaaaaattaaaggagctagatgtatcaatttgtattatattatgctctgagactaaatattgatcttgataccaagaatctgatctagatccaaaatttatgtcaactgactcactatcatattttcaaaactcaattttaaagttagtaatataatgtacatcttaactattgtttttttgggtctgtttagaatctgggccggtgcccactcaaaacaatcggcccattatacaagttgttaaaataaaattcaatatatcacattaaagaaaaattacaattttttggcttcaagacttttttttttgtgtgtgcaaagacttttttggattcaagctaataaatgttagattacctttttaaccaaagatcaaagtaaaaccaaaatcatagaagaggaagagaactcgtgatcacgtttctttggttaagtaatgttgtatagaagagaagagaagagaagaggaagaagaaaagcccaaatcgaaaattgaaaactagtactccaaactccaaagcatcaatattttatcactcctcttttcttccacgcaaacccaattctcttcgtcttcttcttttgcttttctcccctaaattcgtcgatcaaattcttgtcttttcaacttcttcatcgaattttccattgcccatagcctctgtatttgattcctccttctctaaagcttcggatattaagacaattatatcttcctagctgcttatagaccttcgctttctaattgctgttcctttcgtgggtctctggtaagttttgattttctcatctgctgttatcgagaaaggttgattttttttgattaatcgcactgtgatttaaggttggaggagattatagtgttagcttaagggtttttgaggtttcaatttagaatcgtattgctcctgatcatttccctgttaaaagtagataaaccccttgttctattgggaaggaattcgccgtttttgcttcgtcttcttgtgaaaaatagagttggttttaggtaattgactttgatcaaggtctattggttgtgcaaaggttgcgtgaatcttgtgtcagcctcttgattgagtatagattacttcgtcttcgctttctctgcaccatcaattgtcatcagagtgctaggcatttagtgcattgtccaaagattctgcttgtgcatgaatgctattgttgaaaaagaaaggaagtgtttgaaatcgaatagtcttttgagtgtcaagcaaaggataggtgggtctggtttatatccatcatggtggaaaacagatatagaaacatttctttagcaggttatgccacgagttccgtatccttggtttgtctttctgcgtttaaggatttgatttgccttagtgtctcattggttagtatattcattgtatgtgcttctagcttgaacattttagtggcacttttttgtttgcatacataaattatctctgtcattaggtgatttgcattgtggatgctttatgttattcatgtttgatgcaggatttgtagttgcattctcattgcgcactacactttcttcaaatttccgcgtggtaagcagggaatggaccggctgttttggccaatcgtctgtgtttacaaatgatg

SEQ ID NO: 13494 - DNA, 3000 bp, Unknown
  misc_feature (1)..( 3000): cDNA_ID_3030375_gDNA_ID_2214631_Annot_ID_187970 3000 nt of promoter + ATG
gccaaaaagtcatttattttattaatattaattttattaatgatatgactctgaattataatctaaatattttagctaataacataggagtgcaccatatttatttaatagggaaatgtaccatatgacccgaatgcatttttatccaaatccaccaaaaaagtcttgcaaaaatactataaagataagaagcgatagtcggttttgatagatataagattagcaaatatattagttagcttaaattagttaaagaatacaaattaaaagggtatgcaccatatttatttaatagggaaatgtaccatatgacccgaatgcatttttatccaaatccaccaaaaaagtcttgcaaaaatactatagagataagaaacgatagtcggttttaatagatataagattagcaaatatattagttagcttaaattagttaaagaatacaaattaaaaaggtatattacactttattcaaatattgtatcaaaacttatataacacagagatttgataatttttaattgttgaatacttcttttttgtgctaattttatgtgattaagatttaattgatttcatatataaaatattaaattgacttatttgtttataatttggtaacagatagatatttgaatattcagtatattttgcttcagtttaggaaatctttgatgacccgtctttagatccaataagtcctataatctagagattaatttgcagtataccgcaggtaggcttatattttagttaaactaaaaacttttattgtaaagatgatttaaaaatatatgatattattttatttgattttaaatgtatagtaaactgtgagttgtatatgttttgttgatattatctatattgtttagtgtttaagattatacacttgtagtttgattgttaatttaagagtttcacatgtagtataccatcttgtattaatatcgatctaaacccgtcaattctaggatttttcagcttatattaaaaattgaatcacatctaatatgttattaactattgtaatatataagattataaattttcaatataatatgtatgaaattgaatatgaatatttcaaatttatgtccccttactcagtagaaagttttcttaaatctatttttcacccgttataatattatttcatgtattgaacagtttatatttgtttttaaaaattcaaattatggcatatgcgaaaaaactctaattatttttttataatgatgatattatttttccgtataaatagaatcatataaagatgagaagtgaactataataattaataaaaaattaatatgataatttagataccaaatatagtttgttgattttaattggttacttttttagaaattaataatctatttcgtttttctaattaaattaaattaattaaatttagatatcaaatcttatatgttgattttgattggctattatttttggaaattaatattgtatttcgttttttaattaatttaattaattaaattagtatttgactttttaatccttaaagagataaattaatttactttttaaaattttatttctaatggcatacctatgtaattacttacaaaaattaaggttatatttaaaatgtacttcccaaataatatagtaggattgtcactacgactacgagggacacttgctaaattttcggaatattttatcttatgaattagaaggaaaattattatggaagttgtaataaaacatgtacaacattttaaatatcataggttttttattacaaaagtattatattttaatagtatatgggaaaaacaattgtctcttcaaaatttattcaaaataaaaaaaaaattaaactatagacgaatgagcctcgaaaacgcaattcctcaaacatttttttttacaatcttatccaccaacgtatgagtcaaatcaaacaaatagacaccttaaagtaaagtatatacatagttcactaatatttttgctagacggttaacctctttatacatatacgagattcgaattatctactctgtagataaaatatatgatacaaacttatcaagaaagacaattgggttcgactcacaaactcttgcctttaagaatcctaccactaattccgcagctctagcctcatcactctcttctcccatgggatatacaattcatagtagacttcctacaacttcggtaaacgagccgagtatacaatgtttagcgcacaatttccgcgggaaatacaaaaaagattgtgatgttaatgtgatgaatttgtaattaaacacacgataaattagtgcaatgtgtaaaatattttataaatttgtgagtaatgggtaaaaaaaaaagtaaagaaggaagcaaagttcagttggtgaatcattttgctggccattactctataagagagagagatcctatctccataaaatcccataccctcaaacacacacacactcaccatcccactaactcgaatagttaacatgcgcacaccgatccttggcctttcgttgctaaaatgagcatggtgcgtgattcacccgcttacttgctcgatttctccttcacccttttaaaaaggaacgtcttttagcttacctctgcctcctttaccctctctctctctctatctctatctctgttctttcctttttccggcgaatttctgggctgagattgttagtgtctctgagtgatgcagagatcaactgttgtagttaatcaatatcttctgacataagctaaactcgattctttcttacaatctctctgtctctctctgcttccttttctactgtcttctttcttcttctctagcttttgaattttcaatattgatttctcccatggcgagtagcagttgcagcagatctatctctgtttcaaattctgattctctcggtgttttttgtttgagctagggctaaattagtttccttcttgggtttttattcgtaatccgattcaaagtttgtatctttgggaggg

SEQ ID NO: 13495 - DNA, 3000 bp, Unknown
  misc_feature (1)..( 3000): cDNA_ID_2703136_gDNA_ID_2214631_Annot_ID_187969 3000 nt of promoter + ATG
cctttgtctctgtagtagctgtagagcctttcgacaaaaagatccaaatcagcaattggttgaacatttaaactctctccattaagaagtcccgatgggctctcactaccaggacttggtattcctccgtagttagatagctcaatctcgtgtgactcattatgaagcaatccagtagtcaaagacgatgatgattcaccacgttgccatttaaaaaagttacgtacatttggacccttatgcccactgctcatcatttgtaaacacagacgattggccaaaacagccggtccattccctgcttaccacgcggaaatttgaagaaagtgtagtgcgcaatgagaatgcaactacaaatcctgcatcaaacatgaataacataaagcatccacaatgcaaatcacctaatgacagagataatttatgtatgcaaacaaaaaagtgccactaaaatgttcaagctagaagcacatacaatgaatatactaaccaatgagacactaaggcaaatcaaatccttaaacgcagaaagacaaaccaaggatacggaactcgtggcataacctgctaaagaaatgtttctatatctgttttccaccatgatggatataaaccagacccacctatcctttgcttgacactcaaaagactattcgatttcaaacacttcctttctttttcaacaatagcattcatgcacaagcagaatctttggacaatgcactaaatgcctagcactctgatgacaattgatggtgcagagaaagcgaagacgaagtaatctatactcaatcaagaggctgacacaagattcacgcaacctttgcacaaccaatagaccttgatcaaagtcaattacctaaaaccaactctatttttcacaagaagacgaagcaaaaacggcgaattccttcccaatagaacaaggggtttatctacttttaacagggaaatgatcaggagcaatacgattctaaattgaaacctcaaaaacccttaagctaacactataatctcctccaaccttaaatcacagtgcgattaatcaaaaaaaatcaacctttctcgataacagcagatgagaaaatcaaaacttaccagagacccacgaaaggaacagcaattagaaagcgaaggtctataagcagctaggaagatataattgtcttaatatccgaagctttagagaaggaggaatcaaatacagaggctatgggcaatggaaaattcgatgaagaagttgaaaagacaagaatttgatcgacgaatttaggggagaaaagcaaaagaagaagacgaagagaattgggtttgcgtggaagaaaagaggagtgataaaatattgatgctttggagtttggagtactagttttcaattttcgatttgggcttttcttcttcctcttctcttctcttctcttctatacaacattacttaaccaaagaaacgtgatcacgagttctcttcctcttctatgattttggttttactttgatctttggttaaaaaggtaatctaacatttattagcttgaatccaaaaaagtctttgcacacacaaaaaaaaaagtcttgaagccaaaaaattgtaatttttctttaatgtgatatattgaattttattttaacaacttgtataatgggccgattgttttgagtgggcaccggcccagattctaaacagacccaaaaaaacaatagttaagatgtacattatattactaactttaaaattgagttttgaaaatatgatagtgagtcagttgacataaattttggatctagatcagattcttggtatcaagatcaatatttagtctcagagcataatataatacaaattgatacatctagctcctttaattttttaaatgttaatcaaaaataaaaactcatgaaagttataattattttataacggcattatatttttttttgtcaactagacgataaaccgataaaagaaataaaaattggtatttattattataatcatcaaaacttcatatattgacataaaacaacaaatttaaataagagtatatagagaaataataatatcggaaagtataacatttaataaaaagaaaagttgaagttttgttagtaagaaaatagtagtaatgacaattgaaaagaatctcataatcattgaaaatttattgaattctttgatttagaatagggatgtggtaatattcaatgtttaatatttatgtgttttcttttaataatcaatatttatttcatgattttatatagatttcctcattagcaaatataatataaaataaaatggaaacgacgaaccttaataagaaaaagttcaagtatatacagaaataacaataccggaaaaatataacatttaatagacaaataaaattaaagttttgttagtaaaatattagaaatgacaatagaaaaaatatcataatcatttaaaaactgtttaattctatgatttaaaataaggatgtggtaaatatattcaaagtttagaaagagaaacatagaaaacataaactaaaccattgattatatttgatttgctgggctaactgttttatcttaatattttactgttgataagattccttatgatgagattatctttgatttttcaaaaaaactataaatactgaacaagcagcataaacattgcacgacgaccttatataaatcatgttcatataaaaaaaatcacaagttgaaaaaaagaaatctggtctctttggtttgcatctattagattcgttcagagacagcaattcataatgggcctaattaatgggcttcttcgtagataagtgttttcgcgggaagcaacgggttaataggcgcgggaggtatacgtggctttggtacacgtaggattgcgcgccaaagacctaaataaatctaaacccttcttcttcttccgtcgtcttcatcgtcttcatctatctcctccactatctcctctctgcatctgacactctatagacattgttgataaaa

SEQ ID NO: 13496 - DNA, 3000 bp, Unknown
  misc_feature (1)..( 3000): cDNA_ID_3030387_gDNA_ID_2214631_Annot_ID_187965 3000 nt of promoter + ATG
aaatttgaaaagggatttcaagttcgaagaagggacgaaccaaggttagaacccaagttctgcacagccgtggataaaacacattacacttactagtagcatatgctttatatattatgtgcatgtcatattttctattgagcttcttgttatatgaacataacattgaatggtttttaagaggcatctcctctaatgcgtcaagcgattttgatcgttatctccagtttcacatgttcatctactttctaacagttaatctttatggacacaaacatcctctcatataaataagcttgaccaaatttctgaatgaacaataacttataataaaccactatacttattttttcacaaactatgtttcatatctccaccaaaaaacaaaacaaataaacataatccaaaaaaaaagcatagggctttttggccatcggttactccttcaaagattgctgatacacaatttagaaaggaaaaaaacaattttaaagccatattttatttagctatagtaaacacaggtttcaggctttgtgctagaatctggacaaagtttctaatcataaatgttggatcgaggaagtctcatccagtttcagttctcggtcttttaagaacaaagaaaaagaaagtcaatttagttaagctaaaactgtgacgcttcaatcgatctttattacagaaccctattctccaaccatatataaatggaccaacaattttgaccaatggttttcatttttctgtttaggttttggatctgagaaatatctattttgtctttgtgccaatattagtggctgtcggcacatcaagaaaagaccactctcttggggccacagttcgatctatctttttctcttaaaattctttatcaaacaaaactcaaaattaatgatttcaactttggagaaagaaaaaaaacaagaatgatttcaaccgtaaaaatagttattgcagttaagacgaaaaattaaaaaatgtggtattacgtgtacaaccgttggataattggcaataatgaatcatgtggttactgcgaactttacaatttttctatcttgctattctaaatttattttcaagctttccctatgaaaaaaaaaagatacgaattagtaattctaaaaacaaaacgaagtatatgtcaagggaagattttgtaaacctacaaatcagtaactagctttatagaacttataaattgctattgtataccctaattaattgttgtcaaatttgttgggcattaactaattgctgttgtataccctaatttgttgggcattatacttaactaattaataagttgctgaagccgatgtaaaattaacaatctggtgaaatagtgtgatagacatatcacatatacaccagtcttgtctgtttaaaacatcaattatttaaaacaatgttgcaaaacttttattattgttgttatgtgttactcatctatcattttgagaaagagtgtcattttgaccaatttcacacaaattaagaaaatattaaaactacaagtgtttgtctctatttaataagtgattaataacttaaattcaataaaaatagttgaggtaaaggtaaactagaaaattagttttaatttaaaaaatagcattgaaaatgtaaaacaacactatttgcgagaaaacaatttgtggaacgatactatttgtgaaaaaaagaagtactattaagtttaaacactattctttatttttagtttctgtgtttcgttattaatgtaagacaatcccaacatgaagacaatctcaacgcgatgaaaaaaaaaataaacaaaaaaatatttagccttaacatctaagtaccacatggattttttttcaggttttttggtatgcaagatcagttcaatacccgcctataagactccacactctaccctagttttgagaacacatgacatgcaagcgacctaatagttttgacttaaccttgtatcttctataatttgtaaaatggatcagtacataacatccttgcctacatacatctaaccaaaagtttatcctcttattccacaatttcttgctaaccttagatatgtgactgctactctttagtcatcggatttaatatatatggttaatgtacttatgaaaactgaatcctttggttgggcctttgtggtatgtcatccaagaaatctgacaagaccagacttaaacgaacaaattcaaaataacaacgattgtcatttttttattgtatcggaagacgtggaagatggtatttgatgcccggggaggatggtgtttcttaatatacacactctaaaaacatttgccacaaatgagatcgaaatatactcaatctatgcattattttattttatttttattattatgagtatctattgttaatagtatattcgttaattcacgtattgggaaatgtttctttttccagtcaactcttttaagactttcagtactatcgttactcaatattgcctcgaaggacaataagcgggtcctaaaatcgagtctgtcaaagcttacgtggcacttgtttgccacatcaccggtactaatgatctcatctattttgtcattttctcgccgcctaacgtcactccctctaaacagttttacgccacgtgtaaataaaaatcacccatttatttttctttgaattggaggataggtccgtataaaatcttgtttttttcccaaaatacattgaaaaagaaaataccagttttgtggttggtccccattcggttgtgttaaaattttattagttttttaaggcagccatatttgtctaataggacctatgataaacaatataacaataaaatacttcccactttcatatatcttataaattccgtgtctcttatatatataggattaggttttgaaataaacttattgccacaacaagaagagataacaaaaagaaaagaaaaagagaaatcgtaaaaaaaaaaaaaaaaaaaaacttatggaatattcccaatcttccatg

SEQ ID NO: 13497 - DNA, 3000 bp, Unknown; identical to SEQ ID NO: 13492
  misc_feature (1)..( 3000): cDNA_ID_2703152_gDNA_ID_2214631_Annot_ID_187964 3000 nt of promoter + ATG

SEQ ID NO: 13498 - DNA, 3000 bp, Unknown; identical to SEQ ID NO: 13490
  misc_feature (1)..( 3000): cDNA_ID_1807426_gDNA_ID_2214631_Annot_ID_187961 3000 nt of promoter + ATG

SEQ ID NO: 13499 - DNA, 3000 bp, Unknown; identical to SEQ ID NO: 13495
  misc_feature (1)..( 3000): cDNA_ID_2703136_gDNA_ID_2214631_Annot_ID_136057 3000 nt of promoter + ATG

SEQ ID NO: 13500 - DNA, 3000 bp, Unknown; identical to SEQ ID NO: 13494
  misc_feature (1)..( 3000): cDNA_ID_2703132_gDNA_ID_2214631_Annot_ID_136058 3000 nt of promoter + ATG

SEQ ID NO: 13501 - DNA, 1295 bp, Unknown
  misc_feature (1)..( 1295): cDNA_ID_2703122_gDNA_ID_2214631_Annot_ID_136062 3000 nt of promoter + ATG
gaatatgagttaaatatatagagagggagggtttactttttttttgtcgtcagggagggtttacttggattcttatggattgactttttagttggaaaaaattggttctcgacatttgaactagaaaataaagattgagactgattaaacaagttaacacgtaaaccggttttgtcttggaccgcaagatttcttgctcatacggaagggcgaagaagatcacgcgtctcacgaatttttaagcaaataggaggaaaatgcacccgggatgttattacggtccaacttgattagtgtattcccggtttgattttctgacaaattatggtgatcaatttcatatttttttgcttcttgtagtacatgttggattttttttgttagtacaatattctgaaaattttgatggaaaatgcaatcatataattatagcgaaaaaaggctgcaaagctaaaaaaaaaaaaaatcgaaacaaaaacacaacaaataaactaaatgagaaattcaactagcagtttttcaagaagaaacactgattctgaacgccgaattaaagatggacattcgcgtaattgtcacagttccaaaaatctcgagaccttatcgtcgttattacgaacaatctctaccctataccaagcttctaacctcaaagagacgctaactgctgtttcgaaaactaacacaaaacatgtcggatttaatttagcaatgtagctcttacgtggtcaaaattctcatttttgttccaatgtaaactagaaatgtacagatgttttccgaaatatacaaccaccatgattcaatcgttcgacggattctgcgaattcgtccatgatttgttgattttttttgttaatatatttttcaccaatgctattttcttttttcttttttcaattccctattgtcattttatagccataattttatgttcacataatcttttcttcctgtctcaaaaatataaaacaacaagtgatagtaatcatcgtctattgcataacggagggtgcaaattattgatttactaatctgatatcaaattaaatcattgaataaatctgattatcaaaataataattgaaagcaataatcttaaaacagactttttagggtaaaaaagggaaaaagggttaaacggtagaaacacaatctggaaaagcgtcgccgagaagctttactctcacctgaaacattcctcaatccgtcgtcatcataatcatcttcgatagagaagccatacgtataaatagtactctcgcattgtgtaattgtctcttaccggagaaatg

SEQ ID NO: 13502 - DNA, 788 bp, Unknown
  misc_feature (1)..( 788): cDNA_ID_2703209_gDNA_ID_2214632_Annot_ID_136063 3000 nt of promoter + ATG
gaattcccatgcttttttttatcattaatttctcgtaatgcaaatgtaaaagcggataacttagcgcgaaaagttcgcactgaaccgtttcatataacttatgtaaacaacattcctcagttttggctcgtttgagtcctaattataatcggatgacaaaaaaaaaaaaaacaagggatttttaagtagattttagaatcactagttcaataacattagattttatgaggcttttaaaaatctatgattgaatagcatatgatttgttattttaacacaaatcacttgaaatgtttgattgaatacaaccccttagagagttttctataatcttgttgattattttttcacaatcttttaaagttttcaaacaatctctatattttgatgatatttttcataactttattttgtaaagaaaaatgtagaaagtcataaactaataacacaataatttaactcattaaaaatcatagattattttgttttaattgaataacacaaaacttttaatgactttattaaagtataaattcaataactctagatttataaagattttaaattagtttttataaatcttaaactaataataccaaactttaacaaactttttaaaaatcttgattgaataacaacagattctccataacatattaactcattaatactctatttaaatcacaaatcaataacacctcctaaatcagtagcagattttctaagaaccttaataaaaaccaaaccctagatccatagagtgctcggcaattaaacgtatactcatg

SEQ ID NO: 13503 - DNA, 3000 bp, Unknown
  misc_feature (1)..( 3000): cDNA_ID_2703187_gDNA_ID_2214632_Annot_ID_136071 3000 nt of promoter + ATG
aagtatgtgaggtcatcgagtgaaagactcaaatctttaaatctagggttgaggcatgaaatgtaagtaaataaaacttatgtctagatgttgttactaggtggaattcgacttatcttatgctcacagttgcaatcacgtttagaggtgcatttgataagatgttggctgaagataagttatagaaaagaatgaagatgatgatgctgatgatgataatgatggcaaacatgttggtcctccatcttctgctagttagctgggatgaagtgcaaatgttagttaagtttctgaaaatcttttttaattgcattctttcctcttcaacatttaaataagtgacatcctctatttggtataatctaatgatgatggttatgagatgatggactctttgtacactaagatggtagcagagactacaaatatagaatctagtaaggaacttgacatttacctgcttgaaaaatatgtgctaagaattacaagtggtttgagattggattatgatgtcttaagatggtggaggaggaatagttctaaattgcaatctttgcagaattaacaagagatgtgcttgtcatacatgtctcctttctcaatttagagtctgcattcaacactagtggtcgtattttggatcctttctgaagttgcttgtcaccactcatggttgaatcattgatttgcattcagcaatggctcatgaatatcattagttgagaagttagcaaacctgattcagatgttcgaagaattaaagttttatgagtctttaagtactcattttctctctatctttcagtttttttttgttgttatttttatatctatagactcaactacattttatttgccttgtgtagcttctgagagtactcatacacaatcattagttgctcattgacgtggagttgaaaattgaggtatatttgatatatttttttgtcattcatttacctgtgagagccttttcttttaatcagtaatatatttttattttctttcacaacagacaaggtgacaaatgcattaagatttttaagcggcttaaaggcttgtcttttctctttatttattttgtataactaactctttctcttttggcatcgacaaaacaatgacaacataccaaatggacctgtaagaacttaggcagaatggatcattggtagtttgtcatttgtgtcaagttacatgttttttggaacaacttatgtatcttttgtatatatcacgatgattaaggttcgctactaagttgttgttgtattaataattgatgcgtctttttgtttggttgattttacattcgtttagtgatcagaccaaaaaaactgaataaaccatgtttgaactgaaccaaagcgaattattaatcggttcgttttagaaaaagttcattttccaaaaaaaacaaaaatcaagtaacggaaacagaattaactttttcggatcaaaattgcatgcctataaaattttatgttattaatccaaatccatccaatcattttttttcgtttttgaaaccgataaattatttgttattgtttgtgaacaatattcaaaagtcccaaatcaataaaaagaagaaaaaaactaattatgatttggaaataaaaaaagaattaatcaaatcaaattaaaatcctcactaaattgtaaacatggtgtacataatatgattacgtgacaaaatattattgaaaagatatccaaaaaattgcaaaaaaaaaagaataagaaaaaaggccaaaaccaaattctcaattctggtcggagtttgtctttataaaaaaatcttagaagccatatatattttctgtttatatattttgtacaacaaactctttctcttttagcgtctacaaaatagtgacaacataccaaatacacttataagaactgaggcaaaatggattattggtactttgtcatttgtcaagtgacatgttcttttagaacaacttatgtattttttgtatcatgaatcatgatgattaaggtttgctaccgagttgtttttgtattcataatttatgcgtcattgttgttaacttgttgtttggttgattagtgatcagaccaaaaaaattgaataaaccatgttcgaactgaacaaagcgaattattagtcaattcgttttaggaaatgctttattttccaaaaaccccgaaaaatcaagtaaccaaaaccaaattaaccgttcgaatcaaaatcaaagacctataaaattctatgatattagtccaaaactaaatccaaatccatccaatcatcttgttctttttccgaaaccaaaataatatttgttattatttatgaacaatattcaaaaatcccaaaccaataataataataataaaaaaaaactaattaggatttggaaattagaagaacaactaatcaaatcaaataaaaatcctcactaaattgtaaacaggatatgattacgtgacaaaatattattgaaaaaatatccaaaaagttgcaaaaaaaacaaaaaaaaagcataagcaaaaaaaaagagaggccaaaaccaaattcccaattctggtcggagtttgtctgtaaaaaaaaccctagaagccatatataaacaccacaagtaaactcgtttcttcaccttccttctctccttcactctaattgcgattgattctcctgtcttctccaatttatcaggtaattgcttctgcttcatacttcataccttattttccaatctctcaatccatctttgtattggagcaaagtttatacctttcaatttctcaaactcgactagttatagatctatggaagttcagttcaaaccttacatatataatatctggagaaaccaactatgtgtacttgcaattacaataagctaatagatttcgtactataaagttagatccacatagtacaattctaagttatgcagattggagctcttgtgaatttttgtttgattcgattttgcttgagactgtcttagagaaattgcagagatg

SEQ ID NO: 13504 - DNA, 3000 bp, Unknown
  misc_feature (1)..( 3000): cDNA_ID_1808076_gDNA_ID_2214632_Annot_ID_136072 3000 nt of promoter + ATG
aaaagactattcatcttcgaccaaattgtggtcaagaatctgctactctctctgttgttgagactagtgaaggaacttataagcttgaggagactacttctttgggtgaattgcattttattggttctacattacagcttagaggaactagtcctataaggcaaccattggtggattcttctgggaacattctagcttacaatggtgtggtgttattcttaaggttttttgattatcatatgttttctcttacactatacgatattgatttgtatattttccgtacaggcgaagtatttggtggaattgaactcaacagctatgataatgatactgaagtgcttttgaagtctttagagaaagcaaaatctttagttccagatgttctttcgatgattaaaggtccctgggccattatatattggcaggtaatttggtaacctgctgctatttgtttatgtagcatttttttttactttctctaagagcatttttctctatcaggaaagctcgagaacgttatggtttggtaaagatccgtttggtcggaggagccttcttgttcactcgccaactgtggaagaccctcgttttcttctatcgtctgtttcaccagcttcttcagtttctcaaggtgctggtttgtattacttagtagagcaattttgtctctttatgtacactccaagctcaagtaacatctgttcttttgcaggattggatactgaaaatggtaatagccttcatagatattgggaagagcttccatgtggcgtgtacagtatttcttttggggtttcagaattatgtattcatggtgaagttacaaaacacgaatggagaaataccatctggaaagaattgattgaatgggaaaggaaattagttgtacctagacctgaagatctatcaacgtcatcgcttagtggagttcaggaagacaaatctgtgtcaacttctctaggtactgcttaagaatcgtttgattcctccagtcctgtccaaatctcaacatgtctgacaaggtttagctttaggatttgcgcagacagttttggtcgtgttaaaggaatcagtgaggcggcgaacttcacttcatagcatttatcaggtatgagcttaaacttgttttttctctgaagctatgtgttttcttctgaacaccttcgtattggcataaacagggagataaagaagctgtcccagtagctgttcttttctctggtggattggattcgatgattcttgctgcgctgttgcatcagtgccttgatccaaaatgtaaccattcccccacactgtttctgtctcggccaacaattctgaaactaatcaaaagaagtaatatctatttcttcagatgaagttgatctccttaatgtcagttttgatggtcctaatgctcctgataggatctccgccaaggctggaataaaggaactcaaaaagattgcaccttttagaaggttgaacttcaaaagccttttatgaaaaatgcatatatctgttactatctatgttgatacaaatgtttttggaattttcaggtggaaacttgttgagattgatgctgatctgtcaaaactaggctttgagacaaaacgtgttatgtcactcataaatcctgcagacacttacatggtaaacctcaaagtcttgagcattgtgattacattcctccgaacttgatgtgaattattcaatctttttttgctatgttctaggaccttaacataggaacagcattatggttagctgctcgtggtgatggttggattcacgaagataatggaaatccaagtgtagaggaaaataaccagcgggtcaagtataagtccgatgctagaatcctgcttgttggcgctggtgctgatgagcaatgtgccggttacggtaggcacagaactaaatatcgaaatggaaggtatatgattcatttatgtatacatttcttatggatgtaaactaatgttaacctcatcgcacaagttttattcatttttccagttgggttgcgttggatcaagaaatgaaattagatatgcagagaatttggaaaagaaatttgggtcgagatgatcgatgcattgcagataacggtaaagaggtatatgtcatcacgccacaaccacaaactcaaaaaaaaagtttattctttgtgctttgttcttaaatcttaaacgttacttgttcaggggcgattcccgttcttagatgaagatgtgataaagactctccttgacattcccttgtgggaaatcgctgatcttgagcaaccaagtggaacgggagacaagaagattcttagacaggtgagtaattaaaaagataccatttttactgtaagaatgcctcaagaacattccagaaacttcataaacctgaattgttgcgtaaaatcttgaaggttgcaagcctgcttggtgtacatgaagttgcaaagatgcctaagagagcaattcaggtaagaagaagagaactttctgagagaactcagtttcaaacgagtaaagttgaaatctttttgttgtgagctctctctctctcactgttgctttggactttggttgtggttttagtttggatcaagaatcgctcgtgaatcaaaccggaagaattttggaagtaaccgtgccgcaaaccaggcttctgccgggagcgtgagattcctagcaccgtcacactaattccctctgattcatgttagatcaatcattgttatacattgtatcctatacaaagagacattctttcaatgatctcaaaactggtttgaacactgaacacaaatggactaataagaggacatgttaagacttaaaccacttggttcggtattttgctcaatttcaagggtaaaattggaaaaatcacaagaaaaacaaaagccctaacattattgtctaaaatcaattttctcctccggtggtgatctctgtgctccggcgcataaacccctgtaaagccaataacttgttgttccccaaagtttggttcttc

SEQ ID NO: 13505 - DNA, 3000 bp, Unknown
  misc_feature (1)..( 3000): cDNA_ID_3594203_gDNA_ID_2214632_Annot_ID_136073 3000 nt of promoter + ATG
ctgtttacacttatggactcaaacaagccttcatcatctgcaccaagagttgttgttgtagcatccacaaataggttcttgtctaccttaagcataatataagttgattatcaacattggttttgaatgcaatgatccaatggttttccccgatcttgtcaaaagggtggatgcgattgacccagcgctaagaagagcgggacgatttgatgctttagttgaagtgagcacaccaaatgaggaggatcgtttaaaaatcctgcaggtaattatcgagttcttaaatgggattttcgtatatagtaagtttgtttgtgatcttcatgttttctatttttttcagctgtacacaaagaaagtcaatttagatcctagtgtcgatcttcaagccattgcaatatcttgcaacggttatgttggagcagatttggaagctttatgtcgtgaagcgacaatatctgcaagtaaaagatcttcagattctcttattctaacatctcaagacttcaagattgcaaaatctgtggttggtccaagtataaacagaggcatcacagttgaaatccctaaagtgacatgggacgatgttggtggtcttaaagacttaaaggtcaatactttttaaaaatattcattttgcactttgttgtcctgttttctccattgcgattaatggtttttttttccttgtgacagaaaaagctccagcaagctgttgaatggccaatcaaacattcagctgcatttgtaaaaatgggcatatcgccaatgcgtgggatacttctacatggtcctccaggttgctcaaagacaactcttgctaaagccgctgcaaatgctgctcaagcctccttcttttccttaaggtatagattttgatagatcacatttaacaaaatccccctttggttgtgaaacttgtttaaagaaacttattttttcttgtgtctttgtgtgggtgtgcgatgcagctgtgcggagctattttctatgtatgttggagaaggtgaagcattattgcggaatacatttcaaagagctcgacttgcttctccaagtataatattctttgatgaagctgatgtcgttgcctgtaaaaggtttgtctctatctctcccaactcttgcttcgtgttatagactcttcttaacatgtttatttccttgggtcttcgtagaggtgatgagagctcaagcaatagttctacagttggagaaaggcttctatctacactgttaaccgaaatggacggtcttgaagaagcaaaggtaaacaaaagctcataggcttttaaagattttatctttgttattgggttgcaatgatattgatcgggttttggtttaagggaatcctcgtcttggctgccacaaaccgcccgtatgcaattgatgctgctctaatgcgacctggtcgatttgatctcgtaagtcctcatattggatcttttgatcacacgagttctgaaatagcaaacctcattgctaccctcttcttgatttaggtgctatacgtgccaccgcctgatctagaagcccggtttgaaatactgcaagtgcatacacgcaacatgacactaggagacgacgttgatctcagaaaaatcgctgaagaaaccgatctcttcacaggtgccgagctcgagggtctatgcagagaaagcggaactgtctcacttagagaaaacatcgcagcaaccgctgtcttcaatcgccatttccaaaccgcaaaaagctcgcttaaaccagcgttaacaatcgaagaagtcgaaacttattcatcattcaggaaggcggcgaaaagatctgattcgaaaccgattccgattaacaaaaagaaggcgacttccaccgtcttcggattctcatggcaattaggtgttttgagcttattgttgcttgctactggaaactattacttcaaccacactaaacatgaattactagtagcttctgctacatgagacttgaaacagctcaaagttaaaaaaagttgctaattttgttttattcataaataccaaaatatcttttgtttcaaagttcaaatttttaaataataaaacggctaatgattattagattcgaacaatgacaaagattggccattacacatgaatggcccacgaacctcaccaccgtcgtgaaatttctttaagcaccaataatttcactggttatctcttactaattaattactttttacgtgttctaatccaaatcaacaataattatctgatatttcttcataaaccggttttggaatttagctgaaagatgtgaattttattttgtcttattaatcaaaaaatttgaaatcgttttgatttcaattaaaccggaaccctgacactaacaaaaaccggtctgagcttataaatagagtggctcgctgatgactcagttagtcagctccgagtctgcgttttacttcttctccttgagtttcttcttctagatctgatcgcgaatcaccaaaaggtttgtttcttaacccctaaaattcctccagatcgctttgatttcgtttctctgatgtcttagacgaagttagatcgtagattcctatgttttgattcctcgatcatgcttcgaattatggtgtttttatcctcaatttttggagatttggtttctacggattttgtagattcaggaatttagaaatggtgattcgatttcaatggttttagatctgattcagtcttcactcttgttccactattttgaaaattggctaaaaactaggtttcgtcgtctaattctcccgacgttcttcgagaaatgtgaactttgaggtgaagattttgcgttagcatatgtggttttgtataattgacgttgctactattctgattgtgaattttaagcagcattcacaattgaattgagtcttcactttgttcagctctgaatctatcatctctgaatgttggcaagttatagtttcttattatatttcggtgttttggtttgttgtgctaggttttattttataca

SEQ ID NO: 13506 - DNA, 3000 bp, Unknown
  misc_feature (1)..( 3000): cDNA_ID_1014819_gDNA_ID_2214632_Annot_ID_187997 3000 nt of promoter + ATG
gttttattaaaaaaaaaaaaaaaaaaattggagaccggttctaagaagaattttttagtttagcaaatagcaacgacaatattatccggcgtggctattagaaaatattgtaagtaattacttaaagttaaagctaacgaaatgtttggtctattttattgaagattcgtggaaaacatgtttgtttggctgattttttggggccacgcctggagaagattcatggattatacatccatcatatcatcttactttataaacaagttaatgggaataatataaatggtccagctagatgtggtcaacaattattatagtggtttggatggatattgacgattcaactatatacactattaaacattataacaaaagttaaataattttcttaaaacattataaattttaattgtaggaaaggaatcacatttttaatacataactaatatttaagaactaagattatataattaattaaaatatgtatatggcatgccatctgattattttggcgacagagtttgctagccttaaaccctttacagtttattctgttttatttctatctttcagtcacacgattacattacgaggacacatgctcattgtttgtaagaaaattgaagttaaattttgaatacaaattcttttgttattattagtccaattcatagccaagtagaagcggccaatgatctgaactttatatattttatattttatttttatttaggttttctggacataaagctgatgtgaatcgatcaatcgaacagatgtgtatctttaatttaaagatctttttgtcactttcacgtaatcccttatagttggaccatcggaccacggttttcgttaaatgttttactaactaatggaattctgattttcctagatcattcttaaaacataatattcatgatatttacatcttaatcaacgcgtttggtcaaatttggtcgacaccaaaattctggagattattgaagtgtattgttactctttagtactcggtgggttccaaagttgttgagatttgatgcttatctgaaatataggtgggatatatatgaaaacaaaaactaagaaagaatagtgggccaataacgaaatttcttgagtatgttgcttcagtagttagttttgtccagaataatcctgatattaccatgcaatagatttataggattgaaaaagataaccaaaatatatatttttattaagctgaccacaagagatttgtctcaaaatcagcaaaaacaccaattggagacatgtgttaacaaatttagagatcccatactttcatcagagaaggggaaacgtaaaaccctagcgacgttgtttcaatgcagacaagaacttgtgtaaagtgagtattggggatcccattactttagagacacatgactgggtgatccaataaggtttcaaaaaataaaacccaaaaatcttatcaaatcaacatacattaaataccttgggtttatatctgatcaaacatttatagcctggtcataactgctctctcatggactcgaaatatgagtccacaagcacccacaacactcaagaaagttgttgtacaagcctatttttcacatatggcaacagaggaacaatgttctccacaacaaccaaaaggtcacttttaaaacaatcttcaagaatattatttgatcgagagatccgtaacaccatatccggtaaaaagtacaagaaaagatagagaaggcttatgcttctttggattcattaacattgtagtcttgttttagttatttttaccaagattactctaccattatattattcattttctaatgatatttacaagttagaaaaacaaaatacgttcatagccttagatttatccaatctcattttaaaaaatatatttgttttggttaaatatttgcattgatactcttttcttttgtatatctttttatttaatataaaaatgtaagtatcatttgattaggttttgcaagatattcaaactatataatcgggtctcatttaaaaaaaaaagaattaaaacatggaggcaaaatcactcataatttagtacatcgacataaacttaagcaatgaaggtcacggtgtcaagatcattaataacaatcttgagaatccgaaaacaaataaaaatcgtgaaaaagacaagaacgggaaaataacttgcttttgtacacctttattggaactacattggtttttaagaccccaaaaagatgataagccagcaacattagtaactacgttcagattttaaccatacagaaacatgcgaccggcatggccccttcttctacgcaattctctttcacctatatcccaaacatacgaacaccattctttgttatcttcttattttttttagttttgtttatttttaacttcttataatccatagaggaaggtattaggagtaacatgtgaccggcatgacccttttatcaaacttaatcacacaaagttgttttatagtcttagttgtttattcttgcaagcatgtcaaacctctgaattttaactaaacaaagtgatgtcattggttgtaattataaacaaattaatccacgtcagcctctgaggtactttcaaagattctcactttgtccttcttacaaattaaactcctccttttggttcaatttgctttaaacatgtcactttgtacttataaagattctcactttaggctacatgttgaaatcgcatactagttcttaaatgatcagtgttttcttccaagcatgacaacttaaataaatttctcttgcaagttgttagcggacgtgtttcttgtaaaagcgagtacacgtggcgagctacgaactaacaaaagattctcattggttagaaactaatttacgtcagcctctgaggttccttataaattaaagactcacttggttcctctaacaaactaaactctttccttttgattctgcttactcccaaaaacacacatttaaacatcttagagagatg

SEQ ID NO: 13507 - DNA, 3000 bp, Unknown
  misc_feature (1)..( 3000): cDNA_ID_2713781_gDNA_ID_2214632_Annot_ID_187992 3000 nt of promoter + ATG
agtgacaagttttcttcaaaatgttttctcacgattttaagttcctccatgggagctagtgtgatatatttagtatctttttttctcttgtctttatttctcgtttttttcaattctgaaacatagtgttttctgaaattattaaggatttttactattttttggagtgacatttatgaattttgccattttcttaaaattttacggatttactattttgatcatttaaaattattaaatttacgatttttaatactaaaatacatactttataagaacacataaaacctaataaattcaaacataacgaataaaacacatgttaatcgtatttttataattttatgaaaaatttacaaatgccacaaatggtaaactcataattaattcttgatttatccatacttttagacttaggaacgttgttgattcatttgtaaagtattgttctccagtttatataaccaattttttttttcttaaatttaatgtgagtggttgacataaaaaaaaggtaagttttgcaagaaccacatgaagctattttattagtacaattcgaaagaaaaaaaaacaatagtcattttcagaaactcaattattaattctgttcatttatgtatgtatatatttggggtaactagtagctagtagcaattctcttgttctgttggggagaggtcccttgtatgtacgattatcatttaatatgattttgcagaccaaaatattaaaattttgttaaatggctataggttacaaacatcattttgcagggtttcttccgtataattagactaacaaattgaaactacattaattagaccccatgatggtctaaaaccctagttactactcgatggaccataggcattttaaaatgttgagacatgattttgtaacaactttttctgcctttctgcgtctagtatttattggaatctctttcacaatttaacagctctttctggctttgcaaatatagtacatgttagatgtttcttgtttgaaaaagaacttttaaaccgtctgaaaaataaatctatatataatatagataatatatgcaacccatgcaattgctgctgttcgcctatataatatatgatcgtaagtagattatgattgttagattatcatatcagaaaacactaattcagtccgtatgtgtttcttaatccaaattaaaaaaacgctaacttagtatttacatcatcattttgtgttcaataatataaaatatatgttataataatctatcaaatctttttattaattaattatcaaatatcaagatccatttaaaacgaatcaaatatttctaagttatatgaatttgaagaatcgcttgattattttgattactctatagagtgagatagagaatagaaatcatatggagtataaaattctaaaagatatgtattagaaaaagtaactttaacctagttcataatacgaggtaacacgaatagaagttggccaaaaaagtcgtaaaacattcaattttattaattaacatttataattgtactttattgaagatactcttcaaatctttagttttgcttttaactaacaatcaagaacgtaagatgagggaagcttacgcaggttgatggtaaggggacagagtaggctacgtgtcgatctaacgttggttccaaaaactataattttagcatatgttgcgattgaacgaaacagtcatactcacatcacgtgcctgtactgacacgtgttgacatattactgctgccttttaagttttgatacacactattgagatacttgatagttgagacttgagacttcagagacgcagacaatttgttattttggaggatcattttcttattatctatcaagttgcgggattaaatcataattgacacataaccgtttggtaattatcatacatacactccttagtttgttttttcccttcttttcgtattagatttcttcctcataattctaatattcgaccagattatttagctaataaagctcgggctcgtaatagccttttctcccatataagcacatcggttccttaatggctctctctagcagaaaatctcttttcgataacttaatataaatagtgtttgataaaaaatttttttttatcatacatacacttaacacctggattgcatgaaattggaagcgaatacgcggaaacacaaacgtttgggaaacgtcaaagtgagttttttgaaaaattttagaaagcgggtacatgttgagaatttaaatttgagatgaaattctgtttttggtctctcttgtttttatttgaggtttccatttttatggtatttagcttacataggttagtcttgtggaattgaattcttgtgtagatagaattgaaatttgagaataaattgttgtttttgtgtactctagaattttgtttctttctctctatgggttactctagaaaagattttaaaataattacaatattcagttgttttttgtgtacatataaattaatttttataaaaatattacattatatacttattaagcatcaatgcctctgtagcatagtggtattgcgttcgcttcgtaagcgaaaggccgcgagttcgatcctcgccggaggcttttgccaattttattaactacatataactatatatcagttacaatatttatgggccaaaagctcttcttattggatttgactagggaatctctcagttttttttacccaatggcccaagttcttatatttcagtcatttattttcggtttttctttgaacattaaatgatgggccacaatggagttataaactaaaggccccaattgaaatctctctcaaaaactttcagtcaaatcttgagaacagaaagaaagtccacgcgaggacataagcgcgtgtgatttaaaatcgtcgtcgtcgtcttccacaccgactttaatctgattcttagaatcgccgtttggtttttaaccagagagattatctaccaaggaacgatg

SEQ ID NO: 13508 - DNA, 3000 bp, Unknown; identical to SEQ ID NO: 13505
  misc_feature (1)..( 3000): cDNA_ID_3594203_gDNA_ID_2214632_Annot_ID_187991 3000 nt of promoter + ATG

SEQ ID NO: 13509 - DNA, 3000 bp, Unknown
  misc_feature (1)..( 3000): cDNA_ID_3030441_gDNA_ID_2214632_Annot_ID_187990 3000 nt of promoter + ATG
ggcccacaacccaacaaagaaatcgaggcccaaaatggttgtagaaatttggtttagctatcaaaaggttcaagcggctgacaatagaatttgttgtctgtccaaaacaaactaccataagcttatattgccacgagtactcattcggtattttttttaatattcctattaagatttaagctgtaaataaaaataaattaatacaattcagatcaaatgaaatattaaacatgagcacaaaaaacaaagttatgacactacttactaggcttgtcaatttgaagcaaagcccgaacgtctcgccctaaatgaaatattttctctgttctatggactttgatgttttggttttattattgttccacaaaatttgatgttctaaattaatattattttatttttattaatccttaatagagaaaagagagaattagagctaatattattaaattaataataataaaataatatcaaaattagttttcttaatttgtgcgaaaaaatttcaaacatcgttcttttatgaatagaggaaatattaaacttgaccacaaaaaacaaagttatgacattacttactaggcctatcaaattaaagcaaagtctgatggccccgcttgatagctctactacttactacaaaaagataactatgtatgtgtagtaagcaaaccttttcttttttgtcggcttgtttaaattattttgagcttgaaaaagaaaattcatgtttttacttaatttaaataattttaacttttcatatttaaaaataggcaaaatattaataaataaaaactaaagaacaattttaattatcatgttagaaagttcacattttttatatttttgaatgttgtagaattttaacccttattctttttcctttattttttttgtaaataatattagtgtgataaatgatttgaaaaaattgtctgctttagagaaggagaaatggataaataagtttgttatttaaaattgtctagacaaaattttgttcagaacaagttattctctagaagaaagatttttgatataatgacaatatcatatcatcacaatcatctgttagctattcaagtaccttgtggacccaaggcgagataggctcccaatcaatcttgctcctttcttcaaacaaaagggtcaactgttatcgagataggcaagagaacggataaaccaagttcatataaatccaatatcaatcaaacaaatctcttattcacttttccatgaggatccagctcaaccaaattaatgcctcctttacgtagctcaaccaatctttgcgaattggttgtggtcctgccattgactgtgaatattttttccttcgtgtattcatcaatatatacaccaccaaatcaaaaaagatctggcaccatgtcataaatgtaactctttagaaaatgtattagctagaataacacaactaatcatagtaagcagcttatgatacttttaaaaaagatcggtagacaaatcattgaataatcggaggagtatgattatttgctacatggctaagtccaagtgttctctctcaacatcctctaaaataagatcaacaaaaaaatcaatcgctctgaaattgaaaatttgaaaatttcagttgagaaaaagtaaaacaaacacaaattcaactcaactggatcagatttaactatatatgaccatgtctagctcttgcagatttctgagccgttagaagtaagtctcgatgaaggagttctcgagacaataggctttgattgaatcgataaagaatttttgatgttttggattaccagttccatctatatctctttaggcatgtcaaaattctttttacaaataactcggcgaatgcgatgatatataaatattttagacataattttttttgtacaaggaatgtatcttaagttctagtttaacaccgtatttttcttattagattcaaaaaataaattttatatattgtaaatttgaatacaaatacacacaaaatatgtatatactaggatatgctccaaggtacataataggtctatatgttatttaaaaatgtaatgttaaaaatgtgatgatcatatagctataaaaaaaaatacaatttattttttaatgtatatttatatataatattgtttacgataagtagttttttatgttttgattatcgacgcatggatctttttaccctaaaataaataccgaaaaatagagtgggttaattatcaaattatataagttcgttctggttaaatagcaaatcttaaagtgttcttttctcacctcttcgtcaaccaagacgaatagcgaaagattcttatatactgttatcacagttaataattagaaatttagaaagaaaaatttgagtatattgttggcattcgtttaatacaattgagattatattaataattaatacaaaatacatatattttaaatagtaattagcaaatggacaaatgtaggtataaagagataaattagaataaaaatcgtttagttaatgtattttatttaattttaaaaattttaagaattaataaaaattacatttcgttgtaaatatatacaaaggccaggttttcaagttaatgtatatatatataaagaaatattttgttttctttgctaaaaatgtaaaattatgtgtgtctttattagtttctagcttttttttattttagtcgaatgtttaacatgtttttcgctgttatggtatagattgggccaacttgaaaaacataaagtccataaaatgccaatttgataagcccatataaaaaaattgaatttaaaaaaagcctacggtgaggatcgaactcacgacctttcgcttacgaagcgaacgcaataccactatgctacggaggcaatttgttcattttatagaatcattttagaagaatgtttattacttgttaaacaggctttaagtaactttcatgacaacaactttgacggaaacggagaccagaaacagacgccggcggagat

SEQ ID NO: 13510 - DNA, 3000 bp, Unknown; identical to SEQ ID NO: 13503
  misc_feature (1)..( 3000): cDNA_ID_2703187_gDNA_ID_2214632_Annot_ID_187989 3000 nt of promoter + ATG

SEQ ID NO: 13511 - DNA, 3000 bp, Unknown
  misc_feature (1)..( 3000): cDNA_ID_3030445_gDNA_ID_2214632_Annot_ID_187988 3000 nt of promoter + ATG
catctttaagatgaatcttgaaagtggcaaatgggagagagtgcattctattggagatgatgaatgagatgttgatctttggtcatggggttacaatgagagcacaagttcatgatgttggtgatggaatcaagagggattcaatctgtttcgttgaagatgatctttggccggattttgatcgtccttcaaattgcggtatcttcaatcttgccacaagtagaataacatggcctaagagatacggtgtttacatagatcaaaaacaatggtttcttccaggatttgcttagtctttgtttcactaatgcatgttcttccaaagtttaaggatgacggttcaattttcttctctgtcttattttttcactagtttgaatttgcttcgacatagaatgtgatggtgtcttctgtgttttgcttttctttctcttaaacttatttcttatcattaatcttaaacacatccagttgtttcactatagaggttaagcctaagctcagcaaaagacattagttgttcatctttacattagaagctactacatgcgtcttcttcttcttctctaacataagttttcagagagggaatactttcttgtgcttgaagtataacacaaaaccaaaatacaaaaaaccgcatccaatacctgttatcagtaaaacatactggaaagtcgtcggattctggaaaacagagtcttgcaaattcatcccgaagacagcggttacagcggcaaaaatagctgccacaaaggttgccgcggtgagaagcagttgaaactgaatcaactgattctgcacattcccctacaaaaacatggacaaagtcagagacccaaagagaaacaagaacatgattacgagacttgattttgtctgtccttaccagcttaatgttgatcagatcctctgtatcatctatatactctttcagctgcaaacacaagaacatgatcaaaatgatgaaacaacatgtagttgagtttaaaagaaagattaagaagaatctaaccgatgataatttgctcagagtgttatcaacaacgacaaagtaagcttctagtaacatctctagttgatcaatgttctctccgatgctagaggagcttaacaagcttttatgtgagccaacaatgctgctaaaggctctttgaagcttcccaaagtttccacttgttgagcccacaggtgaaaccggcgcagacttcgaaactattccagaagattcaaagtcctcaccaatgttatcttctagctcctctgacgcatgagcttcagctctttcttttttctcagtcaaatacatctcagccatgtcatcatcatcatccattaaatgctctatttcatcacaaacctgcaagttttgacctccaaaatcaaattatggtagtagggctttttcaaatttgaagagtcttttgtgttcaccttctgaactttctgtgttaaggtaagaagacgaccttttagcctgcgcacgtgttctagattaagggtgctgatgtttgtggctagttcatcaagaacgggatacacctccatctcaagctcattcacctaaaaatcacgttcaccaaaacttttgagcttaacaattagcttaaagtcatgcaataaatcatatagaagaatgatgaagagaatgtggcatacctgtgcatctaaagacaagcaagatagttccaaaaccagctccaacgctttaaattcaaatggcaaatcatctaaaaccaaacacatataacagtttcatcagcaatctaatctatatcataactccagaccaccaaagctataccaaaaccactgacctttaacatttaggttgtggtttgattgaaggcgtttacacagttccgactggtactgaacaacagatgcatctcgagcattcatgagaatgacctcttcagctgtgataatacacctgatcttctcaagactgacaactatcgctctctcacgccccaaaatactcgagggatagataaacaaagggtcaaggagtctcaaatccctggatggtaaggaacaacgcttcattatagtcgccttgtcgagctccaaaaccgcagagttcccatcttgatcaattttcacccaagaacgactagattgacctctcttcttaagaccagaaaaaggatgcccacggttagtttgtccttcgaaattaaccggtctaccaattttttgagaagatatgaaatccggaagattagaagcggaaaatggatctagttgttctcccatgtttgctcaatcctctcttccttacaatttactaatgcatcagaatcaaactctcaccattcaaatgaacagtttccagtgaaacagaaggagtccaagtaaacctttggccacagtttacaacctgaaaacaacaaaatttgacatgaaactcaaattcaatttcttcatatgatctctcttgaagaaccaacgaacctgagaaattcacagaacaaaagacaatacttttctaaatggtggaagctgcatcaaattatcaagaataacttcgtgtttaagttcttaagacactaaaacgaagaaaagtcacaaaatttgcagttaaagaagatccaattctcagattcagtatcttaattctaagaattcgatccgttaaaactatccaatacaaatcacaccgatcaattaggtctacagtatccatatccaattccaaatacatacccgaaaaaagcaaagaatcctaaaaaggaagaaactttcaaagaccatgttacagtaaagggaaatacaaaccctagattccataaaaacgttacctttcgtttacaagctttcactttccccaaacagtaaacagaagaggaagaagatgaacaatgatgcttttttttttgttctagtatctgaagccacgtgttaaaagtcaaggcgtttatctattggatagaacacggtttcttaaatagaccgtaacacagaggatcatttataaaacagaacagataagaagac

SEQ ID NO: 13512 - DNA, 3000 bp, Unknown; identical to SEQ ID NO: 13507
  misc_feature (1)..( 3000): cDNA_ID_2713781_gDNA_ID_2214632_Annot_ID_136074 3000 nt of promoter + ATG

SEQ ID NO: 13513 - DNA, 3000 bp, Unknown; identical to SEQ ID NO: 13506
  misc_feature (1)..( 3000): cDNA_ID_1014819_gDNA_ID_2214632_Annot_ID_136078 3000 nt of promoter + ATG

SEQ ID NO: 13514 - DNA, 3000 bp, Unknown
  misc_feature (1)..( 3000): cDNA_ID_2703183_gDNA_ID_2214632_Annot_ID_136082 3000 nt of promoter + ATG
agcactcctacacttatcaaccaaaacatccttcaggaaaacataaaacaaccaaaacccaaatacaaagtttgaatctttcagaaaatcgtaaaaagaacaaagccctaatcaaaagtttggattttgatgcactaccaatcggatgaacagttaaagcaggacgatttgagacggcggtgtgacggctgaggaagatgacttcatcaacaacttcaccggtagcttcttcccaacgtaaatcgagatcgtcttcttttactatagatctatcgtgttgaatcactctcgtttgcttgttactaaaactctttatgtcctgaaaatttcgacaagaacaaaatcagacgagagaaaggttgatactttaccggcggaggatgattgaaactttaccggcggtaagataggtccggcggtccaaccgggcatggcgagaagcgccgccgcagggttgatcgacgctggatcggcggtggtggccacgattagtgttaccatttttcgagttgttactgtaacgcgattattggcgtttaaaagcgattggatatgagttgcgtttgctttgagtctattgttgtgcgtgtggaggaagtgtataatgtttcggccgcttattttcaaaatcatgaattgaaacttttaggttttaactttcggaaaggtgtttaaaaggattttattttgtttgatcaacaagctaagcaattactgagttcaattggtaatcaagtttaaacgaggtaactaattttttttaagcggttaaaaaaaaaaaccagtattcggaaaaattgtaaaagatgataaaaaattgaatcgccggattatatatgatttttctatgttttggtaattataaaactaaaatttaactcagcaatttgctacagaaaaaaaaaaccgtaacaaacaaaattaaatcaaattgagtcttgaatcgagttgataagtacaaatcaattttgtcgatttttgagtcttgattctgtgataggggaatttaaatgttaaaaggactaatcaaaaacaaataacaaaaatatcatttcaaataattggttagagtaatttagcaatttaaaaacttttggagtttttttatctatattaagaaaaagaaaagtatatatcacatagaaagtatataatataatatcacatgcataactaatgtcaagttttttttttctgaaattatgagccgaatatgtcttcttatagttttttttttatgcatagtgatttagtttagaaatgaggtatagtagataaataactttttttttctgtgcgcgaaacttagtaattaaaataacatccgctaaaaactaggattgaaccagcagtaaattgcgagagagaaaaaaaattctattttaatttgttgatatttaatttttaagttttcttaatttattacgccaaagagtatatattttacagtaagtatatatagaataagattatgagttggtcatcacaaatattattgttttgttagttatatataaaaaaacatttgtaaaataaattaaagtataatatgtatgttttatggattacaagttttggggatcacctgttatttatttttttaacaataccattgtcatttatgaaaatcaaattaaaccaacccacctattgaatttgtctcgcatcatgctaagatattttgcatacttttgactgactaatcttcaaaaatccatctaatgacaatgaataatataatctgattaatccatatgataacactaagtattgtaaatttgtttaattttgtaacctagatacatataaacagtcatatatcatcaaagttatgatccataaattattgacaaaaaaagtcatgatccataaattgttgaaaaacaattcataatccaaatgattatactactttaaatggaagacataatataaagtgtttgttgattcatgcccgtttgagagttactacacttgaaactgaaacttagagaaaacaaaaaaaacaagaaaattatctgaatgacagtcgaggttacacaattcatcactaagaaagaaaacatatattttttctctagagagttacattttctaaatcattgtttcacggtggtttatgaaatatttggcagcaaagtcacactgatgagtaaattttggctcatgaaaatttaataaattttggctggtaaacaaatagataatatgttgtgtgaacaaaaacgtataagtttgaggaacaaccaaatatagttatatgtttgcttaatagacttagctttcattttttctaaaatgatatccataaaattattataagactcataatttattatgtgacattttataacataaattgtatgtaaacctaagatatataaaataattttaaaactaattttcgattattcttcgattaaccgagtaatcattaggacccatcggctgtctaattaacgactaacaatattttgaacatggaacaaaactaatcatctatataggaattaccatttaaacgtaaaaccaacaattactaaatgctcatttatcattatgaaatcaaattagtattaaactcaaatccaattagttcaaaatattctctaacatctaccatcatagtttacaagaatgttggtcatctcaaattgatttatgcactttattgaacactttttgtacataaaataagctaggttgtagaacacattcaaaattaggaaaagaaaaaaacaatatactgtaaattaaccttaattaaaaataccattcaaaaccgtggagaaaaaatgaatcaatcaatcctaattacaaaaaactggtgctgcccaggatcgaactggagaccttttgcgtgtaaggcaaacgtgataaccactacaccacagcacctgatgtctccttattctctcgtttaatatttaactttcaaactaaagcatcgcgaaataaacctttgggcttcgagtgagcatcggagaaatcagacagatg

SEQ ID NO: 13515 - DNA, 3000 bp, Unknown
  misc_feature (1)..( 3000): cDNA_ID_2994531_gDNA_ID_2214633_Annot_ID_136085 3000 nt of promoter + ATG
attttaaccaccaataaaaatatcaataatgtaatttacagcaattttaggcaaatctcacactcagacaagggttagagatgactcaaaaaatgttggatctgatattaaaaaaacaaacaaatacaaacacacagttactatcctttagttacatcatatatatgtattacgtcgttgctttgtgctatatagctgacctcttgctgatatttatattttcgtcaactcttgatcaaacacagatgccacgtcgtttctatactgactctcctcactctcttttatcttcttcaacatcttcttccctgtccgactccgcattcttctcttgcttaactaagctaatatcaccatcttgcttcccccctgtcagagattgagcttcctcgttttcttcatccacgtctcccgaatatgcatatctgtccatcattagtttcatattagcatccctatcacacccaggaacaccaaaattggaccactacataagaaccactagcatgtagccaagacttcccacaacatgctcagctgaaaccgtttccacaaaaccatgcttatttgttggtatgcccgagaggtatcaaaaccttttaagttgatgtaacatacctttgggagttctgcgagggggtccagagatagcaaataatacatagcaacaagaatgcgataacatcccagaaggcagttatagtccaagcagtctgccatcgttcattgaatggatctgttgctttgaaatacacctgcacggggacaaatcatcaggcaagcaagctgggtatattccaagaaagaaggagcttcttttttcctagcttgaaacaaagccagttttagttgagcagtttgtttcctagaggtaagatttgagtttactaaatcagcatcaaatcaggcttgacaggatggtacctcatacactatccacgcaacagaggcaacaaccatcacagcgagtgcatttgagaacttgcggtaaatttccagcttcaccgaggtccttttcatctgcagtaataaagaattttatagctggtctgatgaatcttgcctcaaaacccttacaacttacagagtctgatggctatatttagaaagaaagagatacctgtaactgttccagtgttttcgaaagagaggtaaatatccacaatatgagaaatgcatcgaggaaggcgtcaggaaggacaagaaaaagttttgatcttccggacatatcgtcaatgatgccaacgtgctcagcaatatcaaggatctcagaagctatgaagtaagtaactccaacaaggaggactttagaagtgagaccaccaagagtagatttgacaaccccaaatcccatggaaacacagagaatgagaatgcgggaaacagtctttctcaaggcaccaatggtaacaacccatgtagtaagggctaaaggcctcatccccgtgtgattaaaattagcataatccaagtaccaaaagagcatctcaagcaatcctagaagaatgacggcagtaatgcaatgttgaagtggcaatatatccatccggaacctcaaatactggaagaaccagacggcactgagcaacaaataagcgagagacatatagacatagaaattcacgagtggagccatcctaccaggaagatagccgtcgggatttttccaaacagtctttccggtcattttgaggcccttaagttgtggatcacaagatatgaataagagattatagattccagtcttggtgataagaatctcagtgtctgccatcttagcagacgagcgttttcctttaaagcggacaggtaagaggataggccattgagggtcatgtggagaaggaatcctaatgatctcaccctgcttacagccttgaagcttggccagatctggagtgcagcaaatagatctttggcctccgtaagctgaaccaccgatattgttacgatcggaggcttcaaagatcactgcttgaactaacccattgctgcggtggcccttaccggtaattgtcctccagagagtgatgttctcaaacctgcagtgaggagggaggatgagtagagtagagtagagagcatcaaaagagttgaaaatgtaatccatagaatatacctgattaaagatcgggaagaggcgaagatgccctcgctgccaccgtagaggaggagagaattaccgacatcgtggaagggctgggaagagtagatgtgggcggaggccccagcgattctaaagtgtaatgatagaagaaatgggcacagcagcgcagacagctggatcagttttcccaaatccattatcggggaacgaggatctctgaggctaactaacaggaaggaagcgggagaagagcagctgcagagtcgctcttgttctagctgctgctgactttggtggaccaaccaacttaatataatggtttgggccttagaatggtttgggcctataccgagaggcccggcttacccagaaagaaatgcagcaatagtcaatgccactgcctggaattcgtcgatcgagcgataagaagaagactggaatttttttgaggaggactctgctccatcgccgcccgccctgtaacccaccggactcagtaaactagtctgtaacacaatatcttctatttcagataagatttagcttggagaagagcaagttccgaaaatggaggggcgtcgtgtatagatccaccacccacaggttcgtagattccataaccttggattgtgttttctttttgctttctcggcgacaaattcctccgattttagtgaacatgtctctgattttggtgtcctgtggtggatctgccggagcaagtcttaaacttgacttggactgtttttactagctaattctgggcgctatttcgtcttccttgtttccatttctatctctttctctctggccagtcctcatatgttatcatttcctagctttgccactactcattactttccctttatcgtgtttatatcttagccctgatg

SEQ ID NO: 13516 - DNA, 3000 bp, Unknown
  misc_feature (1)..( 3000): cDNA_ID_2713800_gDNA_ID_2214633_Annot_ID_136086 3000 nt of promoter + ATG
ataaaatataagttgtcaattcaaaaagttccttattacactgatatactaagtattttcttatagtagaaagagtgttttatatgaaagcaacattgtttcttagaaaatattaaatttttattttgttgatccaaaatagtttatttatatttgagaaatttaatatatgagaactgtaaaatacaacgtttggagagaacgtaacactagaaaataccataaagaacacaacccgtgcactcacctcattaccgtcatcgacaagaccattcgagatcgcatcaccagtctttattatcaaggcaccagcaaatatgcaaaccttcagaacggtgcaggcttcactaacgtgataatttgtaatgttctgttttgagatcatctccaggcctagctaactttatgctaggttattcagctgtgtatgtttaaatgcggcatgcgttactgttttgataaagtagctttagaagaatgtagtgtgttgggaataagagtaattttgttttgtgtttaccaaattacagcacaacacagacatattcattcttcatgctcgtgatagtgcctagagaattaacgacttgtgatcacattattagaggaaactcctaactaataaggattaggataaacaacactacatgtggtacactcaacaactcaaagattatctcctgaaaccttatccaactgttcttcggccccaagcagtgatgtagatggctggtcaaaggcgaggacatggtctgactgatggtaagaagtgttcaagcctgattctagtattgggtgacccactacaatatcaggtgtataaccagctgcacctctcaccaatcgaggcttctttgataatctctcctctcctgtgctctcatctggagacccaatgttacaccctgagtctggtgttaaaggctcccggtaagatgagagagactcgtcaactgagagacttttgtctggtccacagtccttgccagacttgtcttgaagaggagactcagatgttggggcaggggttgcaggatctgaatcgcccgttactggggctgagggttcgccgagtactccactgagtcgttgttgctcttcaattatcttcttcaagtactttccttgtgcttctatccgtagttgcagctgtctttgcacctaagaaaaaatcacatcaaagaataatgtcatatgtaatgcaaaattcagtgctacactgaaaatcctactaattgtttcgttgttgcttgtctttcttaagtaggaatggtgaagcatacttctagttgctcgtgtaatcgtttctgaacttccatctgcaacttgagggcttcagttatctgcattcccctgtaatctcgaaacgatattgatcacttaatctgcggcgcgaggtaatatatatatagcatcacaaatcaagctcaaagagggaaatttcacgtacgacgagccgtccaacccagagagcatatctccagattctttcttatcagtttttttccctgaaaattgaaaaaaccagttttcaggtatataggaaactggtagaatgagaaagaagatgaagaaaatcaatgtccacactaccttcagaagacgaatctggaagatactttgcaagtcgatatttctgactcaaaatacacaaatgcaaaaatcagcaagggtaagagaaagagagacgagacaagatgccacacagtttgagaatacctgtaagtgactcttgacatgatatatagttaagccttgtacacccatcactctaagaacgcctttgggtgtagctcctttggaaatcaaaggaagaaaaatgtttaggaaccctaagcaaacagacgataggctttccctctcatggatagtagtaaagcatacaagaagagcaatttgattatattggtgtgcatattattaccacagatattgatgaggaaaacatgagttactaaatttaccatagactatacaagaaaaaaggaaacttactatcagggccaccaagttgagcaacggcatcaacgaagcgttcatgtagctcatgcgtccaacgcagacgttgtttggatgcatgactagaattggggcctccgttgtctgcttccatcagggctaagatataaacacgataaagggaaagtaatgagtagtggcaaagctaggaaatgataacatatgaggactggccagagagaaagagatagaaatggaaacaaggaagacgaaatagcgcccagaattagctagtaaaaacagtccaagtcaagtttaagacttgctccggcagatccaccacaggacaccaaaatcagagacatgttcactaaaatcggaggaatttgtcgccgagaaagcaaaaagaaaacacaatccaaggttatggaatctacgaacctgtgggtggtggatctatacacgacgcccctccattttcggaacttgctcttctccaagctaaatcttatctgaaatagaagatattgtgttacagactagtttactgagtccggtgggttacagggcgggcggcgatggagcagagtcctcctcaaaaaaattccagtcttcttcttatcgctcgatcgacgaattccaggcagtggcattgactattgctgcatttctttctgggtaagccgggcctctcggtataggcccaaaccattctaaggcccaaaccattatattaagttggttggtccaccaaagtcagcagcagctagaacaagagcgactctgcagctgctcttctcccgcttccttcctgttagttagcctcagagatcctcgttccccgataatggatttgggaaaactgatccagctgtctgcgctgctgtgcccatttcttctatcattacactttagaatcgctggggcctccgcccacatctactcttcccagcccttccacgatgtcggtaattctctcctcctctacggtggcagcgagggcatcttcgcctcttcccgatctttaatcaggtatattct

SEQ ID NO: 13517 - DNA, 3000 bp, Unknown
  misc_feature (1)..( 3000): cDNA_ID_3030546_gDNA_ID_2214633_Annot_ID_188015 3000 nt of promoter + ATG
ttcgggttgactaatgcacctgcagcgttcatgaggttgatgaacagcgtgttccaggagtttttggatgagtttgtgatcatctttattgatgacattctggtgtattctaagagtcctgaggagcatgaggtacatctaaggagagtgatggagaagctgcgggagcagaagttgttcgctaagttgagtaagtgcagtttctggcagagagaaatgggttttctgggtcacattgtttctgcagagggagtttcagtggatccagagaagattgaggctatcagagattggcctagaccgacgaatgccactgagatcaggagttttcttgggttggcagggtattacaggaggttcgtcaaggggtttgcgagtatggcacagccgatgactaagctgacgaggaaggatgttccttttgtgtggtcaccggagtgcgaggagggtttcgtgagcctgaaggagatgttgacgagtacaccagtgttagcattgccagagcatggacagccttacatggtgtatactgatgcctcgagagttggtttgggttgtgttctaatgcagcgtgggaaggttattgcttatgcatcacgacagttgaggaagcatgagggcaactatcctactcccgatttggagatggctacagtaatctttgccttgaagatttggaggtcttatctttgtggcgggaaagtgcaggtgttcacggatcataagagtttgaagtatatcttcactcagcgagagctgaacctgaggcagaggcgatggatggagctggtggctgattatgatctggagatagcttaccatcctggtaaggctaatgtggttgcagacgcgttgagccgtaagcgcgtgggcgcggctccagggcagagtgttgaggccttggtgagtgagattggtgctttgcggttgtgtgctgtggcacgagagccattaggattggaagccgtggatcgagcagatcttctgactagagtttggttggctcaggagaaggatgaggggttgattgcggcttctaaggtagagggctctgagtatcagtttgtagctaatgggactatccttgtccatgagcgagtttgtgtgcctaaggatgaggagttgcgacaagagatcttgagtgaggctcatgcgagcatgttttccattcatccaggagcgactaagatgtactgagacctcaagcggtactatcagtgggtcgtgatgaagagggatgtagctaattgggttgcagagtgcgatgtttgccagttagttaaggctgagcatcaggtgccaggtggcctgttgcagagtttacccattcctgagtggaagtgagattttatcacgatggattttgtggttgggttgcctgtgtcgcgaaccaaagatgctatttgggtgatcgtggaccgtttgactaagtcagcacattttctggccatcagaaaaaaccgatggagcgacggtgttggctaagaaatatgtgaacgagaactgcaatttttctcggccactcagcaatttttgtccgagaactgctgaaaaaactccgacacttttataccgccgccaccctaacgcctcgaagaactaatggcagcccacgcaaggcaagcccattctcctcgacgattcagcagttttcaacccctgttcgacaaatcctcggacccggtcgacgattcctcgtcctggtcgacgattcctcggacccgatagatttttctcgacgatttccactcctggtcgacaaatcctcggacccggtaaacttttctcgacgattccaagtccggatcgacgattcctcggacccggtaaacttttctcgacgattccaagtccggatcgacgattcctcagaaccgattattttccctcgacgatttcaagtcctggtcgaggaatcctggacgatttccgcaacaatcaccagttttcattttctctttacttggcatgggtttgtcatattgaacgtttgtgttcatatcaccaagtgtttgacttttcaacaactaccttgtgtttcatccatcatttgatgctagttcttagcttttacaactttcttagcttgagaactatctcacacttctatctccccaagcattctcttctggttctttttgaacaagtctgctcttgacttactcttctcactatgcaccttcgtgagtgtaaccccaagcattctcttttgtttctttttgaacaagtctgtctcttgacttactcttttcactatgcaccttcgtgagcgttttggacaagtctgtctcttcacttattcttctcactatgcacctttgcgagcgttgcgggttttcaaaacacttggcgaggtccggaatcttaccaagtaataacatttaacctcgagagacgagctcgtgtaaagttgggaattcgttaaggagctgttgctttgttagtgtagaaacacttgtgtagaattggggattgttttttttggagtgatttaggggagggtcgaatcttagcgacaaagggctgaatctcagtggatcgtggcagcaaggccactctgccacttacaataccccgtcgcgtatttaagtcgtctgcaaaggattctacccgccgctcggtggtaattataattcaaggcggtccaaacgacgcttccgccgaacggacttagccaacgacacgtgcctttgggagcctaagctcctactgagggtcggcaatcgggcggcgggcgcatgcgtcgcttctagcccggattctgacttagaggcgttcagtcataatccagcgcacggtagcttcgcgccactggcttttcaaccaagcgcgatgaccaattgtgcgaatcaacggttcctctcgtactaggttgaattactatcgcgacgcgggcatcagtagggtaaaactaacctgtctcacgacggtctaaacccagctcacgttccctattggtgggtgaacaatccaacacttggtgaattctgcttcacaatg

SEQ ID NO: 13518 - DNA, 3000 bp, Unknown
  misc_feature (1)..( 3000): cDNA_ID_3030481_gDNA_ID_2214633_Annot_ID_188035 3000 nt of promoter + ATG
catcagatataagattaaaaaaaaagcaaatttcatttctttttaaagaaaatattacgtgattagacagttatttggaaatgatataattgtcctttttacctccaaaaacaaagaaaagtgcctcatccctgaaaagtgcctcaaaaagaataagattttgtaaaagtgtctaaacgtgtcacattcccaaaataaaatataagttgtcaattcaaaaagttccttattacactgatatactaagtattttcttatagtagaaagagtgttttatatgaaagcaacattgtttcttagaaaatattaaatttttattttgttgatccaaaatagtttatttatatttgagaaatttaatatatgagaactgtaaaatacaacgtttggagagaacgtaacactagaaaataccataaagaacacaacccgtgcactcacctcattaccgtcatcgacaagaccattcgagatcgcatcaccagtctttattatcaaggcaccagcaaatatgcaaaccttcagaacggtgcaggcttcactaacgtgataatttgtaatgttctgttttgagatcatctccaggcctagctaactttatgctaggttattcagctgtgtatgtttaaatgcggcatgcgttactgttttgataaagtagctttagaagaatgtagtgtgttgggaataagagtaattttgttttgtgtttaccaaattacagcacaacacagacatattcattcttcatgctcgtgatagtgcctagagaattaacgacttgtgatcacattattagaggaaactcctaactaataaggattaggataaacaacactacatgtggtacactcaacaactcaaagattatctcctgaaaccttatccaactgttcttcggccccaagcagtgatgtagatggctggtcaaaggcgaggacatggtctgactgatggtaagaagtgttcaagcctgattctagtattgggtgacccactacaatatcaggtgtataaccagctgcacctctcaccaatcgaggcttctttgataatctctcctctcctgtgctctcatctggagacccaatgttacaccctgagtctggtgttaaaggctcccggtaagatgagagagactcgtcaactgagagacttttgtctggtccacagtccttgccagacttgtcttgaagaggagactcagatgttggggcaggggttgcaggatctgaatcgcccgttactggggctgagggttcgccgagtactccactgagtcgttgttgctcttcaattatcttcttcaagtactttccttgtgcttctatccgtagttgcagctgtctttgcacctaagaaaaaatcacatcaaagaataatgtcatatgtaatgcaaaattcagtgctacactgaaaatcctactaattgtttcgttgttgcttgtctttcttaagtaggaatggtgaagcatacttctagttgctcgtgtaatcgtttctgaacttccatctgcaacttgagggcttcagttatctgcattcccctgtaatctcgaaacgatattgatcacttaatctgcggcgcgaggtaatatatatatagcatcacaaatcaagctcaaagagggaaatttcacgtacgacgagccgtccaacccagagagcatatctccagattctttcttatcagtttttttccctgaaaattgaaaaaaccagttttcaggtatataggaaactggtagaatgagaaagaagatgaagaaaatcaatgtccacactaccttcagaagacgaatctggaagatactttgcaagtcgatatttctgactcaaaatacacaaatgcaaaaatcagcaagggtaagagaaagagagacgagacaagatgccacacagtttgagaatacctgtaagtgactcttgacatgatatatagttaagccttgtacacccatcactctaagaacgcctttgggtgtagctcctttggaaatcaaaggaagaaaaatgtttaggaaccctaagcaaacagacgataggctttccctctcatggatagtagtaaagcatacaagaagagcaatttgattatattggtgtgcatattattaccacagatattgatgaggaaaacatgagttactaaatttaccatagactatacaagaaaaaaggaaacttactatcagggccaccaagttgagcaacggcatcaacgaagcgttcatgtagctcatgcgtccaacgcagacgttgtttggatgcatgactagaattggggcctccgttgtctgcttccatcagggctaagatataaacacgataaagggaaagtaatgagtagtggcaaagctaggaaatgataacatatgaggactggccagagagaaagagatagaaatggaaacaaggaagacgaaatagcgcccagaattagctagtaaaaacagtccaagtcaagtttaagacttgctccggcagatccaccacaggacaccaaaatcagagacatgttcactaaaatcggaggaatttgtcgccgagaaagcaaaaagaaaacacaatccaaggttatggaatctacgaacctgtgggtggtggatctatacacgacgcccctccattttcggaacttgctcttctccaagctaaatcttatctgaaatagaagatattgtgttacagactagtttactgagtccggtgggttacagggcgggcggcgatggagcagagtcctcctcaaaaaaattccagtcttcttcttatcgctcgatcgacgaattccaggcagtggcattgactattgctgcatttctttctgggtaagccgggcctctcggtataggcccaaaccattctaaggcccaaaccattatattaagttggttggtccaccaaagtcagcagcagctagaacaagagcgactctgcagctgctcttctcccgcttccttcctgttagttagcctcagagatcctcgttccccgata

SEQ ID NO: 13519 - DNA, 3000 bp, Unknown
  misc_feature (1)..( 3000): cDNA_ID_1380526_gDNA_ID_2214633_Annot_ID_188039 3000 nt of promoter + ATG
atacatatcacagggccttgagagacttgtcttattcccaagggacaaaaacacagagatcaatggtccaataacttgagaaggatggcctgttccatcggagggaaaaatgtcacaaagttgaaatctgtttacaaaaataaggggaagaataggagggtatggatgaaaaagagacttacggggcaacaagcatgagatctcattccctgatgaagctcagaggctgatatcaaaagcttctgcaaacggtactctcctgtctgagactgtcctctattctctgcatagcatataacttgtcgctctctcaggtgctcaaatgcctgtcatgtcaaccatttagaccaccacctttaaaccatggcatctcatgagagctataaacatacccttaggcagacattttgtgcgtagtagtctgaggtatgaaaagaatcgtgtatcgccttatactctggaatacacatggaatctcaagtcattttcatagtggtgccatggtttaaaccaaatttacagattacctttcatcacactgatgaagttgtatgagctttgctccttcacttctaacctcctcatacagaccagaagataaagctccagtacggaacaatctgctcaacaaagatagtgtcaatagatattcccaaggaaaatgtatatgcaacaccgcagcttattatacctctaacggcttccaactttggttgcctttgcatacttgaaagtgctgctttgaagttctcaagagagaggaggccagattccaaattcattaaagaaacagcgcagaatctaacatcaagagatagactcaacacagagaaaatgatatcttaaggaaacatctcatgattgtaatcgaagaacttacataaacttcaggaaactgttcacagtagaattagcattaaacaatgtcttaagtatgtctttaaatctcgtgtctgatgttaaattctgcacaataggttttttttttttgaaattggttagtatcagttgttcagaacaagaatcaacatcatctaaaagctaagcatgtcatagtagtaattgggattggatattagaaccttaatcttatcattgaaccgagaaacatatccactggggaagcctgagtctgctggtagagacagcaggtgtacaaacaaactagaaacatagttcctattagttaaataagttgattggaaaaatagttgactggctattacagaaaagaagctgctcattacccgtcaagttcttccctggaaggaggaagaaacaaaaattttctgtgtgaaaagcgagatctcactcttttctccagaagttggtcggcgtcctgtggtgacagattgcatattataagattttgaaccagagtagtattaacaagaaccaaagtcagctgtcatcaaacataaaaatacatacaagaaacagtttgtaaagcccaaagcacatatatctgtatagcgatgctcataccagtcgagaactaataccgacgacaacagcttgtgaggttacagattgcatagcatcgtccagcakactgtatagcaccgctgctttccctatatatatataagcagataatagggtgagtggatagaaaacaccaatgtccaattcctttgttcatcaaaggttaaaagaaaccagaattcttgcctgtgcaaacatgtcaaattcatcaagcacaaagatgatagtcttatgtgctagtccacatgccctgaaatatctctatcagtttgtctgcgttgaatatcaaaaaggctcatttatgtaaaggtaaaaatactgaccgcaacatggctataatgaattgtgaattgtcatcgaatgatgcctggaagtgcaagagagaaagcaagtcaactgagacattggctacacagcaaagagaaagaacattcggagagaacaatgtcataccattttggagaatagtaggtggtgttccatgcacaactgtttggcaatttcctgaaaaatcaatgtaagacggtgagtgaatgaatagattaggtgtaggaaatgagaatggtgggctctctccctctcttagaccttaaaggcacaattatcatcactatgcaagagtccattcaatctgatctgcaatcacattgagatggtagtaagatcataacgatgagattagatataggagatagttccaaatgtataagaaatcagacatactactgatactgaatcaggaaactgctccaataaktcacctasakcgagatccaagacctgaaatcaacccattttttgaaataaaagaagaaatcayacgccaatgacggagatagagagtagaaggaagcagggttcgacatacagcagctttgccagagccgcgagggccgagaagcaacatcgagttgttgcatccctccgtgatagaggttgatacaatgaacttcaatttactgtgtgttgacaaatttgtttgtactattaggttaaaagcaaattcgtttcgagaaattaagcgacaagtgagtgaagcaatcagacctgtaattgctatctgacgaagcggaaagaggtctgaagacataactaggatcacagagtctcccgcgaatcagatttagggatttctccgccggagtctctttgcccatcggactggcgggaaaactgacaagccaagcgagccctctgtgtgaactgtgaagtgaacacccatcatcactactagtataaacttactctatgggccgtagtaatgggccttataaagcaataaaaggcccaataaagctcctttgctttctcctaataacgacgtcgtttacattgtgttagcaagtttgtgatggaagaaggtttaacggagaaaaaaaaaaggattgggttgttttggaaaatatcaaatgtgggcaacgaaactcgaccggaaccaatcgttccttctctgaagctctctttgcaattgaaaatcaacaacatacgatacgagagaggattcttcgagagatg

SEQ ID NO: 13520 - DNA, 3000 bp, Unknown
  misc_feature (1)..( 3000): cDNA_ID_3409341_gDNA_ID_2214633_Annot_ID_188036 3000 nt of promoter + ATG
gctagtaaaaacagtccaagtcaagtttaagacttgctccggcagatccaccacaggacaccaaaatcagagacatgttcactaaaatcggaggaatttgtcgccgagaaagcaaaaagaaaacacaatccaaggttatggaatctacgaacctgtgggtggtggatctatacacgacgcccctccattttcggaacttgctcttctccaagctaaatcttatctgaaatagaagatattgtgttacagactagtttactgagtccggtgggttacagggcgggcggcgatggagcagagtcctcctcaaaaaaattccagtcttcttcttatcgctcgatcgacgaattccaggcagtggcattgactattgctgcatttctttctgggtaagccgggcctctcggtataggcccaaaccattctaaggcccaaaccattatattaagttggttggtccaccaaagtcagcagcagctagaacaagagcgactctgcagctgctcttctcccgcttccttcctgttagttagcctcagagatcctcgttccccgataatggatttgggaaaactgatccagctgtctgcgctgctgtgcccatttcttctatcattacactttagaatcgctggggcctccgcccacatctactcttcccagcccttccacgatgtcggtaattctctcctcctctacggtggcagcgagggcatcttcgcctcttcccgatctttaatcaggtatattctatggattacattttcaactcttttgatgctctctactctactctactcatcctccctcctcactgcaggtttgagaacatcactctctggaggacaattaccggtaagggccaccgcagcaatgggttagttcaagcagtgatctttgaagcctccgatcgtaacaatatcggtggttcagcttacggaggccaaagatctatttgctgcactccagatctggccaagcttcaaggctgtaagcagggtgagatcattaggattccttctccacatgaccctcaatggcctatcctcttacctgtccgctttaaaggaaaacgctcgtctgctaagatggcagacactgagattcttatcaccaagactggaatctataatctcttattcatatcttgtgatccacaacttaagggcctcaaaatgaccggaaagactgtttggaaaaatcccgacggctatcttcctggtaggatggctccactcgtgaatttctatgtctatatgtctctcgcttatttgttgctcagtgccgtctggttcttccagtatttgaggttccggatggatatattgccacttcaacattgcattactgccgtcattcttctaggattgcttgagatgctcttttggtacttggattatgctaattttaatcacacggggatgaggcctttagcccttactacatgggttgttaccattggtgccttgagaaagactgtttcccgcattctcattctctgtgtttccatgggatttggggttgtcaaatctactcttggtggtctcacttctaaagtcctccttgttggagttacttacttcatagcttctgagatccttgatattgctgagcacgttggcatcattgacgatatgtccggaagatcaaaactttttcttgtccttcctgacgccttcctcgatgcatttctcatattgtggatatttacctctctttcgaaaacactggaacagttacaggtatctctttctttctaaatatagccatcagactctgtaagttgtaagggttttgaggcaagattcatcagaccagctataaaattctttattactgcagatgaaaaggacctcggtgaagctggaaatttaccgcaagttctcaaatgcactcgctgtgatggttgttgcctctgttgcgtggatagtgtatgaggtaccatcctgtcaagcctgatttgatgctgatttagtaaactcaaatcttacctctaggaaacaaactgctcaactaaaactggctttgtttcaagctaggaaaaaagaagctccttctttcttggaatatacccagcttgcttgcctgatgatttgtccccgtgcaggtgtatttcaaagcaacagatccattcaatgaacgatggcagactgcttggactataactgccttctgggatgttatcgcattcttgttgctatgtattatttgctatctctggaccccctcgcagaactcccaaaggtatgttacatcaacttaaaaggttttgatacctctcgggcataccaacaaataagcatggttttgtggaaacggtttcagctgagcatgttgtgggaagtcttggctacatgctagtggttcttatgtagtggtccaattttggtgttcctgggtgtgatagggatgctaatatgaaactaatgatggacagatatgcatattcgggagacgtggatgaagaaaacgaggaagctcaatctctgacaggggggaagcaagatggtgatattagcttagttaagcaagagaagaatgcggagtcggacagggaagaagatgttgaagaagataaaagagagtgaggagagtcagtatagaaacgacgtggcatctgtgtttgatcaagagttgacgaaaatataaatatcagcaagaggtcagctatatagcacaaagcaacgacgtaatacatatatatgatgtaactaaaggatagtaactgtgtgtttgtatttgtttgtttttttaatatcagatccaacattttttgagtcatctctaacccttgtctgagtgtgagatttgcctaaaattgctgtaaattacattattgatatttttattggtggttaaaattgtgaaacattaatttgtcaataatactagagtccagacacggaaacagggtctctctctcttgttgtgtataatttcaacaccgctattacagaagaagagtgaaaagggagagggagcttcctgctttcacttact

SEQ ID NO: 13521 - DNA, 3000 bp, Unknown; identical to SEQ ID NO: 13515
  misc_feature (1)..( 3000): cDNA_ID_2994531_gDNA_ID_2214633_Annot_ID_188034 3000 nt of promoter + ATG

SEQ ID NO: 13522 - DNA, 3000 bp, Unknown
  misc_feature (1)..( 3000): cDNA_ID_3030550_gDNA_ID_2214633_Annot_ID_188014 3000 nt of promoter + ATG
aggccgccaccgtaatccgcgtcggtccacgccccgaatcgatcggcggaccggattgctccgttccgcatccgaccaggacgcatcgccggcccccatccgcttccctcccgacaatttcaagcactctttgactctcttttcaaagtccttttcatctttacctcgcggtacttgttcgctatcggtctctcgcccgtatttagccttggacggaatttaccgcccgattggggctgcattcccaaacaacccgactcgtagacagcgcctcgtggtgcgacagggtccgggcacgacggggctctcaccctctctggcgcccctttccagggaacttaggcccggtccgtcgctgaggacgcttctccagactacaattcgaacgccgaagacgtccgattttcaagctgggctcttcccggttcgctcgccgttactaagggaatccttgttagtttcttttcctccgcttattgatatgcttaaactcagcgggtaatcccgcctgacctggggtcgctatatggactttgggtcatctactgcttccggacaagagcgaccgataaaatgtaatggatcaagttcaccaccgcatgtcggtacgctccaggcgtccttggctcggatttaggccaaccgcgtgcggtaacacacgggagaccagcttccgtcccgcatcagcaaaggatggtgagggacgacgatttgtgacacccaggcagacgtgccctcggccagaaggcttggggcgcaacttgcgttcaaagactcgatggttcacgggattctgcaattcacaccaagtatcgcatttcgctacgttcttcatcgatgcgagagccgagatatccgttgccgagagtcgttttagacttcagttcgcagcacagcatccgcccacactccgtctccggggaggcgaatgccagccgttcgtttgcatgttccttgacacttttcgtgctggggttttgtgatatccggaagcaacgcgcacgacaagaccgagataaaagctcccgagcatgccgatacgcgaaaccacggatccggcgggcaaggaatcggctaagaaaccggcccaccgagagtggtgatctttggttcgcgggtcgttctgttttggacaggtatcgacaatgatccttccgcaggttcacctacggaaaccttgttacgacttctccttcctctaaatgataaggtttagtggacttctcgcgacgtcgcgggcggcgaaccacccacgtcgccgcgatccgaacacttcaccggatcattcaatcggtaggagcgacgggcggtgtgtacaaagggcagggacgtagtcaacgcgagctgatgactcgcgcttactaggaattcctcgttgaagaccaacaattgcaatgatctatccccatcacgatgaaatttcaaagattacccgggcctgtcggccaaggtgtgaactcgttgaatacatcagtgtagcgcgcgtgcggcccagaacatctaagggcatcacagacctgttattgcctcaaacttccttggcctaaacggccatagtccctctaagaagccggccgtgaagggatgcctccacgtagctagttagcaggctgaggtctcgttcattaacggaattaaccagacaaatcgctccaccaactaagaacggccatgcaccaccacccatagaatcaagaaagagctctcagtctgtcaatccttactatgtctggacctggtaagtttccccgtgttgagtcaaattaagccgcaggctccactcctggtggtgcccttccgtcaattcctttaagtttcagccttgcgaccatactccccccggaacccaaaaactttgatttctcataaggtgccagcggagtcctataagcaacatccgctgatccctggtcggcatcgtttatggttgagactaggacggtatctgatcgtcttcgagcccccaactttcgttcttgattaatgaaaacatccttggcaaatgctttcgcagttgttcgtctttcataaatccaagaatttcacctctgactatgaaatacgaatgcccccgactgtccctgttaatcattactccgatcccgaaggccaacacaataggatcgaaatcctatgatgttatcccatgctaatgtatccagagcgtaggcttgctttgagcactctaatttcttcaaagtaacagcgccggaggcacgacccggccaattaagaccaggagcgtatcgccgaccgaagggacaagccgaccaatgcacaccaaaggcggaccggccgacccatcccaaggttcaactacgagctttttaactgcaacaacttaaatatacgctattggagctggaattaccgcggctgctggcaccagacttgccctccaatggatcctcgttaagggatttagattgtactcattccaattaccagactcgaaagagcccagtattgttatttattgtcactacctccccgtgtcaggattgggtaatttgcgcgcctgctgccttccttggatgtggtagccgtttctcaggctccctctccggaatcgaaccctaattctccgtcacccgttaccaccatggtaggccactatcctaccatcgaaagttgatagggcagaaatttgaatgatgcgtcgccagcacagaggccatgcgatccgtcgagttatcatgaatcatcagagcaacgggcagagcccgcgtcgaccttttatctaataaatgcgtcccttccataagtcggggtttgttgcacgtattagctctagaattactacggttatccgagtagtagttaccatcaaacaaactataactgatttaatgagccattcgcagtttcacagtctgaattcgttcatacttacacatgcatggcttaatctttgagacaagcatatgactactggcaggatcaaccaggtagcattcatcgatcacggcaattccccgccacatcctctcaaacgcaatg

SEQ ID NO: 13523 - DNA, 2810 bp, Unknown
  misc_feature (1)..( 2810): cDNA_ID_2713793_gDNA_ID_2214633_Annot_ID_136090 3000 nt of promoter + ATG
ttatctatgaaaaaccattttctataagcaaatcttatcagaaagaaggcatttttatggagtccataatttttctgggcgagacagagcaaaactgggaagacaaaggatagactccaagcatctctttgtgatcaaacggagctgaagggagataaatgctcataatatgacacagaaagggtggagatggggagcacacttcgttggtgcaagcacaaaagtgagagtctgagagagatagagtcgatctggatatggtgaattaagatctccaatttgtgcgggtcttaactgttagcatgatgtgtaattatatgagttgaagggtttgatgttgagactcaaatgggtttgtgtgtagtagagaaagttgtttgtgtaatcacgggtatgtgttgacatgcactctccctttatatatatatagcgtaaacacaaagcaaaaactaaagatacagtttgtaaaccaagtagcttttaccatgaaataaacatacatatcacagggccttgagagacttgtcttattcccaagggacaaaaacacagagatcaatggtccaataacttgagaaggatggcctgttccatcggagggaaaaatgtcacaaagttgaaatctgtttacaaaaataaggggaagaataggagggtatggatgaaaaagagacttacggggcaacaagcatgagatctcattccctgatgaagctcagaggctgatatcaaaagcttctgcaaacggtactctcctgtctgagactgtcctctattctctgcatagcatataacttgtcgctctctcaggtgctcaaatgcctgtcatgtcaaccatttagaccaccacctttaaaccatggcatctcatgagagctataaacatacccttaggcagacattttgtgcgtagtagtctgaggtatgaaaagaatcgtgtatcgccttatactctggaatacacatggaatctcaagtcattttcatagtggtgccatggtttaaaccaaatttacagattacctttcatcacactgatgaagttgtatgagctttgctccttcacttctaacctcctcatacagaccagaagataaagctccagtacggaacaatctgctcaacaaagatagtgtcaatagatattcccaaggaaaatgtatatgcaacaccgcagcttattatacctctaacggcttccaactttggttgcctttgcatacttgaaagtgctgctttgaagttctcaagagagaggaggccagattccaaattcattaaagaaacagcgcagaatctaacatcaagagatagactcaacacagagaaaatgatatcttaaggaaacatctcatgattgtaatcgaagaacttacataaacttcaggaaactgttcacagtagaattagcattaaacaatgtcttaagtatgtctttaaatctcgtgtctgatgttaaattctgcacaataggttttttttttttgaaattggttagtatcagttgttcagaacaagaatcaacatcatctaaaagctaagcatgtcatagtagtaattgggattggatattagaaccttaatcttatcattgaaccgagaaacatatccactggggaagcctgagtctgctggtagagacagcaggtgtacaaacaaactagaaacatagttcctattagttaaataagttgattggaaaaatagttgactggctattacagaaaagaagctgctcattacccgtcaagttcttccctggaaggaggaagaaacaaaaattttctgtgtgaaaagcgagatctcactcttttctccagaagttggtcggcgtcctgtggtgacagattgcatattataagattttgaaccagagtagtattaacaagaaccaaagtcagctgtcatcaaacataaaaatacatacaagaaacagtttgtaaagcccaaagcacatatatctgtatagcgatgctcataccagtcgagaactaataccgacgacaacagcttgtgaggttacagattgcatagcatcgtccagcakactgtatagcaccgctgctttccctatatatatataagcagataatagggtgagtggatagaaaacaccaatgtccaattcctttgttcatcaaaggttaaaagaaaccagaattcttgcctgtgcaaacatgtcaaattcatcaagcacaaagatgatagtcttatgtgctagtccacatgccctgaaatatctctatcagtttgtctgcgttgaatatcaaaaaggctcatttatgtaaaggtaaaaatactgaccgcaacatggctataatgaattgtgaattgtcatcgaatgatgcctggaagtgcaagagagaaagcaagtcaactgagacattggctacacagcaaagagaaagaacattcggagagaacaatgtcataccattttggagaatagtaggtggtgttccatgcacaactgtttggcaatttcctgaaaaatcaatgtaagacggtgagtgaatgaatagattaggtgtaggaaatgagaatggtgggctctctccctctcttagaccttaaaggcacaattatcatcactatgcaagagtccattcaatctgatctgcaatcacattgagatggtagtaagatcataacgatgagattagatataggagatagttccaaatgtataagaaatcagacatactactgatactgaatcaggaaactgctccaataaktcacctasakcgagatccaagacctgaaatcaacccattttttgaaataaaagaagaaatcayacgccaatg

SEQ ID NO: 13524 - DNA, 3000 bp, Unknown
  misc_feature (1)..( 3000): cDNA_ID_2703213_gDNA_ID_2214634_Annot_ID_136092 3000 nt of promoter + ATG
tatttcttctttcgcacttcaactttgtataaaaagtccacactgattcaacgttttctccgagttttttaggattatttttgtttggtggttcttatatattcactatacaaaagtacaaatgacaaacttttatcaagagaattcactatactctttgaaattatgtttgattatctatatagctaaaattcaaatatttttcactatcattaatacgtacaacaacaatataggattataggatatattgatacaatgttatataattatgttacttacatgttggaaccttgtttatcttgattctaaacaaacaatttcatgttccatgtacactactctctcatgatctactacttcatccacacagattttgacaagctaatgattatctaccgaattgatataatttgaataactaacttttttttatcaaacaagttatattgaagatagtgccttaagctccattgaaggaggaagcattacaagataaaagaacaaaattcacaaaggaatctgttaaaacattcgcaataagcgatacatgatgaaagaaaatggaactaaaatgaagcaaagtggaattaatgtccaaaacaagtccatgaacttcatttgcatgacctacggaattgagaagaaaaacgagttattgacaatccgtgacgcatgcgtgccttgatacacccaaactttgattgagaacataatagtcttaaagcatttacctccacaactaaggcagaaaaaacatattgtaaggggatcgttgagcgatccaatcatcttcagtgaattagcttgtcgagatctgcctaaacaacgcttaaaagcttccttacatatcgtccaaggataggtaagcatcgtcacactatgtaattgggcttcttgtcctcttttaacatcaacaatagatgctaagaccagttcctctattgacaatcttctgaaagtgtcttcccaaggcaagcataccagagatggtagaacacactccataaaggaggaatttgatggaagatgatacttcatgaaggaggggactgatggtaacacaaactctccaagaatgtcatttaacaacaccacatgaacaaaaaggttagaatcacttgacaaaagtttgcggaaaagagcctcatattgaggtaaaagaacactgagcctaaccagagtcataacagcctcatactgaggaaataatagcgtaagcctaattcaaatcatcacatcctcaagtgcaaggaactaaagtaaaacagagaattgaagtacgtaagataaaatcaaaagtcttttgttgtgttaaattctccattaatctcactcttaactttttttaaacacttgataaaataaaaaattatattaatgtatgaagcattactttcattctactccactaattttattaaaaacatttatcaattgaatactaatatttcaaggataaaacagccttgtagagagacacaaccttccgatgtagtgttgaaagacatgaatgacgtgaagaaagacacaaatggtcggaacaaacgacatgaaaggtcttgaaccacgaactgcacacagcagaaaaagatcgcatatgagcgataggagtaccacctgagggcacaataaaaaacaaagcaacatttaaatctacaaatctgaaagcttggaccaatttccgaactagatctaggaataacagaataaagggacattgggagaaagattcagaggtgaaagagacgacgagagagtccggtggatcgggagggttaggaggttccagaggagagagcgtcactgaaaggccaaaactgggcacacatcagcgaggccatggaagaaaggaagaggagggagaaaggagaagtttaccaccggtgggcgagaggccaaccgacggcgacgagagagaaactgatggaaaccataattacctagagatagtttagcatatgcaaggatttatacatttgttctagaggcacaaattcaaaaaaatatatatgtataactaactatttgattttcttcaagagttttcatatcaaaagagaaaagatagcaaaaagttgaagagtaatttaagtaacatttttagatctcacttcttgcatttgcatataacgatatattagagatttttgtgtcttaaattccttggtatgtataacgtctcaaagatccattacttaaaaatactcgcatgttattgtcaatgttaccaacttaccaaagaagatcatatgatgtttatagaccataaaatctaataacaagaaaagagtcaattgtaaaattactaaactaagaagaggttaggttgataacagtgaaactgtaaattttcaatcattatcgagtaatgaccattgagaaaaaaaaacttagtaaattaagaaaagtataataaattagtgtttgatatattagcatgactttctacattttaatttttattttaaatataaataattaagagttgtattgatggaggattttattcaagaattttattttaattttcttcacttaatttagttgattttttatttaaataacacatgttattttcttatgtgatgatgtgacgctcatatagacagagttggtcatgtttcatatatataatttcataccatgggttcaacatatatgtgactagttgttagaaattagttgataatatgaatataaatgatgtataaataaacagaaaattgaaatttaaatattttttttcttgcaatctgaattttatttatgaatgtaagtctttacaaaggaggtttttagctacattggctaatttcctgagtctgcttgaaacacactagtcgtatatattgaagaagctaactgatgtgttatgctattacagtgacagtttgtgaatgtaaagataactaataaaaactttgaagcccaaaaatctatatctagaagtaaactagcaatgtcccaacgagtagacatgtcgttgattgtttaatg

SEQ ID NO: 13525 - DNA, 3000 bp, Unknown
  misc_feature (1)..( 3000): cDNA_ID_2703224_gDNA_ID_2214634_Annot_ID_136096 3000 nt of promoter + ATG
ttttgtttccataagaaagaacagatcaggaaaaaccgatttacggatttccatgattctctggactgtcatggggttccccaacccacaacagttccagctcaccattcttaaggaagaggggttggcagattctgaaaatctaccttctttttcctggatacaggaatcagatcaatttttggagtagtagaggaggaagctcctagggtgcctcctgcagagaggttagtgttcttggcctgagatttagaacttgatgaaccagggatagtttgaggcctagggggaataataggagatcccgtctttttcctagatttggagttagaagtcttactcggagaaccctgggtaaaatttctcttatgagactttgtgcctagaagtttaatggcaggtttgttggcttgtcttggtagaggaggacgacctctacctcttttagttgggcagcaggaacacactctaggtttgagcttgtagccaaagaccctgggggaatttcagtactctcataagctagaagatctgagccagaagcggctgagaggataccaagagctgttgtatccatcaggtttctggtttccccttgaaaaaccctgattttccttgctgcattttctactggatcaggacaagagaggtattggactgttaaatccctcaactcactcatgacttggtcttttgtaggtggaggggaagaaacttccatcccaagacttctgggatcactgccttttaaggttggaggagtaagaggatcagaggaggcaacatctctctcaagaggggggcgacaagccttggacccacttgatgacgtagcatggagtcctgctgatgaattagatttctctcgccattggagttgctgaggtggaaaaggagcaaaccctccatcctgatggtaagacttagaggaatcctgagaatgatgtctgcgttgattatctccatatctatggaagttttctctattaaaaaatcttctctgaggggagtatctgagagtagaaggagacttggatcgaaccccatcctgattcaatcttctttttgcagagtttactgcctggtgagggatagcacttctctcagagcgctgagaggaactcctgggggcgatgaagttgtcctgaggaatgtagtagttccttgagcttgattttgaggcatggagggaagcagattgtacaggagaggggttcctttgtgtttcagacttctttgcaacaccagggcagtgcttttcctcatgggtaaggcggtggcaatgtcgacaatgatttttaaggttcttgtagtctagataaaccacagcttctcttccatcggggaagtcaacaatcgtctctttggtgataggttgtaacccatctagcagaacctttattttgactgtcgatgaggtaatctcctggtccatgactgtaccaagctcttcacctatggacttaagcatttcaggcttccagtagtgcttgggaagaccttggagttcgatccaaaaaggaatcaggcaagggaaagatggtgagataactggttcccatttttgcaagataaccatccattggtcaaaatgatatggcctattatcaagaacttgttgaaggtcctccgagaaatcaaacttgagttgaaaaactccctgtcctaggtctgaaccagtggctttacccctgagagtccatctgttagacaagaataagaagagagcccacagtcgttgtccagagggattggtgagacggccaatgagggttagggcattttcttcaatgagatctgaggtatcaaggtcaggaccgcggattcgcttacggggtggaggggagtaccctctttcaattccttttcctttctggttatacgggatacggtttgtcatgatgatgagtgaaaggaggcacttgcaggttgggttaaagcttcgcaggaaagtaacacagctgaggtagggtttaaaagtttgaaacggttgagagagcttaaatatccttctacctccaataaatgggagattagacggtaaaacaaccttggtaaagaagtttctgagactttaatgcagattgcgcaagagagaaaggagttcggagaagaactttgatgaacattgatgaacattcatatggagaaagcgttataccgttggatcttacctgccacttaagcccagtggataaaagagggattgcactgttcagatctgggtattagttggttccatggtgcctcgggtaatgggcctaggtaataggcgtgggagagatttttctgctactctcaattttgttttttcaaaaaaaaaaaaaaaactaacttatactctagtttactcgctctctctctccataaagccttccctttattatttttattggtgtattgtgtagagcctctagttcagatgcaattttgtgattgtttcaagaccgattttcaatcgttttggaatactttttaagcgtttgttaatcgagtttaggacttttactatggtaaatcggtttagcacaatacacatgactttatgttattcattcttcattcgtatatggataaaaaatcagcgatgctaaacagatctcaatatgtatgtgaacttgtgaagtagcaaattgttgcttattccactatattaagtcaagtttccacaatgtgccagacaatccctagttgtttagattccaagatttcgacaatgtaacacccgttaataattcacaacagctctcttattggcaatatattcgataattattaaatacataaatacaaaatcacattttggaatttaagacattttacaattaaaaaaaaagtggaatcacgttcaaaggtcgttgatagtcacaacttaacaatgacgcattaaagtattcaaaagtctatttaactgatctatgattgacacatagaaatgaagctatataaaagttgtactctctttttgaaccatctcacaatcaaactcaagtcaacatg

SEQ ID NO: 13526 - DNA, 3000 bp, Unknown
  misc_feature (1)..( 3000): cDNA_ID_2703248_gDNA_ID_2214634_Annot_ID_188068 3000 nt of promoter + ATG
aagtgcggcgaggactggtggtggaagagaggaggaggagggagatgaggagagagagtgagaggatgtggtggagtggattgaggaggagaagagagagaaagagaagaggagagtgaagaaagagaggaagaagatgaataagaaacggtggtgattcgcggcggcgacggcggagggtgattttgaagttagtggagagtggtggtggaagagaatcagattagtgtttgtgttgctcttcattttattttttgtccgacaaaacaaaaatagaaataatgaaagacgaaatgtgtgttttgtctctttaagaaggtttttttatagacaaaaaaaaaaaagaaggtttttttataaaccggtgatggtttagagaaatagatgtgttgcttttgtacatttttgggtttattccggttctggagcaagagcaagaaccggtgggtttgaaaactttgaaacggatgttaattatgtcagcttacatagtaacggttagtgttagagcatctctatctccatcatcagtttaagaaattcatgtgaatatcttaataataacacaataatattaataaaattatatactaaactaaattaaaatttgttaaaactttaaattaaatcttaatttttttaatatattgtggattcttaaacacaaaccaaaaaaaaaaaagatatgagaaacaaaatccaatctagatgaatcaaacataaagtaatacaaattaattaattacttaattttataaaactattattttattacaaggttgaaaattccgcactattttctgagtattttttaaaaataattaatataaatatgaatttcatatctttatcttatcttagattttagtagttttattttttttgtgattagattttatatttttaagtatagtttctttttgcaaacattaatatctaatgagaaaagtgatgtcgaaaaagtagaattatactctatttttcaattggtaacttctttttaattttagttcttattataggttatcttttaacttttaattgattcccacatttaatggatcttcacggtctatcatattgttgattttatcggtccgattgaagccaatctagatattttaagcacatttcttgctaaagctattttcatattttattgtataaagtttatttttaaagttagtaatatgtacgatcgtgacaatataaaacttgattttcaaagtttgtaacacatacgatcgtgatatgatcatatgagttattatatttaaaaatcaagatttatataattaattgtgaatcaattacgaatttaaaagaaaaaaatccggtttatggtataaatctagcgggaattgtaaatggtacatgtctagaattcgaatcttatcaaagtgaaccaactcaaatgtgtaaaacaaatcaaatctagtaaatcgaatcaaaccaaagtctataaaccaacccactttgcttttgtgatttattgttttaaaagggttctaagattggggcttcgagctcttgtttgctgctcgaattcgatctagtgaccaggtacttagtgtttgttttgtcagattaagtgtttctcaattagtggttttatttttgtttgtaggctttgaaccttttatcagtcagaatgtttttaattggttttgttgtgatacaatgttttggttatgataaaatagttttacttatttctacaagatatcagttttaataatattcctataaaaagagagaatttgaagaagaaataagtaaaactgattgataagagtgtgcagaatcgactaagtatttgggtaaggctgggcatgtgggtaatccattcgggtttgggtaaaacccgtttgggtttgaatttaatgggtattgaatatactacctaataagagtaattctaaatattcggttctgctccggatcggatccaatcgggttcaggtcgggttgggtaaaaagtttcaggtcctaaaaatatctaaaataaatagaaacgagtattttttatgtagatagcgggtacccaaacaaaaaaaaccattaaaatttgttaatttttaataaagttaatcatatttgaatgtattttactaaattttgacaattataacaaataatttttaaatagtttagttgtttgggatatttaggtctaaaattaattgacatatttagatttataattataatcttagataattaattatattaagattaaatataattaatattttggatattaaatttatgtgtaggtttttggatagcctgtttgggaaacaggtaatccctgaaccgactcggtatccacgggtttactaaaattttatccaagtaattttctaaaaccctaacctgtcctaacccagtttttttggttcgggcttagggttgggtatcggatccggttgttttgcccaaccctaaatctggttaatgacggggtcacccgctattgaaggcgagatgtgatattggttaagcacccacaatcgctaatgatctttcatgttataatttctttctaaactgtttttagatcttgaacaaatattagttcacaaaataactaaaatagtaaaatttaatattcgttaaaattggaacaaataaaaaatagtgcattagaaaaacaatttggttttatgcaacttaaattaaaacaacaaaaaagcaattaattggtaaatgtgattattcaccaaattgaagattctgttttaaaggagagaaccaaaaaaataaaccatatacactcaaaaacctaaatatcattcacaagccttaccaaaaaaacaaccctattttagttgttaattagtaacaataatcaagtttttttttaccgttcatagagacaagctaactctatataagcagattaattatgccaacaattctcattatctctcaggacaagtattgataaacaacaagtttctcgtatttccatatatataccttaaacaaaataataag

SEQ ID NO: 13527 - DNA, 3000 bp, Unknown
  misc_feature (1)..( 3000): cDNA_ID_3030579_gDNA_ID_2214634_Annot_ID_188061 3000 nt of promoter + ATG
cactaaacacttaaagaaaattcatacaccacatcacatacatatatttcaaagcatggtagcctataaagtagtacaatcatattgaagtctcaaagctataaacttgtatagatgttattcttacagaacatcgaaattaacctgtccggtgactgggtcaatgccaaacactttggtaggactgctctcaatcaagtcaattttttcctcatctgtcaaagtgttcatcatctcttcattgataataatgtcaggctcatacatatacgtaacagtagctgcaggagaccatttcgcatgatctttcccaattcctttcctagctaatgctttaagcttcaactcttgtcccctgcgtagtttcgcaatgataattcccctgaaaccaaaacaataacagtctaagaaactgcagaaaaaaaagccacagaactaccaaaaggaagactcatgcaaagggcatctaaagatgtcaaattttgtttagcattgtgtaatatctaagcttagcaattccaatcaattcataaagaacaaataatcactacaatgatgaaaagggacttacttgtgctcgcttgaatcagaagtagatgagttactagtgaaatcaacaggagtaacagtaggatcagcactgtagagatccctactagtaacatctagggtttggtcagtaacacacttagcactaaggggaaactcaacagagcagaactcgcaatgttcatctccattacaatcttcacaatcttgacagaaccgcatgctcatagcacgctcgctagtgagagggatgagactaagtcgttgagcaatgaactcgtcgttgagaacagaggaattaacctcgattttgacgagatggattgccatggtggggacttcggagatcattacgcgacggagagcgttggccattgaaacgtcggtttcacgaagctcgaacttggcgtagtcatctttaagctcacggatcttcaccgttgggaatctttggtaggtgacaccgtccatttcaaaagctgttccttctgacgactctgggactcttagggtaatgacttttcgatttcttcgccggagaagaagaagaaatttggagagagcaaagtgagtgagagtggaaaaaggtataagaagaactatagtagtttaagttgggcctatatgggcctattcttttgtttactgggcattttcaggcttctcataacagttattgggaatggtcaaaatgtctacaatggattttctgtttacatcaattcaaataatgacccaatgttattttaagactttttaatctttataatttgaattacataataataattttggaaatacaaatattaaaaagaatcgaaattccatatttttaacagtaacttggattaaaaacattatataaagagtaaaaaggattaaaaatgcattggttcataaagaataatggtaaatttgttgttttaatctttatatagtgtttttccaaaattattctttctaattacaattaaaatttttttacataattaattttaatggtaattatgtgaatggtttcggacaatgtacaagttgtactcatcattattccgcttattttcataattattccgcttattttcattgacacaattaaatcttgacctaaatctaaaagattacatataatatattttatccaacagaaaatataaattatttttaaaaatagaattttagtgggttttggggctttaagtgcactgatcatgtctggtccaaaattctaatattgctttccttttttatttttattttgccaagaaaccaattccgggtttaacttccttgtaaaaccatccttttcatatatatgatatttgcagtttagccaaaaaaaaaaagttgaattttaatcaacatttttaagcacgacggtttcaactagtagtaccatatcgcgggttataccattaccggaatttattagagattttcaaaatttacctgattgaaaattagcggattgtagtgttggagccaaactggattagtgactgagtcatcgggtttaccgggccaaccgcggttccgctcgaatctgaatacatttccctcgtcaaaataaaaaaagtcagaggacgattggtcgatgagaaaaacatttaataaaggaaaaaaaaatgaaaaaacaaatggggcctttggagcgatgtgatgacgtggcaacccccggagactttcaaatagcatattgagagttttacatgcatgtgaatatcaagggtaacatctagagtcatatgaattgcgcgtgttatgtcgttgttagtcgttcatgttaacaataatctacgtataccgtttgtgacttttaaaactaagttcatgaacctattacatatagatcaaaatctggaccataattttattggtgtattgttagaaacttaaagttcatatcactttctctatgtttcgtggcctacttgcaattttttaggaatcttttgaccattagttttttaaacgagtttaggactttgatcactaaggtaaatcgtttaaacaatttgggatcacttaattattgacatgattgtatgttttgattgggcatgtcaaacagatctcaatatttatgtaattacaaattattgcatatttcaatacatcaatgtcatggtcttcacaacgtgcctgacaaatcctagttgtttggattccaaattgttaataattcacaagagctctcccataggaagtttcttcgataattctgaatattatataatacaaaatcacaatttggagtttaaagacttttcttctattaaacaaaatagagtcacgtttggagttcgttgatagtcacaacttaacaatgacacattagaatattcaaagttttatcttattgatcagtgattgacattaaaagttgtaatcaagttatataagcgttgtaaactctttttgaatcatcttcacaaactaaaagtcaacatg

SEQ ID NO: 13528 - DNA, 3000 bp, Unknown
  misc_feature (1)..( 3000): cDNA_ID_3030583_gDNA_ID_2214634_Annot_ID_188059 3000 nt of promoter + ATG
tagagtcttaatgattttaagtgatacaagtatatatgtaaatttcattttatttaatattataaaccatacaaacctagtaaacgttttaagaaaactaacatattaatacataagaagaggacacaagtgtaaactgtaaagagggatcggatagcattttttccttagattataaaaactcaataatccaataaaatcaaatgtgataaaatagaactaaaattcatcatatagcttaagccccccatatataagatcctcacaatgcctaacaaaaggaagaatcttccccgagttagttccccagtcagcttcacatccatgagacggaggagttaggtaacatggctccatcgacttagatcgaacacatggcggattaggagtggtgaaatttgttggctgataaagtaaccatggctttaatcctccaagactatatgaaacatatccaaatgtagaccttgcgctcgtgacaatgttatcggttaagctcaaaagatacatctcagcaagcgccttttggtcgtgacttttcttgtctgtttgctgaactctctctccacttggttgataaacttcaacaatttctcctgttgaacttggtcgctttgaaaacatgttagttaagttgccagagaactctggatagagagatgcgacaagaacagatttgagtttcggggtttttgatatattgacttttgattcctctggtgtagcaaattcaggtaacagtttctctctttgtgtacatgatatgacctggtcaatgacatgtttgaaacgtccatcaggtttgccgaaaacccttatttgaatcccgagtctctcgtcggctttcgacaaatgagcgtggtagtagtcagtgaccatatcccaaacttcatttgtagggtgaaaaagataccgagccaagtggtgaaagacggtttctttctgcgggaacagcttaactagttcggtttggaaagttggattaaaccataacgatggaacaaagtaaacattggcttgaacaatcaaccatgggactttgtcaatcaaactttgatccttttggcatacaaacagcttatcactatcccttgaatcatgaaggttatgcatgtatagatgcggcgggattgaagtcgagttgatggaatgtttttcagacattgttccgtaacaacgaggatattccttattgtagccccaagcataagtataattcagcattggaaagtcaagcggaagcaaccatgaagtacctggaaatggctcgcataagagatcactaacatccttgcggttgtcgacaagaatgattctctcggtcaagagagcgtagaggaaaacagaagcaagagtaagtaatctgtttccaagcccgtaacctgccacccatacaatgtatctgcattcaccatttgattcgcttgcatcatcacgactaagtttctctattgcttctttgtaatattctgtatctggaccacaacgtttgtgaagcatctcatagcttctgagcttagagactagatattcagaaggcttgtacggggatggcttgcggtacaagaaatatttatgatacctactcaagcaagaaccttcatcaaaatccgcagttaaaagccctcctataagtttatccaccggtttttcggtttcctttatgtctactacaacaaaatgaaaacataaaaccaaaatgaggattcattgacttaacaataaaacacaagatatggataattttcttacctttggttgtagcatcaagaagtttgttgttaaagttgtttgagtatgatagtataaatagtaaggaaccaaaggagactgctatcagaactttcatctttagccccaaagtcttaacaattttgccggagatctgaaatttttgatacatgttgacttgagtttgattgtgagatggttcaaaaagagagtacaacttttatatagcttcatttctatgtgtcaatcatagatcagttaaatagacttttgaatactttaatgcgtcattgttaagttgtgactatcaacgacctttgaacgtgattccactttttttttaattgtaaaatgtcttaaattccaaaatgtgattttgtatttatgtatttaataattatcgaatatattgccaataagagagctgttgtgaattattaacgggtgttacattgtcgaaatcttggaatctaaacaactagggattgtctggcacattgtggaaacttgacttaatatagtggaataagcaacaatttgctacttcacaagttcacatacatattgagatctgtttagcatcgctgattttttatccatatacgaatgaagaatgaataacataaagtcatgtgtattgtgctaaaccgatttaccatagtaaaagtcctaaactcgattaacaaacgcttaaaaagtattccaaaacgattgaaaatcggtcttgaaacaatcacaaaattgcatctgaactagaggctctacacaatacaccaataaaaataataaagggaaggctttatggagagagagagcgagtaaactagagtataagttagttttttttttttttttgaaaaaacaaaattgagagtagcagaaaaatctctcccacgcctattacctaggcccattacccgaggcaccatggaaccaactaatacccagatctgaacagtgcaatccctcttttatccactgggcttaagtggcaggtaagatccaacggtataacgctttctccatatgaatgttcatcaatgttcatcaaagttcttctccgaactcctttctctcttgcgcaatctgcattaaagtctcagaaacttctttaccaaggttgttttaccgtctaatctcccatttattggaggtagaaggatatttaagctctctcaaccgtttcaaacttttaaaccctacctcagctgtgttactttcctgcgaagctttaacccaacctgcaagtgcctcctttcactcatcatc

SEQ ID NO: 13529 - DNA, 3000 bp, Unknown; identical to SEQ ID NO: 13525
  misc_feature (1)..( 3000): cDNA_ID_2703224_gDNA_ID_2214634_Annot_ID_188058 3000 nt of promoter + ATG

SEQ ID NO: 13530 - DNA, 3000 bp, Unknown
  misc_feature (1)..( 3000): cDNA_ID_3030609_gDNA_ID_2214634_Annot_ID_188049 3000 nt of promoter + ATG
tgcaaattgtccccgatgcctcaatgaggaggaattaataaaccatgtactattcaaattttcgtatacaactatgatttggagaatttcaaattctccgattatagtaggacaccatttcacggatgatgcagaagaaaatatatcctttctcgttgatactttttcgaacaataatctaatagaccaacagaaactaactcccttgtggctcatctagaagatctgtaaagcaagaaacaattgtgtttaataagttcagagagagtccttcgaaggtggtttcacaaacttaagcaaaagtcaaagagtggattaaaaatgtgacagatacacaggaaatttctgctacaacaagaccatcatcattgataaaacttattgtacaaaacaaattgcttcctatgtcaagagtaattttgatgcatggttccacactaacaatttacctagcgcaaatgagtaagcacaaaaacaccgcgtaagactctaactcaacaaaatatgagttcgccctagttttcttttctctctggcccaaagcccgagagagaccattgaagtgaatcatctctgctatggagttccgccgttacttttcctccgttggtctatctcctccatggaaagtctttctcactcaaagacatcgcctagttgggctgcctccgacgtatctattttccggcgagaatctcttttaacttctctcacttgttgaaaagatcttatgacatgcttgtttaatcacagtctcatgtctctaatgcagccagttgtgccctcggtggtctcccacctgttggaaccaccagatttgtttaagctttcttcgtgtaggattactctggaggctacgccggtcattcaccgagatgggttttttccgttgtctctctttctccagatctcgtggaggcgcttcaccggaaattcctcaactagtgtcttcttcttgggatccgcctttgattcccaaagaattatctcccttcatgggaaatgctacaccgtcgatttttctcttctggctcttcaaaaattcgaacgctttggactcttcaagagtctggtgactccattaacattgggttccctttcggtcactctgtgtgatggacttctcaccactataatctctagattgttagatctggtggttagagatcttgtatcggccgagcatgtctcaccattccaccatcgtgccctaaagtcaaaccaccttctccacctcgtttgagacattcctccgcaaactggaatggttctccgatgatcaacgaccgccctcctctaccctcaaaacgctatagtttctcctagagtttctagtgatggacaaaatttgggcatatttagtagtgggctatgatctggatttgcttctaatgcactttacatatcaaatacccaacccaaaattgtttttgcaagagaacatcttcaaattcctccctctgggagagaccattgttatattatttcgattttttcttaacagagattaatattgtgttgtatctctttccaaaatctagagattgtataccttttgtttttatctttttagaagattctctagaacttgtgggaggatatactcttatgttctcgaatgattacccgatacttttggtgtcagttactgtccattttgtgggtttttggggcaacaattagaaatcgagtattgacatcagcttttagcttttgatgatccggttgttaaaaaccgagacttaacttgataagtttgggccaggatggtatgctcaaaggaggtgtatggtttttgaaaggtgatccctatatgatcatctcatacttgtcggcaacgatgtttggattgcgagagttttctctcgtcgtacttgtgaccacccttttcagagattgggtgtcttggcacttcaggcgcaagtttggaacttcaaaagcatatgaaaccttgtttgtttcgtaaagcgatgtatctcaaggtggctggcttcatggcatcgtgaagcattttgtaataccgagtggctcacctccacgttggaacgcgttattcttaacatctttagatcattttatctcttttttaattgtattttcttattttgttgtttatctatccggatgttgcgtaatgttcaaggtatagcagcatgtgagtacttttatttccatataggtttatcggtttttgtatggttttccttagcggagactcttttatctgtaacttaataaaatggtgttagaaaaaaaaaaaaaaaacatacacatagcgcaagaggatggattattcgggatcatgaaggaacaacaaaagctttgggatcttcatccctagatcatgtgaaaattgaaacatataacactttaatttacttttataatattggaaagaaaacgtgaagatccggaagcaattaccgtaaaatttagaggttaaaaacttcttttctttaaatgaattaagttagagaaaaggcaatttggttaaagaaaatatagtgaaaatttgagagacaagtcagcaaagtacatgtgacaaatggagaatgtttcagttatttgtgaatctattttttatttattatatatagatttcattgttcatataaaagtctgagactcttaaatagttttttcaagatattatatattttaaggtaattatatatagtagttattatttatcagattctaggtatttggcctctaattatgtgtagtagaaagactatataaattaaatttgtaaatatatttaaataatttaaaactttaacttcaagataatatatatagcaagacaaaatgataatatttacataatacaaattatctttttaaaaaaatcctaatataaaaaagtacatatgaaataagatccacatgttttaaatgcatcagacactaagacaagttgtataaataatttttcccacaaaccaaagaagaaccaccaaaatcccaatcacaatcccaattaaacaaacaaaaatg

SEQ ID NO: 13531 - DNA, 3000 bp, Unknown
  misc_feature (1)..( 3000): cDNA_ID_2703244_gDNA_ID_2214634_Annot_ID_136101 3000 nt of promoter + ATG
ccgttgacttaaaataagtatgaaaatagccaaatagccatgggtaaaaaataaattaatctcaaacaaaagataaacatacaacaacgtattgtaatttatataaaaaagagtaaaataagtactaattacacgaaatccaaaaaaaaaaagtcaatattggaatattaacaacttaagagaaatatccaacgagaatcatggggaaaagcaatgtcatttaataaaatagcatgtcatactaaaaaatataggagtaacgtgtgattgttatgcaagtggcgatggtggttgttgatggttacgaaagtggtaatagaaaaacggatttaatgactcttgattgatcatctttatatttttgggggatatgcaaaagtaccatttttgtactacccttttgcaataatacatttttcttttatctatttttaaaaataccccttctcttaagtaaaatgaccaaatgaccctcatctaatgagaactctttaatagttttctatgtaacaaatttttccggctaaaaaaaatgcatttaaaatcattgtaaatattttaagaactctttaaaaaaccttgtaaagttgttaaaaacccttataaatcatttaaaaacctcttaaaatctttataagtctttaaatacatatataaatactttaaaacccgttttaaaacctttgtaaattattttaaaacttcttacaatgattttaaaagatttacaaaagtttttaaagagttttaaaagaatttacaaggattttaaaaaaccttgtaaatctttttaaacccttgtaaatcatttaaaaatattttataaaccctttaataaattttgaaccattttaaaacttttgtgaaccgcttacaaaaggttttaaaaagatttaaaagagtttttaatgggttttaaaacccttgtaaatcttttaaaaatcttttaaaaacccttgtaaatcctttaaaacccttataaaccatttaaaaatattttaaaaatccttgtaaacctttaataatttttgaatcattttaaagctcttgttaacctttacaaaaggttttaaaaagatttacaagagtttttaaaaggttttaaagaaaaattctttctaatacccttttcacagtaccccttttcaattctacccttttctatttaccattttcaattatactctattaaaatttttaataaccattttacccctatttgtaaattgatttaggttaacaaaatgaaatattaatattttcgcctaaaatattccaaaataaaatttcccgccaaaattttcgcgtcaaaaattttcgaaaaagaaatttcccaccaaatttttttttcaaaaacatttttcccgccaaatttttcccgccaaataaaattttcgaaaacatttttcccgtaaaattttttttttggcgagaaatagatttacaagagattttaaaatggttttaaaatattttaaaatatttacaagagattttaaaagggttttaaatatttacaagagattttaaaagggttttaaaagatttacaagggattttaaagggctttaacagacttacaagagtttttaaaagatttttaaagggtttaaaagtgttttaaaatatttacaagagatttttaaagagttttaaaagatgtacaagagtttttaaaagattttaaaagaaattattagaaaaccctttaaaaactattttaaatacgtaccattctttttctaagagttaaaaaatgattgtatagactttataagagttttacaaaggtttaaaatccttgtaaatccttttaaaacttcttaaaaactcttgtaaatcatgttttacccttttataagcttttaaaatccttgtaaatcattctataccacttacttatcttttataagcgattgtaaaccatgcaaaccttttttaaaatcccttgtaaatcattatttgacacctatttatactttgaaaacgattgtaaatcatgttaaccccttttaaaatccattgtaaatcattcaatgccacttacttgtgcttttaaacgattgtaaaccatacaaacacttttaaaatcccttgtaaatcattctatgccacttacttatgctttaaaagcgattgtaaatcatgttttacccttttataagcttttaaaatcccttgtaaatcattccaataccacttacttatacttaaaaaaaacattgtaaaccatgctaaccctttttaaaaatccttgtaaatcattctatgtcacttacttatgctttaaaaacgattgtaaatcatgttttacccttttataagcttttaaaatctcttgtaaatcattcaatgccacttgcttatgctaaaaaacgattgtaaaccatgctaactgtttgtaccgaggttgtaacaataattattaaggggtttggggagaacggagtagcttctttattaatgacgaacggaaaagacggtaatttaacagaacggagaaccgtaagtacagaacggagaaccgaaagtacaaatcggaaaaccagaaaatacaaaacgggaaagcaagagataacagagctaggcaactattctctcttaaattctctaggtaataactcctgctcccttttcccaatagtgtcttctgctatttataggctaggagctgacctagggtctcccctgcggttttacgtttttaccctctcaagtttgtcgggctgggccgagcagctttcatctgagccgacttgatgttgttgggccgagcagctctcatttgggccgagccggacgatctgatgggccgttcttctgatgggccgttcttctgatgggcgttcttctgatgggccgttttgacttattcattttgtgcttgggccaaactgggcatgaagggcaaggcccgtatcccacaattagtccccccctaatccggtaaatgagagcttgctcgaagtcggcgggtttctgtttgaaactaggatcatg

SEQ ID NO: 13532 - DNA, 3000 bp, Unknown; identical to SEQ ID NO: 13526
  misc_feature (1)..( 3000): cDNA_ID_2703248_gDNA_ID_2214634_Annot_ID_136104 3000 nt of promoter + ATG

SEQ ID NO: 13533 - DNA, 532 bp, Unknown
  misc_feature (1)..( 532): cDNA_ID_2685649_gDNA_ID_2214635_Annot_ID_136105 3000 nt of promoter + ATG
atcaagaatagttaaatcatacatgtgtgaacttaaacttttaatcattgaagttatcaatcagctcacgaggcaattcatatgcgaatcaaaagatggatttcttgaaacttaagaacactactgtgttcaatatacaaattatgaccacaagatttgatcataaacttaatttttacaatggaagttagagagcgaaaatgatgcgttctcgtctccaaatcaaaccatgaccagttcactgatccagagtaaaataggacttcatgtggtggaacagaacaacaatcaagaagagtagttaaatcatcatacatgtatattgctttatttttttttgtttgtttgtgcaaattgtgttttgttgataatcaacgcacactatgatccatacgttaatgggctttggaattgagggcccattgtaataatcaacacaaaaccctaagaaatggataaagtataaagcttcattttttacactgcaaacgccgtttcgagacttccggcgaagaagacgaacgcaaagatg

SEQ ID NO: 13534 - DNA, 3000 bp, Unknown
  misc_feature (1)..( 3000): cDNA_ID_2703280_gDNA_ID_2214635_Annot_ID_136108 3000 nt of promoter + ATG
tcgaatataaaatttgatacacttttgttttcttcttcatgctgaccttaatagtcagcaggaagttattaatatgaatttaaaaactgggataacaacaactaattaaattatacaaattaacacagataatggtaacaactattaagttatcatcagctctcgttgtatagaagccggcatacagagccggctagagaatcattcttttctacaaatatacaatcatatgtctctctctagtcaaatatataaaacataatattgttatgattttacttaacatagatgacacataatacaatatttttgttaaaactatatgacatatgagattatccactttatatcgacattgaatcatcgacatacctacaaatttcagtattattcgacataacttttcgttatttgaagaattattattattatttttaagacacaacttagtacttaactatggatgatttggtatttacaaaacaaatttgtattctttataaccactcaaactaaccacatttgaatgatgtccggtttctttaatgagatatcaatcaacaaattcacgcatatatgtcaacatgcaattagtgactccaactctcatattattatataggtaggtatatcttatacacttaaatacgacactactttatgacatcttacctactactaaaacaatatgttcatgcttagatgcacatgcaaatatgtaagaaacatcacttaaaagaaaaagagttcatcaaaacaaaacaccatattattatatggattccataattttgttttcatccactaatttaaaataatattcagcttatatttatgtatatatccgataagacactggatgatcaccaactttttactcttatgtgaacttgaatattcggtcatcagaaaaatcattaataactattggtttatttttgtaaaacaagcaatcatgtcgatgattaaagggccatatatttaatcttgaatcaggaatgacaattcatatattaaactaaatgtcacgggccgtatatacgaatacgtacgaacctccgtgataacctatcgcttgcgtaaggtactaaggtaaaataataggtggtgcaattttagtctcaaaagacacatatcacgtaaccatgatttgcgacgagatatatgcattttgattatcaaaactatataataatttgaaaaactacatttctctctgccaagaaatgcaccccactattcgaagtcaacacagacaaaaaaataaatacgaacacaaaaatgaattaaagtcaaaagctcgctagttctctttttattatattgttatacatctcatctagtatataatcaccaaccatcttcttcttccattttcttcatcttcataatctcatttcctctacgagtttctagcgtaaaaaaactaaatacttgtctttaaagaagaaaaatgctaggaaaaagaatagcttccttcaagaacttagcaaagaaaatgaagagcatcaacacgacgacgagaagcggaggagaaggcggctcggagtcaacttataacgagtctcttctgatgaatgaggcggacgaggcggcgatgatggcgtcaaagacgccgacggggacgtttgcggtgtacgtaggggaagagcgcgtgaagcgcgtggtaccaacaagctacttgaatcatcctctcttcaggatgctcctcgacaagtctcacgacgagtttctctgtttcgagcagaaggttatgttggtggtcccttgcagcctctccgttttccaagacgttgttaacgccgtcgagtcttgtaatggcaacttcgatttcggcgagtttgtcgaggagtttctataaatttaattccgacttcttcttcataattatgatttgtcctcaagacattgtcttaggtctttttttaggaaactatatattcgtaggattgatcgattgattgtgaaatttgtgatacattgtaacacccctttgttgcgtggtgtggaatttgtaaatttttccataattatgatacatattattttactttaaaacatatattagttcaaaaaatcaaatacataaagttttatctatttgtgtttcccattatcgagaaaaaataaaatctatttgtgtttcctagccttcttttgaccttaacgtttggtcccttttatggttcaaacatgttggtgagttgagtcagaagcttgtctcgaatcgtaaccctactccgagtctgtgacactgaaaagtttgaaaggctaatgagagttgagtcagaagcttgtgtatgtttaagtttgcgtttacaaatttataaaataatgtttcaaagttttttaaacataaataaaacagagacacatacatcaaaccttgctttttgaaacaatctaatcttaaaatttcatgatcttggaactttatttatgtttggaataaaaaattattagtacaacaaatatgaaaagtgttaatagattacaagatgcataattgcataccacgcagttcacgctaagctacttgccgatgacgactccaaaaaagttatcagcagttttttttttttttggtagcatcagatttggtttgacaaaaacataaatggagtacttgttccaacttgacaacttccaaggataacaaaaaatctgctgacatttgggccttaatgggccaatacgtagaatatggacattaggacacgtcatcgtcggcatgtagaaggaaagggcaaaatggtaaaagagtaatgaagaagcgttaaaattcaaaagagaaaaagaggagcggctcttcaaataatttcaaatctcatatccaccccgctctctctctctctacacctcagattccgtcgccggtgagacagaataagagagaatttcaaatatcgaagaaatttgggatcttgctgagcagtacaagtaattggattttgaaaatcagtctcactggattcgccgtccgttcgccgtttaaaaatg

SEQ ID NO: 13535 - DNA, 3000 bp, Unknown
  misc_feature (1)..( 3000): cDNA_ID_3030645_gDNA_ID_2214635_Annot_ID_136113 3000 nt of promoter + ATG
ccattgtactttaatatataatttagtgaacaagtcttaagaactgtttaggcctgtaaagcccgaaagaattagtattagtaatatataaagtttgtattgaatatgggatgatgaaacgatctagcttccagaaaaagtcttaattacacaacataataataactaccaaacgtgtcaacgctcccgtattcgtccactaacattctcccatgaaccctaagttataagtcctccaaggctacgatcacatttacaagcggaaaattgttgtgtttgatttgtttcttgttttattctcactctaagcctctggttatatagcattttttggcggaaaagctaatcgcaaaacatgagattataattatgcgacatgtcaaattgttatgaaaacattttatataataagaaatttatttggtatagtatcatatgaaacaaagagtcaatacaatatcaatgtcattatatgtgctcattatgttaagttgagtcaaggcactttactaagaacacttcaataattatatttaactatttctgtgtattcatacgtatgatacaaggtttggtgttctatatactttatcctcatcccttgaattttagttgggccaaaataatgacattaaaattataatatgttgctatataaaaaattgttacaatttggatgcaacatagagagatcattagcgagacattgggtggatcgtgcaattcatttctgttttgtcaactagcaattcaaattatggcgacattatatacattaatccatattacacaaaaactaataaactatatatgtcttggattcaaatagaagaaataaaagtcaacgagtttgccctataaatgattctatgctttcaaatagttagctacaagctcatcaatctctgctctattaaaaaaagaagaagaagcaaacacaaaacaacaacaaagaaatatggcaaagctcatagttaacttctctgctctcttgatgatcatcttgttggtttctaatggtaattttaagattttcttaacttcctttgtcctatattaatatcgatatggatgtgaaaagattaatgtgagaatggttaaaacaggactcccaaaggcggtagcccaaacatgctttaaaggtgaagctcaagagggtgtgtgtgttaaagttgacggctcaaaattgtgtgaccttctttgcagggcaaccaacacaacttggtttggggcatgtgaagtggaagacaacgagacgcactgtcactgctacggaccttgttaagtatctcatccggacgcaaaaccaaatatgaaacgtgaataattgtgtatcagtacctaaataatgtgtgcattgcttatgatcaatgtcacatatctacatgtgtgttccatgtttgtgtgtttttattttatcgctttcaataaatttgcatcagcaccgtaaatgtagctgatgcgataaatgaatgtaagattaaatctgtttattatgtttgcttttggtgttccattatctctcctatatatatgtcctcttctttttcttcattcttgtcattaatctatatgtatgtgctattttttgttgaacaaaggctaatgagtcttatctataacaccaaatcaactcctaatagtaatagaactcttaacctaaactcaaaagaagtaaagtacaaggaaaactctaatcaaaagttcaaaaccatattcctaaaccatgaaacataaaggaatatcacaacctcgaaactcttttgccgtaacgactagagttgctttttgtttttagttaattcaaatgatgacattattgttccaactatgtaatgtagccaccacatttttcttgtaattttttttgtttccttcataaaattcatttagcaaatttacacaaaaaattcaatgaaagtacatgaaatgaaatttaaagtacaatcatttcccatagttttttttcttaccaacaccaacataacagtgataaattggaacaaaattttaccaaaataaaaataaaaattttatgaacaaaagcattttttatatattttttaattattgggggtttaatgaatttgagatatttactagtcagaaaacaccaaaaccctccgtttcgtgggtttcctccagaccttgagctccttgttcaattcacactttttctctcccaactcttcttccaggtttcctctgctactctcaggtttctcttctccacttccctccagctttatccttttgatttcgtcctccatcttactgtatttacccaaaaatctaagcttttctcagtgttcttccatttctctactttgttttcatgtaatgctgcaaacttcgcaatacccatcttcaatttcttcaattcgtaatgggaaaaagcattttagtttaatttgggttttgtggttcctcacttgtttcattcttctaagtcttaaaccatccactgattctcaatttctgaggatttgatatctattgctggttaacaatggagcatagatgcgactgggttttgtttatgttaactttatgaatgtaaatcacactgctttgtggctactttgtggatttcgtgttttactttgtggctgaatcatataactctaaattgagagctttgggtttgaccatttagctttttatgaacaggtcttgttagggaagtaatcagtggaattggatttagtcttttggttctgaattttgtaaagtcctgcagtgattggtctcattatggcaacttacgtttcaccgtgttttactccttcggattctcggttactaactgttcttagaaagaatgttttaccggagaatcatttaggcaggttgaactccattagaacgattgacagtaagaaaaaccgagttgttgttgccgctcagaaatctgaatcttctccaatcagaaactctccacggcattaccaaagccaagctcaagatcctttcttgaaccttcacccggaaatatctatg

SEQ ID NO: 13536 - DNA, 3000 bp, Unknown
  misc_feature (1)..( 3000): cDNA_ID_2703272_gDNA_ID_2214635_Annot_ID_136116 3000 nt of promoter + ATG
ctggtccgatctttctgtaccttgcgctttgcttatttcagttgttagctggtaagatccagttcggtgtcatacttggatggatcgtcgtctcctctatctttctatacgtcgtctttaacatgcttgctggtagaaatgggaaccttaatctccatacgtgtacgagcttggtcggatactgtttgcttccggtggtggttttatcggcggtgtcattgttcgttccccagggagcagggccggttcggtttgtgcttgcggctttgtttgtgttgtggtccactagagcctgctctacattggtggtatctcttgctgatggtggagaagagcaccgtggcttgatcgcgtacgcttgtttcttgatctatactctcttctctcttcttgttatattttgattccatattgatagatcgtgaatcacttccgatgctgtgttagcaagtagcaaaaaaaggctgcaatataagttctttgatgtgaggttgaattgggtgggaatagcacggtgtgtaaaggcttttttggataaatttagaaaggtgtttaagaaatttgattcaatgtttgtatctgtcacttgatctttaaggttcttacttaagaattatttatacaatttggtcgatatgtcttttgacatagtttgttcctggacattagatttgtgagagtattggaattgatgttgcggatgatatgcttctgtactaatgcagaagaggtttatatgcttcctatttcatgtttattttgctatttactttcccggtgtgaggctatgaagatgtgctgacttcttgcttggattatacttaaaggtcccaagttttaggaatgattggcattagatttgcttaaagtatggctccatgtaggtagagtagaattttgagttggttttagagctgttggaaacttaggcatagtctaatgaaagagtgattagtatttagtggtttgctcggtgttggtatgttccctgattaggtggcatagataagtagggacatgggatcttggcttcaggttcgtcttctactgtcaatcccagaactgcacttacttttcctgatagtatttgctgtgtcacggaaattagagagagatttatccgcaattcatactctcttagatggaatttgttttaatgtgtcgagaagaatcagctatgtccaattgagtgagcatagtatttgtcagctttaccttctcctaaaacattcagtagaactggtgttagaaatgatctctatattttcgtgttgcaacactcgttccgagggaaccatttttgtgttccaccttttctttagaatccaaattgactcaaaggggagtaggcaattgttttaaacatacaatgtaaagatgtaaaatttctgatatatctggtggatgtacttaagacataccctacaatttcgatccttggactcaattgaaaccaaacttttaggcggcttggtctctcccttaccaggatcttgtcaaaggaaaccatatatactcatactcacctagttcttccatgatatccagatagtgataaaccatctgattaaacactcgtaacacttgcatatattgacaagattatctctcaagtgtctataagatacgtatttgtgtttcaaggtaaaattgtaagatatacatctgattaagtattcttactctcaattctttgattatcaacatagagaacccctctagaccaaaccaaatcactccaacctcttgatgttgccggtacggcattagagatttcggcagctggtaatagacagttggccagtaaaacgctacctgttctcgccggtaatctctggcaatcatacggtggagatgtggccgtatcactgacggcctccaggtttatctcgaacagatcatcttcgccgtcttcttcactacttccctcgccatcgtgttcaggttcgtttgcttcttgtttctcctcttcttctgttccacggttaaccaaaccaacacaacgtgtcattgttgattttgaaataatttccggtttaagagtccttgtggttttaaacttgattatgtggttaatacgtatatataaaggtgattaaagtagaaggtgggttagtagaacggtcctcaacgaatatacaactatctttgttgggaatttttgggtcttccaaaagattttttttatacaaagaagaaagtaaattccaaaagaaatttgttatagactcgtgacttgagatcgagaataataataacttgagtacattaaatgtgtacggtgcaacagtcactgtttagatctaactatattaatagctacttccgaataatatatgtttaggacttaggagcaaatgataacttctcttattgtttctcagttcgttgccacaaacatgtagtcaccaaaacgagtctatttttacttgtgactatagcacaacatccaatcgaattacacgaaccggttcaagatattgaatcctaagcttttctcaaaagtcgattccaattccgaatgtaattgtagagtgcatcaacgacatcattgtcaaaaataaatgataataattatataatggtattatactataaaaggttttatggaggagaaggtacacctaacacgaatcaaatatatacctaccaacatataaacacacactcttttgtttaataaactttgcacaatttttattttcactttttccgttttttcgggtctaattttctatttcggttgtaaagataataactttttttctattataataatttactcgtaaattaatcaacgaattacgtggcttaaggatattcacatctcaatcctattacgttgggttaattcacaaacaaacaaaacaagacacgaccaaagttacaagtaaaccaaacaaaatctaacctgtgcgtgttaattagaccaaacctctctcttctctcacttcccagctacttctctctctcgcgctctctctttcttttttggcaatg

SEQ ID NO: 13537 - DNA, 3000 bp, Unknown
  misc_feature (1)..( 3000): cDNA_ID_2703289_gDNA_ID_2214635_Annot_ID_136118 3000 nt of promoter + ATG
gttttctcggcaaccaaacagaaatgaagaagagattgggacacaaaaatataaaaagagagaaagagagagagagagagagagatgtgttaccttgttgttgttgattcactgaattctataatgggtggaaacagagagagagagaaacttaacggcgaaatgatgatgatgaagatgatgatggacaaacaaataaaataaaaagtattctttaattctatgatatttttgagaggtctatttttacaaaaaaaatgtttgtttggtggtgccaaattctattattgatttttgaaacagtgtttgataatgataccttggttaaaagaaaaaaaaaatcattcaattggatgactatatagttttatgttgaaatgtgtatggggggttacaaaaatgtatattgtgtagcaaagaaaaagacaggttggaagaggagccaaatttgaagtccatccactagtaatcttatcctcactctctctattttatatagttttgtgttcacaacttcacataccctttcgatgtcaccatatgggcacaaaaactattaatattttgcccaaaattggatgatatttgttttttatttccaatttttgataagttattttatatatcactgttgatacaaagttgcatttatccatatctttgtcaagctgactagtttctttatcactagattataatttaatggttcataaatcttagtcttcatgtgattttttttttctaaatataagttgtagaaaattgctttgtttacaacaagactctatagagtttttaaattagactaacatacatatacataggaacaaatatagttttctttttgtgagaatgtaaggtaataatagtatgtgcaaatgtggtagacaagtgttgcttaagatccacttccatctaatctaatatatatttagtcgagttagcataaattaaaatctagtaatgttttcagaacaatgagtagtaaatcgtttatacgtttaatcagaagtagtgtttaaacaaatagagagataatggagaaggttgggctataacaattggcataatcccattttcggccgccaagattctcgtccgtcccatgttcccactttactttccaagttttgtcaatttatgatatcttttgacatggaccttcattattggttttatgtcggctacaatttcatttgtgtgttttattattatttcagaagtagtgtttaatttatctaattatcttttacatgtgttcggccagatatttatctttccgactgtaaggtgcaagctcagtatcattatggcatgagcatttgttagtgacttggatagtgcgtggatattagtcgtctataaatgtatcaacctgataagttaaacatgtgatttactttgagaaagagattgcatcattatgttggtgctttcacagtcgacatacccatcaagtcttcttttcaggaaagtctatgtaacccattactgggtttatagtttaccctggaggaactactcataaccacccttgtcttcaatcattttacgtaagcacaacaatacaaagagagccgagagattatttttgacatgatataaacatagagacaaaatgaaagtaatatttcaatcagaaaaatatcacaaaccaacatcaacaaaacaaattaatataaacattactcttaagatgtacatatacttacacaactttaaataactttctaatgaagcagcatgatgataggttacctcaatatattgactcgagaagaagaaaaataaaagaagcgtaattgttgttagtaccgattttattttaggcccaatataatttgggctttttatgttacgtataagtaaaatttaagttttgaatgaaaaagtgggtaacgcatgcgtgaacgaaataaacgtctagtcaaaatgcgtcgttggtgacatattcaatccacaactgttgtagttgggaacatgtgacgtaacaggttccttcctcccaatttcccaatctaataattgttttacatatattctagttactgtattattctgtgggatccttaattttattatttgcttcaccaaaccgtcttaatcccacgaaagttacattttaatcaagaaaaaaacacatgaaaatcctttttcaccttataaattatgtcattatataaaaagcctagtaatcaattccttatttctaaggaaaatttgtagataattcaatttaagaaagggtttatcgtgaaagataattttagcatgattggttaacttataaatgtggcttaaaataaggttagattatttttatatatacatctgtcatcgcaaaaagagggaaaacaaaaaataagaaaattgtggctggacgactcagcaattcgtcgtcttctttccatatatcttgtttattatttcataactaatccacttcgattctgctttttatataaagttgaggtttttgagctattttttctcctaaaggattccgaaaaaagcttagacctttttgatctgatacgtatctataaatctggaaaggagctgagagtttcaaggggttttaatttcgctgagaaaacgtttaattatctttgtcgagatggattgtggtatggagaattgtaatggtgggatctcaaacggtgacgttttgggtaagcatgagaagctcattatcgatacagacccaggaattggtgagcttcttcttcccctgttttgattacgtcttttagtaaatggatcttcaggcagagtaggatttaacctcagaaagcttccaactttgtttaatttgaatagaaatatttagatggttatctcttgaatctgtttttgtgtgctcatttacttgtaaagttcaatgctttgcttaatagaaagattcaggggaaattgttcttttttgtgtgttgacttttttccaaatgactgttcaataggatcagttctaacattagtgtatgattagatgatagcatg

SEQ ID NO: 13538 - DNA, 3000 bp, Unknown
  misc_feature (1)..( 3000): cDNA_ID_2703300_gDNA_ID_2214635_Annot_ID_188098 3000 nt of promoter + ATG
gatgacacactcacgaggaaccgtgaggttgaagttgaggcgatgctcagtaggagaaagcaactaaggacaacaacgacgaggacaacaacgacgaggacaacaccattgagcttgtcttcctctgcttcaaagatgaactggtctaaaaacgatgagcttgtcattctcggggttagttagtaaattctttgcagcttctctatattcttctttatcctcttctaactttttttactctattttgtgtgtgtgtgtaaaagggtattgtggactatgagaatgaaacgaaattgagctatagatctgactgggatgccttgtaccgttatatcaaagattgtgtagaagcaaagttttcgaagattcagctcatcaataaggtcaagaacatgaagagaaagtttacatacaatcaggggagatctaaccatggggaacaactttcttttactaatactgatgatgatgaaatcttcaaattgtcattgatcatatgggacaagaatgaatcagagtatgtttctaatgagaatatagaccaagctaaggtgagtgtctttgttctgtttttcaacaatctcttagactactaatgtgcaatgaattaatgatcttgttttcttgatttgcataaggatgttccttctggtgagccagagactaatgatgtgccttgtgaggagcaagacgatagggatgtgccttgtgaggagcaagagcgagcgaatatcgagattgataatggtgtgagagagaaattggaccaagccaaggtgagtgtgttagttctgttttttctaccaatctccttgttaccatcttaaaacatgatgtaaaaaattgtgttactaatgatgtgcaatgaattaatgatcttgttttcttgttttgaataaggatgttccttgtgtggagcaagagagtgaggatgtgccttgtgtggagcaagagcgggtgagtatagagattgataatggtgagaaagagaaattggaccaaaccatggtgagtgtgtttgttctgtttctaccgatcttcttattaccacctcaaaacatgatttattgatcttggtttcttgttttgagtaaggattgtgaggagcaagagaatacggatgtgctttgtgaggagaaaggcgataaggatgtaccttgtgaggagcaagagaataaggatgtgccttgtgaggagcaagagcgggtgagtatcgagattgataatggtgaggaagagatgagtagcgaagaagatggtgtggatgaggtaggtgttatggaggacacacttgattctgggatatcgtttcaaggtttaggtaaaaatggtgtgaaagacaagagtgaagaagatgatgtggttgagttgggtgttctccaggagatatttaaggaggatacattttttcaaagtttaggtagatatcaacaaaaattgctgcttcagaatttggaaaacgttggagttgaaagaagaaaagagctcatcaacgaatggaaggcattgtttgttgatgagcagcgattgtgtgtcaagaaactaactttcgccgcaaagcttgcaaacttaggagtttctccttgattcaatgaagaaaaatctctgcttttggaatgatctcatttttttttggttgtgtcatattgataagaaaaaacatgatgtatccacgatccgttcttgttctagagccaggtaactgaggtaagtaacagttagagctaaccatagcagattctcctttttttagtgttgtgtttgtttcgactcttccttttgggttgggcttcgataacgattgttcaggcccactaacattcttttcttattgtgcgtctgtctctttcgagaaaaagacacaagcacttaaagccaagattcgcattttgccacatgccactaatttcaccttgtgttagatattatttttgtactacacactcaacgaagaccatagatcaactcaaaatatttattacacaacaattatcggagaagagattgatgtgaaatgtaatgaagacgaaaagaaaataaaaaaagaaacgacgaatttggacgtaattttcagccaaaacatatgctttgggtcccacactttcacatttcaactttatcatcacaccgaaacactaaacaccaaaatccccgacaaatttaaagaaaatttttccattttttttttttactctatctctgtgagagattctcttcaagctcaggcctttaggctttaggtttcttttgggagtcttcttgagctctgtaatcactctctagaagcttattttgcctcctaatgttattaggtacgtctttgtatctgtacttgcttctgcatttttcgatatttgtttcttttgatgagatttggggactcttccttcagaaggatttgaagattttgacatcttccattaaaagttgaatctttacttaagctagtgttcttagcattctgtttatgttagcttcatgagatctgggatctcgaggctgctttttttttttgctttgatttcacatttaatgggttttgattacattttcattaggtgaagtgagttgaacttggcttgtggttttgatgaatttctttctattaaaagttttggtttccctaccaaaaaaatgtcttctttttgttaattaaagtctaaaagtagctaatctctatctgtacttgtgtagggttcatcatttgagtctataactataatgactttcactgttcatttcctttttaaatctcttgttgtttccctttccttactttgttcatcatttctccttccctttactcaatagacactgctcttcctttggattattgctctgtgagttatttaaaataagccataaggtctcttcttatgattgttgcagggtgttgtactggaattattaggatgaaccaaggaagatgagtctctcggtctttcaaaaaccaagtcttgtaatgaggagctgtccactgttgtaaagtaagtcattaag

SEQ ID NO: 13539 - DNA, 3000 bp, Unknown
  misc_feature (1)..( 3000): cDNA_ID_3030617_gDNA_ID_2214635_Annot_ID_188093 3000 nt of promoter + ATG
ctctgtcttcttcgtcgtcgggatctctaactccgccgcgtagttttcgagaacaggtgcgatcaccggagagagagatgattcgacggttgatttcatggaagcttgttgttgttgtttgagacagagatcgccgtaacagtttgaacatagattcattgtcgctgagcttccgaagaaaccgcagttgttaacgcagagacggtgaccttcaggcgtctcgcatcgatgttcttccgccataattatttaaaagaacagatcttgaagaaagttttttggagaaaagtaatgaatctgaaacaaaacaaagaagagagaattaacgtgggaaagttttgaatatggtcaccgagtttttttgcagaaaagtttcctgcgttttctcggcaaccaaacagaaatgaagaagagattgggacacaaaaatataaaaagagagaaagagagagagagagagagagatgtgttaccttgttgttgttgattcactgaattctataatgggtggaaacagagagagagagaaacttaacggcgaaatgatgatgatgaagatgatgatggacaaacaaataaaataaaaagtattctttaattctatgatatttttgagaggtctatttttacaaaaaaaatgtttgtttggtggtgccaaattctattattgatttttgaaacagtgtttgataatgataccttggttaaaagaaaaaaaaaatcattcaattggatgactatatagttttatgttgaaatgtgtatggggggttacaaaaatgtatattgtgtagcaaagaaaaagacaggttggaagaggagccaaatttgaagtccatccactagtaatcttatcctcactctctctattttatatagttttgtgttcacaacttcacataccctttcgatgtcaccatatgggcacaaaaactattaatattttgcccaaaattggatgatatttgttttttatttccaatttttgataagttattttatatatcactgttgatacaaagttgcatttatccatatctttgtcaagctgactagtttctttatcactagattataatttaatggttcataaatcttagtcttcatgtgattttttttttctaaatataagttgtagaaaattgctttgtttacaacaagactctatagagtttttaaattagactaacatacatatacataggaacaaatatagttttctttttgtgagaatgtaaggtaataatagtatgtgcaaatgtggtagacaagtgttgcttaagatccacttccatctaatctaatatatatttagtcgagttagcataaattaaaatctagtaatgttttcagaacaatgagtagtaaatcgtttatacgtttaatcagaagtagtgtttaaacaaatagagagataatggagaaggttgggctataacaattggcataatcccattttcggccgccaagattctcgtccgtcccatgttcccactttactttccaagttttgtcaatttatgatatcttttgacatggaccttcattattggttttatgtcggctacaatttcatttgtgtgttttattattatttcagaagtagtgtttaatttatctaattatcttttacatgtgttcggccagatatttatctttccgactgtaaggtgcaagctcagtatcattatggcatgagcatttgttagtgacttggatagtgcgtggatattagtcgtctataaatgtatcaacctgataagttaaacatgtgatttactttgagaaagagattgcatcattatgttggtgctttcacagtcgacatacccatcaagtcttcttttcaggaaagtctatgtaacccattactgggtttatagtttaccctggaggaactactcataaccacccttgtcttcaatcattttacgtaagcacaacaatacaaagagagccgagagattatttttgacatgatataaacatagagacaaaatgaaagtaatatttcaatcagaaaaatatcacaaaccaacatcaacaaaacaaattaatataaacattactcttaagatgtacatatacttacacaactttaaataactttctaatgaagcagcatgatgataggttacctcaatatattgactcgagaagaagaaaaataaaagaagcgtaattgttgttagtaccgattttattttaggcccaatataatttgggctttttatgttacgtataagtaaaatttaagttttgaatgaaaaagtgggtaacgcatgcgtgaacgaaataaacgtctagtcaaaatgcgtcgttggtgacatattcaatccacaactgttgtagttgggaacatgtgacgtaacaggttccttcctcccaatttcccaatctaataattgttttacatatattctagttactgtattattctgtgggatccttaattttattatttgcttcaccaaaccgtcttaatcccacgaaagttacattttaatcaagaaaaaaacacatgaaaatcctttttcaccttataaattatgtcattatataaaaagcctagtaatcaattccttatttctaaggaaaatttgtagataattcaatttaagaaagggtttatcgtgaaagataattttagcatgattggttaacttataaatgtggcttaaaataaggttagattatttttatatatacatctgtcatcgcaaaaagagggaaaacaaaaaataagaaaattgtggctggacgactcagcaattcgtcgtcttctttccatatatcttgtttattatttcataactaatccacttcgattctgctttttatataaagttgaggtttttgagctattttttctcctaaaggattccgaaaaaagcttagacctttttgatctgatacgtatctataaatctggaaaggagctgagagtttcaaggggttttaatttcgctgagaaaacgtttaattatctttgtcgagatg

SEQ ID NO: 13540 - DNA, 3000 bp, Unknown
  misc_feature (1)..( 3000): cDNA_ID_3030624_gDNA_ID_2214635_Annot_ID_188091 3000 nt of promoter + ATG
attcccaacaaagatagttgtatattcgttgaggaccgttctactaacccaccttctactttaatcacctttatatatacgtattaaccacataatcaagtttaaaaccacaaggactcttaaaccggaaattatttcaaaatcaacaatgacacgttgtgttggtttggttaaccgtggaacagaagaagaggagaaacaagaagcaaacgaacctgaacacgatggcgagggaagtagtgaagaagacggcgaagatgatctgttcgagataaacctggaggccgtcagtgatacggccacatctccaccgtatgattgccagagattaccggcgagaacaggtagcgttttactggccaactgtctattaccagctgccgaaatctctaatgccgtaccggcaacatcaagaggttggagtgatttggtttggtctagaggggttctctatgttgataatcaaagaattgagagtaagaatacttaatcagatgtatatcttacaattttaccttgaaacacaaatacgtatcttatagacacttgagagataatcttgtcaatatatgcaagtgttacgagtgtttaatcagatggtttatcactatctggatatcatggaagaactaggtgagtatgagtatatatggtttcctttgacaagatcctggtaagggagagaccaagccgcctaaaagtttggtttcaattgagtccaaggatcgaaattgtagggtatgtcttaagtacatccaccagatatatcagaaattttacatctttacattgtatgtttaaaacaattgcctactcccctttgagtcaatttggattctaaagaaaaggtggaacacaaaaatggttccctcggaacgagtgttgcaacacgaaaatatagagatcatttctaacaccagttctactgaatgttttaggagaaggtaaagctgacaaatactatgctcactcaattggacatagctgattcttctcgacacattaaaacaaattccatctaagagagtatgaattgcggataaatctctctctaatttccgtgacacagcaaatactatcaggaaaagtaagtgcagttctgggattgacagtagaagacgaacctgaagccaagatcccatgtccctacttatctatgccacctaatcagggaacataccaacaccgagcaaaccactaaatactaatcactctttcattagactatgcctaagtttccaacagctctaaaaccaactcaaaattctactctacctacatggagccatactttaagcaaatctaatgccaatcattcctaaaacttgggacctttaagtataatccaagcaagaagtcagcacatcttcatagcctcacaccgggaaagtaaatagcaaaataaacatgaaataggaagcatataaacctcttctgcattagtacagaagcatatcatccgcaacatcaattccaatactctcacaaatctaatgtccaggaacaaactatgtcaaaagacatatcgaccaaattgtataaataattcttaagtaagaaccttaaagatcaagtgacagatacaaacattgaatcaaatttcttaaacacctttctaaatttatccaaaaaagcctttacacaccgtgctattcccacccaattcaacctcacatcaaagaacttatattgcagcctttttttgctacttgctaacacagcatcggaagtgattcacgatctatcaatatggaatcaaaatataacaagaagagagaagagagtatagatcaagaaacaagcgtacgcgatcaagccacggtgctcttctccaccatcagcaagagataccaccaatgtagagcaggctctagtggaccacaacacaaacaaagccgcaagcacaaaccgaaccggccctgctccctggggaacgaacaatgacaccgccgataaaaccaccaccggaagcaaacagtatccgaccaagctcgtacacgtatggagattaaggttcccatttctaccagcaagcatgttaaagacgacgtatagaaagatagaggagacgacgatccatccaagtatgacaccgaactggatcttaccagctaacaactgaaataagcaaagcgcaaggtacagaaagatcggaccagatagatctgaatctttgtgaacagcttggttaatccgaaaaggattgagaatcgatctagtcttcttccagatttgatctggatggataccgagctcgtcgagtaatggctcctcatcttcaaacgaagctgaacctccaccaaaagaagaagaggaagcgattgtcccgccgaatggtccggcaggtgtagcggaagacgcggctgcggatccaatgtcgaatgacatgaaagggattgcggaagaagagggacgcggcggttgaaacggtgtcgctgggaatcttcgttgctggacattagcaccgcctgaagatccaccggaggggaaaactacaggtggaactgcgaaatccttcgtcatcttctttccgaaattgagatctcaccaaatcagcaaagagattcgaaattagggtttcaagtttggatcaatgagatgaattttttaacccaattcacacgttcgtgacgtttcagagaaaattcctttcttttttttgttctcttcttcttcttgacagtgaagagacaactttagaagaaggcatctgagggtagtttcgtcattccgtctagttaatgacgaaatataaccaataggcttcttcgaaactggcatggtgacgtatatcttctgatgatattaccgttataccctcttttataaacgaaattggcccaatgggtctgttcggcccagtagtcatccgttttagtctataacgtggcacgatgtaattggttaaagattagaagaccgccggactaagatttaaccagcggtgacttcgacacttattagccggtatatttcttcgccggagcttcctcaacgatt

SEQ ID NO: 13541 - DNA, 3000 bp, Unknown; identical to SEQ ID NO: 13536
  misc_feature (1)..( 3000): cDNA_ID_2703272_gDNA_ID_2214635_Annot_ID_188088 3000 nt of promoter + ATG

SEQ ID NO: 13542 - DNA, 3000 bp, Unknown
  misc_feature (1)..( 3000): cDNA_ID_3030645_gDNA_ID_2214635_Annot_ID_188083 3000 nt of promoter + ATG
acgggcgtaattgaggacgtaagataggccattgcatcctttggcttcaacagcaaggcggaggaaaggtttttgctgatgctgcagaagttggcgaatcctcgcagccgccgtgtcactcaatgctaatacttgctttctcatcgccgaccaaatattcgaggatttcaaatttgtgctaaagatttttcagagaggaagaagacgtccaagcaaatttgttacaagttgatatttaaagagccattgtactttaatatataatttagtgaacaagtcttaagaactgtttaggcctgtaaagcccgaaagaattagtattagtaatatataaagtttgtattgaatatgggatgatgaaacgatctagcttccagaaaaagtcttaattacacaacataataataactaccaaacgtgtcaacgctcccgtattcgtccactaacattctcccatgaaccctaagttataagtcctccaaggctacgatcacatttacaagcggaaaattgttgtgtttgatttgtttcttgttttattctcactctaagcctctggttatatagcattttttggcggaaaagctaatcgcaaaacatgagattataattatgcgacatgtcaaattgttatgaaaacattttatataataagaaatttatttggtatagtatcatatgaaacaaagagtcaatacaatatcaatgtcattatatgtgctcattatgttaagttgagtcaaggcactttactaagaacacttcaataattatatttaactatttctgtgtattcatacgtatgatacaaggtttggtgttctatatactttatcctcatcccttgaattttagttgggccaaaataatgacattaaaattataatatgttgctatataaaaaattgttacaatttggatgcaacatagagagatcattagcgagacattgggtggatcgtgcaattcatttctgttttgtcaactagcaattcaaattatggcgacattatatacattaatccatattacacaaaaactaataaactatatatgtcttggattcaaatagaagaaataaaagtcaacgagtttgccctataaatgattctatgctttcaaatagttagctacaagctcatcaatctctgctctattaaaaaaagaagaagaagcaaacacaaaacaacaacaaagaaatatggcaaagctcatagttaacttctctgctctcttgatgatcatcttgttggtttctaatggtaattttaagattttcttaacttcctttgtcctatattaatatcgatatggatgtgaaaagattaatgtgagaatggttaaaacaggactcccaaaggcggtagcccaaacatgctttaaaggtgaagctcaagagggtgtgtgtgttaaagttgacggctcaaaattgtgtgaccttctttgcagggcaaccaacacaacttggtttggggcatgtgaagtggaagacaacgagacgcactgtcactgctacggaccttgttaagtatctcatccggacgcaaaaccaaatatgaaacgtgaataattgtgtatcagtacctaaataatgtgtgcattgcttatgatcaatgtcacatatctacatgtgtgttccatgtttgtgtgtttttattttatcgctttcaataaatttgcatcagcaccgtaaatgtagctgatgcgataaatgaatgtaagattaaatctgtttattatgtttgcttttggtgttccattatctctcctatatatatgtcctcttctttttcttcattcttgtcattaatctatatgtatgtgctattttttgttgaacaaaggctaatgagtcttatctataacaccaaatcaactcctaatagtaatagaactcttaacctaaactcaaaagaagtaaagtacaaggaaaactctaatcaaaagttcaaaaccatattcctaaaccatgaaacataaaggaatatcacaacctcgaaactcttttgccgtaacgactagagttgctttttgtttttagttaattcaaatgatgacattattgttccaactatgtaatgtagccaccacatttttcttgtaattttttttgtttccttcataaaattcatttagcaaatttacacaaaaaattcaatgaaagtacatgaaatgaaatttaaagtacaatcatttcccatagttttttttcttaccaacaccaacataacagtgataaattggaacaaaattttaccaaaataaaaataaaaattttatgaacaaaagcattttttatatattttttaattattgggggtttaatgaatttgagatatttactagtcagaaaacaccaaaaccctccgtttcgtgggtttcctccagaccttgagctccttgttcaattcacactttttctctcccaactcttcttccaggtttcctctgctactctcaggtttctcttctccacttccctccagctttatccttttgatttcgtcctccatcttactgtatttacccaaaaatctaagcttttctcagtgttcttccatttctctactttgttttcatgtaatgctgcaaacttcgcaatacccatcttcaatttcttcaattcgtaatgggaaaaagcattttagtttaatttgggttttgtggttcctcacttgtttcattcttctaagtcttaaaccatccactgattctcaatttctgaggatttgatatctattgctggttaacaatggagcatagatgcgactgggttttgtttatgttaactttatgaatgtaaatcacactgctttgtggctactttgtggatttcgtgttttactttgtggctgaatcatataactctaaattgagagctttgggtttgaccatttagctttttatgaacaggtcttgttagggaagtaatcagtggaattggatttagtcttttggttctgaattttgtaaagtcctgcagtgattggtctcattatg

SEQ ID NO: 13543 - DNA, 532 bp, Unknown; identical to SEQ ID NO: 13533
  misc_feature (1)..( 532): cDNA_ID_2685649_gDNA_ID_2214635_Annot_ID_188075 3000 nt of promoter + ATG

SEQ ID NO: 13544 - DNA, 3000 bp, Unknown
  misc_feature (1)..( 3000): cDNA_ID_2703292_gDNA_ID_2214635_Annot_ID_136120 3000 nt of promoter + ATG
aaaaactcggtgaccatattcaaaactttcccacgttaattctctcttctttgttttgtttcagattcattacttttctccaaaaaactttcttcaagatctgttcttttaaataattatggcggaagaacatcgatgcgagacgcctgaaggtcaccgtctctgcgttaacaactgcggtttcttcggaagctcagcgacaatgaatctatgttcaaactgttacggcgatctctgtctcaaacaacaacaacaagcttccatgaaatcaaccgtcgaatcatctctctctccggtgatcgcacctgttctcgaaaactacgcggcggagttagagatcccgacgacgaagaagacagaggagaaaaaaccgattcaaattccgacggagcaaccgtctccgccgcaacggccgaatcgatgcaccgtatgtaggaaacgggtcgggttaaccgggtttatgtgtcggtgtgggacgactttttgtgggagtcataggtatccggaggttcatggttgtacgtttgatttcaaatcggcgggacgtgaagagatcgcgaaagctaatccgttggttattgcggcgaagcttcagaaaatatgaatcggagccgttgaccgatttctatctttaccctgagaaaatttcgattgtctcggtggatctcagccgttcattatgttattgtattacggacacgtgtcgcaagattaaggttgagatggtttcgtaactttttaattattttctttgtttatttccgaagaaattaaagtttttatgattgtgtggcttttgcttgtaaaaaaaaaaagggtttctctttgggaaaaagaaaagaaaatatatgaaattgtgtctcgcgttttggataatgttttataccgacagaaacagtacaaagacgttttgatcatttcaaaacgttagatcattgaagaaaatgaagctcatgtccttattgacgtttgtttgctgattttaattcttagatttgtgaggaaaatggaatataagttttaggtcagttgatttagacttttatctgaatcagtttacctaatcatctctaaagcatttagctaaggttgtttgttcttaatgctttatggtcaaatgtttgtaagctttttaggcataatataaggccggattcattttggtaaagacgaggatacaatagcttcgaatgtgtggccatgtttcgctaagcgatcatcaacttgatttgtcttttggtatgtgaaagaaaaggaggttccatcaaacatctttcagctcacttgaaaattatttgaaatgtctttcatacatttatgatctatcaatgaatacaaatgaactactatttttctcttcaaataattattctctttctgttgacattatgaaatttagaagttttcacaataatcaaaagtaatataaaacgtcgaaaatatatttatctttatatgaccacttgatgatgaagactcaaaccaacaaaaaactagtgtttgttttatttccgtggtcaaatgtaataatatatttctgtgtgtattaggtgatatttagaatttttgtataatttccaaaacaagaaaatacttcaaataaatttcatattaatcttatcaaaacatatctttcatattttatatgaccattattggatgaagaagagtcaaaccaaatatgaactagagtagtagagttcaatttttttttttgacaacaatgttttctttttctggtcaaataaataaaccttttttgttcatattaaggtgaaagaaaattagaaattatgaacaaatgttttaaaaataatataaatatctagatcatattgcatatatttcatttaccaatgttaaagatttgtgtatatatagaaaagaaatcttcaacaaaattaaactgctaagaaattattaaaaaaatgtaaaagaaggaaaaatatctaaaacatgaagccagagaaacgaaataggagtattaattaattaaagaaacaaactcaattaattaattcaatggaaaccgctaaattattaaccgttcgccataattaaaatttaagagacacacaccttaaacctcacctatatattttccatgcaaaaaaaaaaaagacaacaatttcaaccatcatgaacattactaaactcactccttggtttcttttctcgtgtctgattcttctatcaggtattattagtctataactttcattttcttcttcttgatctgtttaatgtatgtatcgtatatcaaattacagcaattaatttgtattaaatcagtttcatcgattaatttctttttccttttgatatacgtgctagactacataaaggtaaacagctcaatttctccatctagcgagcaaacacaagaagatggcttttttggtttcaaacctacaaagttgtttgtgttcggagactcgtatgcagacactggaaacacacctttcctgatcgttccctcgtggaggtttcccaatggaatcactttcccgggaatacctaccgggcggtttagtgatggtcgtgtttccactgattatctcggtacgtttgaactataatgttttgtttggtaatctgtcacaatatctgagtctgtaagatttataatattgtaaacagattgcaaagctcagtgaaaaactcttagattagatatgtcttagctgtacatttgcattgcatctcttatataatgaaacgcaagtcaataaattttgttcattataatttgttttaaatgttgaccatataagtatttagtttaacgttttcactctctcaaaatgcaagatatctctagtttaacgtaaatcggttgccaacagtaattataccctatatatagaaaacatatattatgcaataaatcttatagtttgacttatattgtaacatgtagcgaagtatattggagttagaacgccgatcacatacaaatgggggaaatacggacgaccgagactagctgtgaaaagagga

SEQ ID NO: 13545 - DNA, 3000 bp, Unknown; identical to SEQ ID NO: 13538
  misc_feature (1)..( 3000): cDNA_ID_2703300_gDNA_ID_2214635_Annot_ID_136122 3000 nt of promoter + ATG

SEQ ID NO: 13546 - DNA, 303 bp, Unknown
  misc_feature (1)..( 303): cDNA_ID_2703304_gDNA_ID_2214635_Annot_ID_136123 3000 nt of promoter + ATG
tcaactaaaccggtattaatagcactagctcaagtctagttctttcgatctgcaaaattgactctgcgggaagaacaagtctacttgaagcgaaaccaaacggtggtgatccgtgagatttcgtcatcatcggcttaaaatgcatcactgggttcaagcttcttcttccgatttcagtggaactcctccgcaagctcggaggtataattctattgtccttagctctcgatttttgaattcagctgatttttttggtgtttgtgtatcagtggacatacagctgtcaatgtcggaaaatccatg

SEQ ID NO: 13547 - DNA, 3000 bp, Unknown
  misc_feature (1)..( 3000): cDNA_ID_2703319_gDNA_ID_2214636_Annot_ID_136124 3000 nt of promoter + ATG
ccaaaaaaaaaaacccactattttggtttaatagacaaaatttagtctctgttgtttaattttgtttgatggaagtttatattggtccaaaatgagattcagttcaaattaaataaataaattatctatttaaccaaacttatttaaaagaatttatatgctctcaatctttttgtttgtaaagatttaaaagttaaaattttaaacaaataacaaaatggagcaacgacgaatctatcaacgtacgtacgttctcagacattacattgtacaattatttcgacaaaaaaaaaagcctcattgattatcatttatatattatatcatagagattcgtgccccttatctcgttttttttgcaagactaaacaagtaacaaattgcctagctgcctaaagaagtgaagataatactctttctaaaatcacaatattctcatagtaaaaaaaaacatatttatcatcatatcgtccaaatatttcagttttgttgtttgtttaacaatacaaattaacaatgatttaatttggagcacttgaatataatagtacaccgaccacaaccccacacaattcacaaacttgagaaagagagagaatatgcccaaactcaccaaacctaatcattttcataattaacgaaaaaaatagtttcggtaagatgatgatgtcttagttaacttttgcttactacttttttaatcattaaacaaaaaaaaatattaaaaatcgttttcacttgttcaatacatatttttaagttttatttataaggaaaaaaacttaatagcttattgcaccaaaactaatatggtccttatggatcagtttcatgtttttagttttttatgtaatgaaaatttgaattattttctaaaaatatgtgtacgatatggttcgatttaaatagaaaccatggttcaaaacgtcagattagtaacgttcataaaactgaacgacttaattatgtccacgtatacggttggtttctttcaacgtttttagatagttaatgctttgaaatcttagttagttatacaaaggtaaggtaaacggtccaaaaatgattgttctcaatcaagttttaaataagaaggagaaaaagtcaacaaggaaatgcaccaatcaataaagtgtcaccaaatatatgaggaattccgatgattagctagcgttttgaaaatacttcggctactagctatgtttttgagaagtacgtacatgtggttggtaaaagaatactggaacattgtcactagaacgttcgtgattgtacgcagtattcatgccagttgatgttgtgcaccatcaatgttcattatgtgaaccacccaaaaaggcaaaaacaatggatcatccacctaacaatccaccccaatctaggtagttctaaaatcacacgacttacatcaaaggaaaagtttcacatgtttatcaatcacaggtcacagtatgtttgaaagagatgatagaaaaaagatatcaaatttgtcccgtgttgataggaaagttggtttggtatcgtattataattttctctacacacacacgactcatgtttcatgtgttaaaaaaaaaaagcaatcgttttaatcccttccaatttatataaatctgcgggctctgtttttatataaagaaaattggatcagttgtatgaacttcgaactgtgcaaaaaacttcaaaatggttcaactattttgtcaaggcttgtaaaataaataaaaattagcacactgttaaaatttgtagtattatatttaaaaaaaaaaaagatcaaattaaacaaaagaaaaacgaaattatcacgtcttttatttattattattttaaataaataatatgacattttaaattttgtttggaaattaatcactttctggcagtacctctcagccgaattgtaaacctaaaccgcccaaaagggacagattgcatcgtggtggtaggacattcataaattattatttttccttaagtggagggccgtcacacaatactttttgcccaatagataattggcccacaaaataaaatgctaaaataaatatataatctttctgtatgattgtgaaaaaatgtgagattgtctcgaatgttaaaatttggtgccacaaacaatataaatatataatcacagaaaaattggtgccacaaacaagataacatcttataattttctcgtatacttggagagcgagttgaaagaattgcgattagaataaagcgtagtgatttggcattgaatatcatttatgctacataattctacttagcgataatataaaaaaatatcataacttatggttagcatgtaatgtcactatacgaatatcaaattcataaaactagccgtgacttatctacacagaattatttatgtttcgagaataaagacccaagagaaaacaacgacattataacaaaaaaacaacgacagattataagtaaggaagaaacaaatgactatagattagatatgaaatatttttagtaaccatctttagttataatttttgttttggagcttgctccgtatactcagttgagtatttttaccacacatatatcaagactaaattctaccactaatcaagtaaaaacctcttagcaaaatagttggagaaaaacaagaataaaatcgtattattttcctctagaactatcgatcattcgagagagagaatatgaaaaagggacaaaagctctatacatgtacaaacatgacaagtcattatccgccacgtagattggtcggttccgcttcgctggaattatagcgatgtacttgtttagcctgttttcaaaattatttaaatctctaaccgctccaatcaaataatttctccaccaaatattaataatatatcatccggtaaccggtcaccaaaatggcgccacctcagatataagtaagagcacatagtagaccagaaaaaatcatcaaatccatctcccactcttctagcatcttgaagcttaaatctcagccgtccgatc

SEQ ID NO: 13548 - DNA, 3000 bp, Unknown
  misc_feature (1)..( 3000): cDNA_ID_2713840_gDNA_ID_2214636_Annot_ID_136126 3000 nt of promoter + ATG
ttattttatgtgaaatggtatgtttacttgttctgaatcgaaggggtttacttgtttttgcagcaaaaacttgccaagagagatggtgcttcaatagaccgcgatcgtgatattgaacgactatgggaattttacaaactttataaaagacggcatagagtggatgatattcagaaggaagagcaaaagtggagggaatcaggaacaactttttcttctaacgtgggggagtatgtgcatctttaatccttgtggtttcctgtttttttaggacagtatttggattctatccctagaaaatggctgaaattctctaaatctgaaacatgcgtcctgaattgtgttgatgcttgttctttcattcggcagtgattttctgggtgtagattaatttgtttggtatggacgtttttataaattatcttgatagcttctgttcacttatacagatgggattctgtagtggagatggtttctgagatgtactgttgtcttcttctttttgtaaaccataaataattaatccttgttttttccccctccttttcataggatcttgaagatgaggaaggtgtttgccacattgagggccctaattgaagtgttagaggtgctaagcagagatgctgatccaaatggtgttgggaggtctatcagggacgaggtacttttttcccttacctgttgtgtttcgaaagctatttaatctgcttctcgcttcctgttctgatgatgccaagcgttcaaaaagtcatatctaataactctgatgagaagatcttggttcagaagttgcatctgcatgagttgataataaatgtttcctaagatcattaaatcaatcattcaagttgtcacgttatacacttatcttgtaactcatatttttgtttatgttttcagcttgggcggattaaaaaagctgatgcaactttgtctgcggaactaactccttacaatattgtccctctagaagcgcagtccatgaccaatgcaattggggttttccctgaagtaagtcaaacaagaatgaaaactttgattttcattttgtattagtagttttagcttttcaagtttttcccactcagaaaaggctctattgtctttatttaggtacgtggtgcagtccaagctatcagatacactgaacatttccctaggcttcccgttgattttgagatttccggacaacgtgatgcagatatgtttgatttattggagtatatctttgggtttcaggtatagtgataactatttgatcaaattcttccctgattgtttattattcttgttgcttactcttttttttttgtcttgagcattgtctcagagagacaatgtaaggaaccaacgggagcatttggttctcacactttcaaatgcacagtcccagcttagtatacctgggcagaatgacccagtgagtttttccttctgatagtattatttttttgtggcatactcctttactgatggacagttatgattgtcctgttggttaagaggttgtcctcttaaaatcttgacctcttaatctttttatgtagaaaattgatgagaatgcagtcaatgaggttttcttaaaggttttggacaactacatcaagtggtgcaaatacttgaggatacgcgttgtgtacaacaagtaatttttgaatctagctctgatatggaaatacaggctttcttcatgtgcatttattgacgttgaagttttctattaggttagaagccattgaccgggacaggaagctgtttcttgtttctttgtacttcctaatctggggtgaagctgctaatgtccgctttcttccagagtgtatctgctatatatttcacaacgtaagataccatattgttgttgattatacaccaattttccgctatcagtatactcatgttttgtttattagtttgctaagtgattgttttgtttcgtattctttactgtggaaaaatctaaatgtctaggttttacagattttgttgttagtgttgttttgctgttcatatatattgtcctcctgtaaaccacacacatctaagccaagaatagacttgtcagaattgctgtagcatctgatcgtctctgcatcgtggcactttgcttctgttaaacaaccagcctgacatagtttaatttagcaaattctgaaatgatgaaaaatgaaggcctatgtgatcttgagttttacaccctatgcgaagtgaaaatatatctcttctcacacagttgccttttgtttgttagatggccaaggaattggatgcaaaattggatcatggagaagctgttcgtgctgacagttgcttaactggaacggataccggttctgtatcatttcttgagcgaattatctgccctatatatgaaacaatctcagcggtgagttccgctattacaatgattttgtgcatcttaattttctattatggaaattagatttcaacagtttaatgctaggcaaaaatgatagttttaagagtgatttctttcactaaccagagcttttgggtatatagagtatctaaacccttgttatgattttttgtgttaaacccatattacttaaattagtagcagttgtctgggaagtatcattattttaagttaatttgagtacaacgttaaagatcttctaatcattttcttgacatagtatttaggtggttctggcctatatttgaagtacatccctacttcgtatttgagatcagatcttattctatgtttctgaggaattttagcatgttttaatgtggatttgacgcgtcttacattaatgtttttggtatatggttgcgtgagcccttaagttggttttgaaattgatactcatgtaggaaactgttcgaaacaatggtgggaaagctgcacattctgaatggcggaattatgatgacttcaatgaatacttttggtttgtagtttgcttatactattacatttgctagtataaactcatttcaaggagtttccattaactgtttgttatg

SEQ ID NO: 13549 - DNA, 3000 bp, Unknown
  misc_feature (1)..( 3000): cDNA_ID_3030767_gDNA_ID_2214636_Annot_ID_136131 3000 nt of promoter + ATG
attatgttaacatcagtgacttttgtgtaagtgaagataaaagtatgcatcaaagtcagaggacatgtgttgatctcgtggataaatagactgatttccttgaaattacgacaccattattacaagacaccaaatataacttctatttacaaagtcaggtttttcgttgtgctctattcaacgggacaaggtcatggaaggtgtagtagctaagttaaccctaatgtcaggatcgtagtagcttctctgcagtctgcgaatattgtctccattcactgtttaggaaaaaccaagtgggccaatgactgtagtaactttttaaaacaaaggatttttaaccaaatccatttcgtttagttggacaaaatgattaattaggataataaaaagtagggtaggttttgttttcaacaaacgggcaaaatcaccgacgtgactttcggttaacaaacagattcgattcttgaaattagtttaggtgaaaataattcagaaataaattttcttctacgcatgagtaaaaaaaatatatattacatttccaaaataaacgtttttagtccaaaaaaaaaaatgtcagagtgatagaaaacaggaaagatgactatgaaaatccaccttcattgttagtgttacatggttatttcaagggttttgatcaacgacataatccattgtttttaggctttttcaggtgaaaccatagttaaaagttttttttttcactattatgatgagagtggagttctttttttgcatacgtattacacataattaaaaagattatatgacaatattgttaagccgttataatcaatcagctactatatgccctttattttgctaattatctcaaaaaaaatcatagagaagttgcactcgtcattgtactcttgacatttactaattaaaagatttcttctgcataagaaaatgaggagacaatttaaatttggatctctagaggcgtgattaaagcagttctttcccacaaaagatggctttcattatattatactactatttaatttccgtaccacagtgtcttactctgactctgattttatttctttttaattaaataatcacataaataattcactatcacgactttcgtttttccatttaaattaaactaaaccggttagattcgtttttcttcaccaggttaatgtgaaccccaatttttctattttgttaatgatgttttataattgtgattaatacaattagaaaatatctaataattaaagttgagaccataattaaaggaaagggaactattgtgtgaacatatatatattcttacacactcgcagagcaacccttcttcacttgggctcattggaatgtgatatcccaaaaagaaaaggcaaaacaaactactactaaaaaagttgagatagtaaaaatacaattgtactttatcatataataattcaatgtacaacaaaactcaactaccaaagtttgcttattactctcaaagaaaaaaacactgattaaaaatagcaaaagagatttgtttatctatatgaaaaataaacttatatagaaattcttatatgattagttgcaattgtaggtgtaacatttaatcgttgatttgtttttttttttggggtgcatttctcttgtagttgtaacaatatttcacacttaagactttcagacaatagtttaaaaacaaccgaacagaagttgcaggtacctataacttgtgtatgaatccatccacagttttgtaaacgttgactgtttgacattttgaatgtaattttatttaattagatcctacacaacaataatcacatctataatttgccaatacattttaataaaaccacttaacaaaatggttttaacttttaatccagtaattttctgtagttggtgtcatgatttataactactgtacacatttccaagatctaacgaacaatcataatcgataataattgtacctaccaaatttggtctaaaaaaatagaagaagtgattatatatatattcttttttgtttttgatgctaaatattttttttttaatgtgattatcgtttatcattgcacctcacggtaattattattgtttttccctgattttataaaaaagatatatagagagattattgagaccaatgaagagcagaaactgttgggagtcaaaaaaaacttatctccaatttctaacagtgttctatgtcggattccatcaatctctctctcttccatcatctgtcactttctttgttttctacgcaacaagaaaccgaagaaaaaaaaataacaatttactaaagtattaattcctttttttgtgtgacaaaataaaaacccactaaaaagcaaacgattccaagaacatggaaacaaatgtgtaaaaaggaaataaaaacatcaagcgtgggctgaaaatcactacacgaaaatccaaattttggtaattctattaaattttttaagttggtaataaagagaataaatacacaaattgactggccagtacacaagttgactgattaatcgcaaattatacataattaataattaaaaaacggtaaaaaacgttaataaataaggaaataaatcaaaacaaatgaagagtgggattagtaaagtattaaagaaagcatatagagcggaagaaaactgaagatggaagattataaaaataagtgttgtgaagaagaagctattcgatttttatagtcttgagttttattttattttaataagaaaacaaaataagatttttaaaaaatagtatattatttatttattaattttcttcagggctgttgtggtttttgaggttctctataaagcaaagtaagaaaacatctacacaaatgtcccaacaatctgatcagaaaaaagtagacgaagaagaagaaattaagtcacttgaacaatggcgttggtccgaaatgcaaggccttgagcttctccctcataacaccaacaacaactcacgaagctccagagaaactcaccggaa

SEQ ID NO: 13550 - DNA, 3000 bp, Unknown
  misc_feature (1)..( 3000): cDNA_ID_2994275_gDNA_ID_2214636_Annot_ID_136135 3000 nt of promoter + ATG
ccactaaacttgatttcaaaacgtttctatagcccatctttttcatgttgtcttaattatcagatagattttactctttagactcctaagaccaagttactgtatatcattttgattatcttattttctttcactttctaactgtagtttacttttaggttccattccgtaaacattgctatcgttttgtgatgaacacaaatttcttttaatttgttctttcctcattatttcctagcaaaatgaatggaaattatatttcataaaatgaatctttaatagtttaatccatgttacagccattttcacctttacatgagagacaaatatgtacggcgaactttctagcaacaaaaaactgacatgcatgaagatggtttttttttttttttttttttgccagtcgcatgaagatggtttataaccatattgaatggtcatttttgtaagctacaacgagaggcgagcaatgagacttgccaaaaaaatatgaggaaaaatggtgacttgcatgtgtacttaaaatggcaccatatggatggatgaaactacttaaagggttgaaacgagacgattttctgttgccatatttttcttgattttgtgtggctgtgtataccataatctctaattgcaacctgaaattaaaatggtctatttatgttgcaattagtgattatgttttatattaaccttggtaaagttagttaaaattatccaagtcagcctgacgtgttacactgtggaacacgaaaacaaatctttgtagtttgtatgtgttgaaatcgtatttagctacatataataagtgaccatttctaccctaaacttccaaattactgaacaaaacgtttcaaaagatccaaacatcgattttcaaaatacaaacacaaacttacgtacgttgaagtttgtggtcattgtgatcgttaactttacgaaagattttagataatagacaagaaagttctcaatcaaactctatatttcatgtgtatataataatatgtgtccacctcatgtattacgtcactcataggaccatatgaccaaaaaaaatcaacaaaacacaatgaaacatgatgttgacaaaatggaccggtgaaaggaggaacgaaacgcaattacgcaacccttgggacattttttttttttaacttttcttatccttttactgtttatgcagttgaaagattttcagataaaattcaattttcacacagcgaacccaatatgttagcattcaaagaaaagtaaaaactcagtgagttaatattgcaattcctcttgtctctatctctataccgcagcccatgttttttgtagataggcggttcttggctgtttccatgaagctgaaactaacaaaaccaaagtaatcatttaattaaaatcactaattgtgctctttaggagagcaaaattcttttgatttatgcaagaatttaaaaaataattatataagctattggtgctgaacgaattatgtaaagtagtgtatgccagtaggtgatagtgatacgaatagtgtattacaacgaaacgtgaaattacattcttgatactcgaaaacatatacaattttttaaaaaattgttcagatatatgatacacatttttgttgatgttaatttagtaatatatgtacattacacacacatgtctcgaattcttctatgtactagtatcaaatatattaatcggtcaaactacttgacagattaaaaccatgtgcgacttctcgtatagcttgtattttaaagttttgatctgatcttaatatgcgtttattggatcatataatataacatgtggtattttaatatcataaattttggtttcttttcctaaaaatacaacaaaatatctaaaactttttgggaaatctgttagaagatttttttttgaatcaattgtagtaaatcacttcttaaaatgaattttttaaataatataaaacataaaagagaagagaagaggaggttccatcaacttcacttacaatgagaaaagactatgcaatttgcacaatcatgactttaaccaatacacatttatcagaagaaaaagaatctatctttatctttaatctctttacaaattcttttttattgataaaatttcaaaaatgatgtgattcaaaaatacaaaaatgatttgattaaaacatcacttttcttcctatatgaacttgtaataataaacgaattaccggacttcataaaatgatttgatttcgtatttaaggccatgaaatcttctaactaaagtttgtttctgataaggtataggatgtatattctttgaattgtgacaattggtcgaatgtatttttaccttaaactgatataagattctgctaatctagactcaagtcatcaagtagtcaaagctgagaaatgatgctctttttgttttcaaaagcaatgttacctttaagaaatcattaaacttgatcaactatttgcgtcacaaacaatttttgtttttaatattatccacggatgattaaagtaatgttgttcagaaacttggtgccttcgtgtctcgtaccatcacttgtgtcaaaccggcgtcaaacgcccactctcgctgacctcagcccccaacaaatacacacatacggaaatgaacatgtaatatcaaaccatataatattcagtaaaaaatcagtatcgataatatagtaaaataataaccttcacgcattccttcttcttctataaatacacacatttgcctccacttactctcgttcaaacaattcttcgtcctattaaatacaaaaaataaaaatccttaaaaatatatccttatcttcaaccaagaatgggagaggtccaagaaggtcccaaagttgaacaagagaagaagccggctgccaccgtagtcccagttgagactactgacggcaagccaaagagcggcggaggagattccgcggcagcagcagcaccaccggtcgccgcggttgtctctgcctttgtttacaaagtggat

SEQ ID NO: 13551 - DNA, 3000 bp, Unknown
  misc_feature (1)..( 3000): cDNA_ID_2713830_gDNA_ID_2214636_Annot_ID_136136 3000 nt of promoter + ATG
tgaaaagggtttggatttggaatctgctggtttgacttatatatacgtgagagatgatgcatcttcatcaatcaatcataatggttggagacagtccgatcctgacctttttcattttttccataccatgtacagtatattatacaagtttgacttaggtgatgacaaaataattatattatcatttattattaactgataaacttcatattttgaacgtagtaacgattgatcttgacatcttgaaagtctaaaacagttgtaagaaaaacatagcttcagttttcaaaacctagagctagagtcaattaccccaaggttagaagatcatacacagaatttttttgaaatgttatccgaactcaatatgattatatcaagtgtaaaaactttatcatcgaggaaacatattaaaaagcatgtccttgactatagaaatgattaggttggtccacatttagaagatgtttgacctggcttcagccattccattttcaactacttgcatattcttgcaaatatacaaagcgttggtgtccgggtcagatacgagctaatatgaagatgatcaagtgcttggttacacaaaaccaccatgtcaaagattttatgcgaaaacctaaaacacgagcatgcatgtagctcgattgttcaaccagagaaatcaaactcggagctataccgaaattatgttctgattggactaatcgacttatagacgcatgttttcatatctaagtttttgatggcctttttagtccatataagtttttttaaaatgcagcatactaatatttgaattcagactctattttgatctagacctactaggaaaactcaaacaaattgagtttagtgatatattgagaggtaaaatactaaaatggtctaactaatacaacttacatgtttagtagaacttaaattatgctttatttacaagactaaaagagtagttaaacttgaaatcttaaactgtcgccgtagaaataacaattgggtcaagaaaagttttctaatccttatcaaaatagaaaagttttctaatataatagaaaaaacacccgtaagtgggaaaacatcttctacaaacttaataagaaaaggatatacatatctccaatccacatgcgaatagttttgggtcaaatctctacgcttcgcgtaacaaattgaatttgtcaaacaatttgagcatgacatgatgaaaaaaggccagagtcatgttaattcgtcgtatcgtaactccgacttctgactttctccattctttttaacgaaacgataagtcaacttttaaccgaaaaggactacaagtcaatttattcattaatgctctacgtgcataggttatacttattggttaccctatagaagttgaaccgtgagatcaaaaatcatgttagataaaccggctccgttctttgtgacgttgacatatatttttcttaggccagagactatagctagataaataactccattcttggctgctcgtaggatacgaacccaaaacttggtcatattttatctcaaaaataagatcccaaaaaatatcgactattagagctatcgataccatacgtgtttcaaagatgtaaatttgaacccctctaccttgaaagcgtgtataaggcttattttctgaaaaaaagtgttagctcatctaacatatacaaagattaaagattggatcgttgacagaagaaaagatttacaaaaatttggatcttgtgaattagttactattgggctaaataaaagcccatgtatgtatttattggaccagacctaatttttgtaccagggcctgaggactatatccaacacaaaccacaatttcaaatattattttggcgttttaacttctaaacgctttatctttatcatgcgacttgccagatgccaacccaagccacgtgcattacgattcaactaattttttgttgtctttttttcccctttttaacgaggcaaaatagtagaaatatttttctattttcatgaaattgtagaagaaaatagtaaaatttccgaattttcctaatctatagtttcactttagataaaataatacttagcgtgacgaaggcaactggcttattcaactttatgtgtttaataaaagataaaataaataataatttcgtatatatttctctcctttgttcataaaataattaaaatatttttgattgattctttcgaaaagtaaaaaaactcatttaattacaagaatataatatatgttaacccaccatgacaaacatatattttgacatcttagataacaagtaactaaattaattacattcctttttattttattttctttttaattttatgtgaatgtaaaaaacaagaaaaaaaataaaatttatttttctctctcgcttggttcaaccgtggttgttcatcggaaaaatatcttcggcttcaatttcgttcgatttaccctaaattctcgactagtgttcgtcaatcccacttccaattccacatttcaaaccttttcaggtaatatttctcatatttttcgtgttttttttcggggtcaaacttatttttttaaaaatttcaattcaaatttcgagtttgtatttagtaaccctagttcttaatttttcaatttttcgtcttcccttatgagatttagcttaattagggtattgaattaagtagaattgggtttttgtttttgttgtgatctggtgaaattaattttagggttttattgaaggtgaaatttgtttgttcttcgttatatcttcgaaattagggtttttcaaatttgtgtcgtggatgtaaaaattatgaattgcctgtaaaatttttctgtcggttgctaaatttcttgtgattttagttgatgatcgctatgtagagtttcgccttttttttgggattttgaatgttcatggtttaggattcattgctctgatttgtaggaagttgaaatcaaaagcatgaatgcttaaacagtttacgcattattgcgaa

SEQ ID NO: 13552 - DNA, 792 bp, Unknown
  misc_feature (1)..( 792): cDNA_ID_2990712_gDNA_ID_2214636_Annot_ID_188141 3000 nt of promoter + ATG
caagattggggtttaagagagttacaggatttgttttaatgagatgggcagtgagagatgctttgacacagcttcttggtttatggtacttcggagaggttgaagatcagtactcgtttttcaggctctttgtgaggttaaagctgatgcctttcactgttatgccgccatggattagaggttttgagaaggagatatctggtttcttgttcgcttggtttctacttgatacacttgttggtttgatattagctgttgatgcgtttgttgctattgtggattcgagaaggagaggaagggagatagtgaaggaaggtttatatttgatatctcttttgttgcatcaggctgtgcagctgaagtgtcttgaagcgattctttgtgggtctttcttcagatgggttctgattcgaatggtagggaaaagctttgcttctgtgatccaatctgcgttggaagtttacttcatggcggcttggttagtgttctacttagcagctaagtgtaaagatgcacacgcagatggtaggaggtttgggagaagagaaatggagagcttgatcgatgggctgagatgataatgaattgtggatctgtaggatgagctttttgtttccaaaggagcaaaccttggcttcgatgcttaatgccagtggcgacatctctgtgctactagttgtcatgacttaggttcctttggttttagaattacagttgattgataagaattgctagcaattcgatgtatgtacgcacctaggattacttgggagctgtgaaagagggagaatg

SEQ ID NO: 13553 - DNA, 3000 bp, Unknown; identical to SEQ ID NO: 13551
  misc_feature (1)..( 3000): cDNA_ID_3030759_gDNA_ID_2214636_Annot_ID_188132 3000 nt of promoter + ATG

SEQ ID NO: 13554 - DNA, 3000 bp, Unknown
  misc_feature (1)..( 3000): cDNA_ID_2994275_gDNA_ID_2214636_Annot_ID_188131 3000 nt of promoter + ATG
actaaggtgctcctgccgaggaatacaataattgtaacaatgatagtgaaacagaccggtaccaaatccaaacttttcatattatttattagtgtaataatgttgcatggagatccatttagatgtttaaaattgagttcttgatgagttggttctactttgtctctgcccccactaaacttgatttcaaaacgtttctatagcccatctttttcatgttgtcttaattatcagatagattttactctttagactcctaagaccaagttactgtatatcattttgattatcttattttctttcactttctaactgtagtttacttttaggttccattccgtaaacattgctatcgttttgtgatgaacacaaatttcttttaatttgttctttcctcattatttcctagcaaaatgaatggaaattatatttcataaaatgaatctttaatagtttaatccatgttacagccattttcacctttacatgagagacaaatatgtacggcgaactttctagcaacaaaaaactgacatgcatgaagatggtttttttttttttttttttttgccagtcgcatgaagatggtttataaccatattgaatggtcatttttgtaagctacaacgagaggcgagcaatgagacttgccaaaaaaatatgaggaaaaatggtgacttgcatgtgtacttaaaatggcaccatatggatggatgaaactacttaaagggttgaaacgagacgattttctgttgccatatttttcttgattttgtgtggctgtgtataccataatctctaattgcaacctgaaattaaaatggtctatttatgttgcaattagtgattatgttttatattaaccttggtaaagttagttaaaattatccaagtcagcctgacgtgttacactgtggaacacgaaaacaaatctttgtagtttgtatgtgttgaaatcgtatttagctacatataataagtgaccatttctaccctaaacttccaaattactgaacaaaacgtttcaaaagatccaaacatcgattttcaaaatacaaacacaaacttacgtacgttgaagtttgtggtcattgtgatcgttaactttacgaaagattttagataatagacaagaaagttctcaatcaaactctatatttcatgtgtatataataatatgtgtccacctcatgtattacgtcactcataggaccatatgaccaaaaaaaatcaacaaaacacaatgaaacatgatgttgacaaaatggaccggtgaaaggaggaacgaaacgcaattacgcaacccttgggacattttttttttttaacttttcttatccttttactgtttatgcagttgaaagattttcagataaaattcaattttcacacagcgaacccaatatgttagcattcaaagaaaagtaaaaactcagtgagttaatattgcaattcctcttgtctctatctctataccgcagcccatgttttttgtagataggcggttcttggctgtttccatgaagctgaaactaacaaaaccaaagtaatcatttaattaaaatcactaattgtgctctttaggagagcaaaattcttttgatttatgcaagaatttaaaaaataattatataagctattggtgctgaacgaattatgtaaagtagtgtatgccagtaggtgatagtgatacgaatagtgtattacaacgaaacgtgaaattacattcttgatactcgaaaacatatacaattttttaaaaaattgttcagatatatgatacacatttttgttgatgttaatttagtaatatatgtacattacacacacatgtctcgaattcttctatgtactagtatcaaatatattaatcggtcaaactacttgacagattaaaaccatgtgcgacttctcgtatagcttgtattttaaagttttgatctgatcttaatatgcgtttattggatcatataatataacatgtggtattttaatatcataaattttggtttcttttcctaaaaatacaacaaaatatctaaaactttttgggaaatctgttagaagatttttttttgaatcaattgtagtaaatcacttcttaaaatgaattttttaaataatataaaacataaaagagaagagaagaggaggttccatcaacttcacttacaatgagaaaagactatgcaatttgcacaatcatgactttaaccaatacacatttatcagaagaaaaagaatctatctttatctttaatctctttacaaattcttttttattgataaaatttcaaaaatgatgtgattcaaaaatacaaaaatgatttgattaaaacatcacttttcttcctatatgaacttgtaataataaacgaattaccggacttcataaaatgatttgatttcgtatttaaggccatgaaatcttctaactaaagtttgtttctgataaggtataggatgtatattctttgaattgtgacaattggtcgaatgtatttttaccttaaactgatataagattctgctaatctagactcaagtcatcaagtagtcaaagctgagaaatgatgctctttttgttttcaaaagcaatgttacctttaagaaatcattaaacttgatcaactatttgcgtcacaaacaatttttgtttttaatattatccacggatgattaaagtaatgttgttcagaaacttggtgccttcgtgtctcgtaccatcacttgtgtcaaaccggcgtcaaacgcccactctcgctgacctcagcccccaacaaatacacacatacggaaatgaacatgtaatatcaaaccatataatattcagtaaaaaatcagtatcgataatatagtaaaataataaccttcacgcattccttcttcttctataaatacacacatttgcctccacttactctcgttcaaacaattcttcgtcctattaaatacaaaaaataaaaatccttaaaaatatatccttatcttcaaccaaga

SEQ ID NO: 13555 - DNA, 3000 bp, Unknown; identical to SEQ ID NO: 13549
  misc_feature (1)..( 3000): cDNA_ID_3030767_gDNA_ID_2214636_Annot_ID_188125 3000 nt of promoter + ATG

SEQ ID NO: 13556 - DNA, 3000 bp, Unknown
  misc_feature (1)..( 3000): cDNA_ID_3030782_gDNA_ID_2214636_Annot_ID_188118 3000 nt of promoter + ATG
tcgtctgtgactgtgtctcataaacaaaactgtttgaaatgttgttcagttattccataccgtgatcacatttttttttggttacgtataaagtatcactaaagtggagtgtaaaatgttttgtccttagaaaatgataagcaaaaaaatgatgatgaagcgaaacatatatcacaaattatctgaaaaagggaaatgaaattcacatttaggaaaaacagtcgacatattttcaaatgcatttaaaaaaataaatgcaaggaccaaaatgacaagtcagagattgcaacctatacattgtaaaaatatgaaattcataatatgaattcgattcttttttcaagctaaaaagttttgattggtaataacagttaggatgatctagtctttacaacattcatacactattgttttaccaattctaaattaaggattgtatcaatgggattaaaggaattttgaagaatacacctaatatggattcaggtgagcctaggtaacgaaaatgatttatgctgtatattctatggtgatcctagtatctactgttactgtataaataacaaatccaagccatccactgtcaaagaaatatgcaaaatcatgcacgaagtggccatcacacactacttttctaaaaataaatggacgaatacgactaaacaatgcgaagtagctttatatccgcatttggtagatgcgcacaagacaattgaaacaccaaacattcgtctagaaaactagcccacaaagctttagtgacccattcttctcttttcctcctttggtgttttatgataatgttttcacattcaattatttatactaataaacaaatatatatatatatatatatatatatatatatatatatcattaataaaaaactttttactcctaacttgcttgatatatattgatatgtttgcaaagttaacgataatgtttcttcacatttttttttgaaagatacatcgtaagcagtttagatggattttatcaatatcttgtcaattttaattagaaacaatatcgaaaacctcttgaactctttaaattcatattttattgtaagtttagtatatgtttcttataaatttactgaattttgttgtacttaaaagatttgttgtaagaaatgtctttaaaaggtagtgattgtagaaagaaaaaagtaatgtgattctgcgtccgaacaagtaaaattcaaaatatttaaggaggatcggtggtgtgcagttaagtgacatttatgcgagtggcagagtaagtgatggactcgaaggtaatggaaccatgtgaaaattattaattaaatatggatttgtaggtatttacttatttcatactactaaattactagtcaacgttttgacttttgagagacgtaaagtttgaacgaaatatctctaaacaattcgaaacaaaaagacatgaaaaaatgttgcttaaaattgatatcaagctttccaaagccaataaatttgcacttgagataccaaatgtttctaaattgtgacataagaaatcttatgttctcaatggtaatgacactcaaaagacaaaacatttcatttgcagacattacagtgtgaattaactaaaaactttatcctgtaaagtcatctcccaaaaaatacactgtagtacgtagagcccatggtatggcatttagtggtacatcatatttatggtaaatttaagcattggaaacattgatgagattatggacaatatactacaaatgtgcaataaatatcgaaaaaaacaaacaaaagaaaacttaagggctttcgaggttccacgtcgaaatgatttcattggacattgatgagatcatgagatctgcagattataatagtgggctagccttgtctttgagtttcgacagacattgtctcctttctagctaatgtcattttcccttctctctatttcattacatttttttgtgttttagtaaatctcattcattatttcggtaattaatacattatagataatcaactcgtggtgatcaaataattgaatgatttatcttatgggctgacagaataagatttgagtattttcaatgtcatttatcctctttgtgtacgtcttgaataacaagaaactcacaattttatctgaaactagagatataaatcacagttgaaatctaatttttttaatattcttaatgtgagtttatatctgaaaaattatagttaaaatctcgaattaacgttgtgaatccaaaatagtacatggaataaaagttccaattttttaatgatcgaaataatagaatgtattgtaattaattattgttagaacttagaagatacaatatacatgttataagcatcttacctaattgtccatagtttcaaaacaatacgaataaatcaagataaaacaaagaaactgtcagtaccgaccttagctcagttggtagagcggaagactgtagtagtagctgtaatctttaggtcgctggttcgattccggcaggtcggattttaagtttttaaatttccattttttgtttttctatacaaatcttgatcttgggcctgcctattcgttcatgggccgataattcaaaatttaaaagtaagataacgcggtttcgctaacatgaacacgacgacgttttagtattcaatccgtgttttgacacgacagttatattacatagttggaaggaacggctcgaaacgggaaggttattttgtaattttcaactttttcttttttttttccaaatccacttttcattttattttctttgagaaaacccactttacgaaggaatcaaatcgactcgttttcttaaatccgccatagatcccatccgacacaccaccgtcacatccgggttcgaatcctccagctcgagctattcgcgtttcttcatcttctctctttgtgccatggtgtttcaccctctttagggacatcacaagctttggtttgagagaatttgaaatcctcctctaggatttgaaaattatg

SEQ ID NO: 13557 - DNA, 3000 bp, Unknown
  misc_feature (1)..( 3000): cDNA_ID_2685740_gDNA_ID_2214636_Annot_ID_188115 3000 nt of promoter + ATG
agaattaagaaacatctgagctcacagctcacatcgttctggtaataaaacacaaacagtgtagtgtggtcacgtaaatcgtgtaggacttgtcatttgcttatcactatcgcctaaagtcctcacttttaggagtagactagtaaacgcttctgactaaaatacaattaaattaagaaactgaggttcactaaaattccaaaatgaacaacaaaagctcactaatactcaaataaattcttaatcaaaagcattccgatatgattttcaattactaggatccaaaattgggacacaaaatttggattagatacactgcctacaagtagataattctcctgaatattcatcaatcaagaatattcatctaataactagtaaccaaccaaaaaaaaaagaaaaaaaaaactagtaaccaaccaccattgtttatttagacttgcttttaaaaaatttgttagttaaaaatataaaatggaattagacaattagtgggttctatgtacctctaaaacgagaaaaaataaatcagataccaaagagagaagattaataagatagttttgaggaagaaatcacaattagagcttaaagcataggaggaacaacacaaacatgggttcaagtacaacaacacgacgaatcacttaagctcaacacgacaacacctttgactctatctttctcatctccaaataaaaaccaaactaaaccatcacagaagctgaaaaagttcaaaactttaaggtacaagatgggaattttgtcggacgacgtagtgataatcagtcaatcggagaaagaaggtgacccgagtgttataaccatcaattgtcctgacaaaactggtctgggttgtgatctctgtcgtatcctcctcttcttcggcctcaacattgtcagaggaggtaacaattccattccatcattttactttgtgtggttttcgaaaatttcttctttttgatatctgttctggtttgtaacctgaatgtgttcgatgaaattcctctgagaagatgtctcaactgatggaaaatggtgctacttggtcttctgggtgattgggaaaccaaacacgagatggaatctgttgaagatgagacttgtagaggcaagtccttctttttcttgggcctttggtatctcaagatgttacctttctgattctgagtctcagcctcccaagcttcctgatcttttcttattgaagctagcttgttctgaccgcacagggcttctttatggttagtttgtttctgtttgcttattgattcttctgaattttgaggtagttgtggccttactgtttctgtattggcagatgtcacagaggttctttacaagcttgagattaacattgagaaagttaagatatcgactacccctgatggaaaagtgatggacttgttctttgtcacagacactaggtatataaacaaagcttgaaaggagatttttgatgttccttggatgtttaagttaggtgtgttctgtttttgttcttgtcagagagcttttagggacggttaagaggcggaatgaagtgtatgagtacctgagagatgctataggagattcaatgatcagctatgacattgaacttgttggccctgaaatcacagcttgctcaacttcctcgtcggttgcagaaacattgttctcctcggatgtgtcgggagagcattcgagtgggttacacacttcaagcaatgtttctattgcagttgacaactcgctaagctcagctcacaccctcattcatatcacttgtcaagatcacaaaggtcttctctatgatattatgaggaccttcaaggatttcaacattcaggtttgtgcaagtctttaatgggttttttctgacccttcaaattcatatgctttgcttaaaccttgcgactgttatttacatgagactcgttttctcaaatcttatttgatgatcagatctcatatgggcgttttacaatcaaactaggaaagaactgtgagatcgacttgttcatagtgcaatctgatggccgaaagatccttgactcgagcaagctaaatgcattgattactcgtttaagagcagagctacagcaacctctgagagtggtaatgatgaatcgaggtccagatactgaacttctagtcacaaacccagttgagttatcaggaaagggacggccacaagtcttccacgacatagcacttgccctcaagaagatcgatacctgcatcttctcggtataatataactcacccaatcacatcattcgagctcataccaaaaacagtccatttttgtatcatctaaatatcgatgaatctgatgtctttactaggctgaaattggaagacacgtgactggagacagagaatgggaggtgtacaaagtgttgatcaacgaagaagacagcttaccaatcccgagaagcaagatagaggaagaagtatggaaaactttgatgggctgggaatgaaaatctttcagagtataggaccattagctaacctcagactcatcgaaagagtatggctataagatttgtcactttatgatgcaatgagtgtatgtagattaatatgatacgaggagatatatctgataagccacagtgtgtatatatggtttgagtctttctttttgtgttgatgagaaattgtaagtagagaaaagcagaacgttggaatgttgtaaatgagtactgtgtgggtttcatagtaagaagctaaagtttttctctttgttgtattgagctgagatttttctcatattatatgaagtgagtggctatatcgtaattaaacacttaatgaggggcaaaaagtgaaggagaaacctaagaaaaatggcgactctttaagaagcacacgaagacaatccgaaagctgaccacaaagttttctactttgcaatttagataaatctttctatccactttgagaataaattaagggctctcaatttcgaattctgcttctccaacgaaaaaaacgaaatctttaatg

SEQ ID NO: 13558 - DNA, 3000 bp, Unknown; identical to SEQ ID NO: 13547
  misc_feature (1)..( 3000): cDNA_ID_2703319_gDNA_ID_2214636_Annot_ID_188114 3000 nt of promoter + ATG

SEQ ID NO: 13559 - DNA, 3000 bp, Unknown
  misc_feature (1)..( 3000): cDNA_ID_2713826_gDNA_ID_2214636_Annot_ID_136137 3000 nt of promoter + ATG
cgtcaaattgtcatacaagataaaccaaaattaatttacttatatgtatttgcaggtatggttggtttgtccatgatgcgtcaggttctattatttctcaagttccaacttcagatccttgcccttcactcgaggatgacatgaatgtggataggttgaacgaggtcaacatgctccttactgaatcaggacccttgtctgtgcattcaactgctgaacaaacgacatctgtagagcccagtcagggtctagtatgtgcatctggtgtccatgatcgtcccgcaagatctagagatgattatgaacctgcttcaacgagtattactccacttgagcatttgagcggcggtaatgcacaatcaccaggagaatgggctgatagtcttactaacataagtataggtgatctactttctgaagtgcccgatgacatagatagtgatggtgttgatccacctgccaccgaaggttcacattacctccttcgagatgtcccatttacctctgactcttttgatgctgcaattgctgctcatatactaagacaccagaacaagccaagtgctcaactaccgctgacttctggctcttcctctctgtgggatgatgaagaaacacgtgatgccttctctttccaaaaaaatcgtttcgcaaattccaccgagctggctagtgttgcttctcctaaaggtgttggcagagtaaatggagagccttcacagttggtggaggtaactatatcagcctcaaattccacttccctcaattgtttacaaaactaaaccatctgattcaatactttctcttaggcttcatccggcgatgagggatcttataaccctcatgacgatggagatccaatggaagagggtccagcagaccctcatacgatggattctccagggaagaccccttgtggacttgcggatgtatactgggtaaatttagaaatctcatatatttccccaatgtaaaaaagtcatatatattcaacaacaacacatgtttcctctttgcagcccgactcgttaggaccactggatttagacattagatcgtcaaagtatacagatgatttgatccttagtgagagcctcgggggattgagccgtctgatagcaaccagccttgatgcgtttcagaactgctcgctctttgggttcgacaataagaaggacaagtctaacatggtatgaaatggaaccaaagctaaagcatggggtccaaatgttgatagttgaaaaagaaagtgacttcttgccttttgaaaaaagaaacttttatcaccaactgatagcttcactgtacaaaaatttgatgtaaccttttactcttcctttcacacattcttttgtgttgatacatgtttctctgtgtacacttttactgttaatttacatgtttatttggctaccatgccttctttcttttttttttctttttttttgttcttttgtttatagaagtttcatgacaaataagaatttcaattaatattcttaagttcttttaagagtgcgagtaaaagaacaatcgtaggacgcaaaatttaactcgctcattcaagagtagtgttgataagtccttttttttttcatttcaatattctacccgaaaaagattccaaacttctacttttctacacttgatcaccactataatcgaagatttatgaacaatagactctttaataaagtaaataaatcatttaaaactaagtttgtttgttgtcttgatcatatgtgttcaaattggttttctcttctattctctacattaaaacatcctccaacattcagttttctcactctcaatgaaccagtaatacacaccctaggtgcactagatttcattcaaaactaaatctggttcactaaaccaaaccatattgattttcaggaggaaaaccactttttttagtgtgtagtacgagtaagtttacaccctgagatgcagggttttttctttgtcttttgctaagtgcgtgagatgcagttttacccctagttagaggaaaacaatgaatttgtgtaattttaacattttcttgttatgaggaatatgctctgaataatgagaaccatacaagatacaacaatgacataagccaagttgtcataaaaggccaaatgtgctttaatgtgtgatacaccgctttacactggcctactctttcacttcacgtcaagttcgtaaacgaagagacaatctctacgtgccctccccttgaatattcagcatcatcttctttttttgaaatcaaatttgacggcttctgttgtcacaggatatactatagacaacaaaactacatatgatacaaggcatattcgagttctgatcattcacaataaaatacatgtgatagaagcaatttaaatatgtgcctgaaatatataaatcaagaaagccattaatcaaaggttaaagcaatatggattgtacgtgttgagtgtatttttttttttttgtcataccaagaataaaaacatcaggccgagacagtagtataagcgagggaagagatagattaggtcctcaattcaaaggacaccaacttttgatattttatagctagcagccgtaaatcatatttgttctatttttagcaatacaacatttcttagacaccaaaatcggtttagttaatcagatttcaagtatgattttatgagattctaagcatggatgattcttttcattggctacttttaaaataacagaaaggatctaaattttcatttgtagtaaatttgaaaacgttggcgtggccttgcatatatatttagaaaatcgtacagtggaattggtttaattggtaaagttttctaggaatgatgtagacgaaacaaataataagattatcctttaaaaattcacttataccacaatcaaatccatattgaatctcactcagaaccctgataaatatccactctcagtccatatatcactcaaaacttcaagaaaaaaagattcttcaaaagagcaaaaaaatca

SEQ ID NO: 13560 - DNA, 3000 bp, Unknown
  misc_feature (1)..( 3000): cDNA_ID_1450561_gDNA_ID_2214636_Annot_ID_136139 3000 nt of promoter + ATG
aacgatatgagaaaaatgtaaaattcaaacatgggactacattagctgattttgaaaagacttacaaattcttgatgcaataacctaaatctcgatcaacgtcagcctttaaaacagtctttagattctgaagtcgagtatagataaggtttgtaaccgaaacaagagcttttgggttccctgttttgctgtaatcatctccatccagagatagtgcaaatgacataaaactcaagccaaaaacaaagaacaagaagatgtgttgtgtccaacaaacatcaaccctaactctcattgttcttatatcaaaagtcttgccttaaaatcagaaccttccgaatcgaaatatctgaaccctctgacctaacaatagaatagatacattggaagctaccaatagaaatatccgtagagatgtcttgtgtttttctatcatgtcttgagaaaaccaatgagtatattcttgaaaaatggagatgaaggattaaaagaaagctaacgagcttgttgtagattttttttgttctcttttagaaaatcttgaaatgttgacgttgagatcaaaagttggaaagttgaaaaatgagagacttgcgtgaaagaagagagttgagaagggtcatcatggaaggaggtccagatttctagcaaatgaaaaaaaaaatgggtgagaaaaatgattggtttcttaattataacttatttccaaaaatagaaataactatattggaggagcatgacaaatgatgattctttggatttcatgagaaatttttgtttatttaaatagtgttgcttaatgatttcaagcattactaaaaaatcacaaatcaatagtgagaaaaacaatataaacattataaacatatggcattattttttaatcaatttgtttccaaaaccaaataataagattatcaaacaatattattagttgtttagtggcaaaataacattaccaaactaaacaacatgatttgactaaattatccttatctgttacctcctaaacttttaaaatcctaattttaacactctaaatcaaaagcctaattttactaatggtgacggcgtctacgttcctcctcctccgcgatctcaacctcagattccgccgtcgtggtcatcggctctaaaagcatcgctgtgaacggcatatgactgtaaccattcaccggatactgaattccgattggctgacaaagatccaacctacaactcggcgattgtggcgtttgcgtttgcgtttgcggcgacgtcatcgacgacgacgacgaggaatcgtccgccgcaacatcaacccaattcgaaatgagcttagtcccgtagccagtggcggcaataatcgacggttcagcttgactaagaagccattcgatggtttctccttcagttttgtgaccgagctcacgcgttaactggaaaatcctagcggcggcgagagccggcatcgtaactcgacggcttcgtccgttaaccttcgtgtgacggtctttagtcctggcggagatacatccgccgccgctcgaggaggatttcgaaacaccgaactgcgtttgggaacgcgattcggaagctatagcgttgaagttggactcatttctgcacacattctgaaaaatcatctccgaattcgtcgattttgtaaactaatttcagtgacgatgaacaaggattcacagagagaatcttagggttactaaaggagggagaagaagatgattcgaattaacttttggataatttgggcttttaagcccaatataaggcccaacatgatccactctgtaggaaaaaaaaaaagggagagagaacaaaatctgacttccatggcaacaaacaagttttaatttttacaaaaaaaaaattgggagtgtgtgtgtcgccttatctgttcgtcatggctctgtagagtagcctcatgttcttattcttcttcttccttagccattcgtggaagcaaaaacagagtcttttattctttggtgattctgtgaaatggaagctacgaggaacttggtttcttcatctccttcgtttcagacaaagactcatctcaagagcagctactcttctccttcctctggtacttcttattcagctactcttcatatagaaatattgtgtctttgctggatttgtctctgttagttactggaatttgaagttcatggatttcaatttgaaattagtgtatgtatacgagtttgtgttagcattttctgatttgtttttgttcgtttgttggtatttctgtagtagtgatgcttcatgatcaaacaacaactcctgttgttaactcacgtcatctcaattctctatctcgacattttcctgcgtcggttctctcacaggagccacgggaagagtctaggcctctgtcacatgcgttaagagacgatagaacatcccaggtgtgttttattagcagcaatattgtcctaagagattgaatcaatcataaagttgtcaactttctagtcctcttgtttaatgcgattgggttccttgcatttttagttgactctggagaggaggcagtttgatgaattggtttcatctcgagaagatgagaaatttgaacagcaacttcttcactctactggtttatggaatttgtaatgtctcttcctctcttaaacccaccagtttcagttttcatacaaccttttgagttttctgaatgatgtagcctttcttttgtttgcagattaatatctcctttaacatctgaaacgaaattgccggcagttgtgtctcctttagctgatgcagagctttgtgatgtggttgcactagctcagaaggctttatcagcttcaaaacaagctgcattgttagttgatgacactgaagcaaatccatctgacaacatcaaggattctctctccactaggttgctttttttaaccttgtttgtgtatcttatcaatctgctacttgtgggctgtaatgtgaaaagatttgtatttctggatgtttggttttagctcttctatg

SEQ ID NO: 13561 - DNA, 3000 bp, Unknown
  misc_feature (1)..( 3000): cDNA_ID_2703337_gDNA_ID_2214636_Annot_ID_136141 3000 nt of promoter + ATG
tcgccgcaaacgcaaacgcaaacgccacaatcgccgagttgtaggttggatctttgtcagccaatcggaattcagtatccggtgaatggttacagtcatatgccgttcacagcgatgcttttagagccgatgaccacgacggcggaatctgaggttgagatcgcggaggaggaggaacgtagacgccgtcaccattagtaaaattaggcttttgatttagagtgttaaaattaggattttaaaagtttaggaggtaacagataaggataatttagtcaaatcatgttgtttagtttggtaatgttattttgccactaaacaactaataatattgtttgataatcttattatttggttttggaaacaaattgattaaaaaataatgccatatgtttataatgtttatattgtttttctcactattgatttgtgattttttagtaatgcttgaaatcattaagcaacactatttaaataaacaaaaatttctcatgaaatccaaagaatcatcatttgtcatgctcctccaatatagttatttctatttttggaaataagttataattaagaaaccaatcatttttctcacccattttttttttcatttgctagaaatctggacctccttccatgatgacccttctcaactctcttctttcacgcaagtctctcatttttcaactttccaacttttgatctcaacgtcaacatttcaagattttctaaaagagaacaaaaaaaatctacaacaagctcgttagctttcttttaatccttcatctccatttttcaagaatatactcattggttttctcaagacatgatagaaaaacacaagacatctctacggatatttctattggtagcttccaatgtatctattctattgttaggtcagagggttcagatatttcgattcggaaggttctgattttaaggcaagacttttgatataagaacaatgagagttagggttgatgtttgttggacacaacacatcttcttgttctttgtttttggcttgagttttatgtcatttgcactatctctggatggagatgattacagcaaaacagggaacccaaaagctcttgtttcggttacaaaccttatctatactcgacttcagaatctaaagactgttttaaaggctgacgttgatcgagatttaggttattgcatcaagaatttgtaagtcttttcaaaatcagctaatgtagtcccatgtttgaattttacatttttctcatatcgtttgttgataattcaggaagggcgattggaatgaagcatttaattttgataaaaatctggacttcttaagcaattgtgtcaagaaaaatgatggtaaacaacataaaaagggttatgtttttatattcaaatacttgaacattgagatttaatggtcttgtgatatgcaggtgacctcacacttagactatgttcagctgcggagataaagttctactttagtagttttgttagaagagatgaagcaacaacggttcatgtaaagcctaacatcaactgcaatttagctaaatgggtttccggatgtgagcctggatggagttgcaatgcagatgatgaaaaaagatttgatctcaacaatggaaaaattcttccatctagaactcgtaaatgtcaaccttgttgtgagggtttcttttgtccacaaggtcttgcttgcatgatacgtaagatatccatttacatacatatatgttatatcaacattataagtactaaaactttaatctaacatattcattgttgtttattctctgatttatgtaaacgaagcgtgtccgttaggcgcatattgcccgcttgccaagcttaataaaacaacaggattttgtgagccgtaagttgttagctttctagattgagtaagttaatgaaaaatcttattagtggatgatttaaagagtttttacattgcagatataactaccaaattcctccgggaaagttgaatcatacatgtggttctgcagatagttgggttgatgctgagagtagtggtgatatgttttgttcaccaggttcatattgcccaacaacgattcgaaaagtcacttgtagtagtgggtattgattcttttatctcacaactcttgttactttttgaaaatttgtttcatatatgaaatattcatcattaaggatgtaattaatgtttttatgtattacttagacattactgcagacaaggttctacgtcacagaaacgtaagtttctaaaacactaaaacctaagaaaatgaattgttttataatatcattatcattcattaattctctttttggtgaccgttttagcatgttttaagctcgcaacatgcaatccgaataccgcaaaccaaaatattcatgcctatggagcgatcttaattgtaagttgttagttaattagaatacattttgctttaaaatttgttggaaattatattttcgttattgtatatataggcatcactaagtcttctcatgatcatggtttataactgttctgatcaagttctcgccactcgagaaaaaagacaagcaaagtcgagagaagctgcagcgagacatgcaaaagaaacaacacaagctcgagaaaggtggaaaaccgcaaaaggtgttgccaagaaccaaaagatgggattgtctgcacaactatctcaaacattttctcgcatgaaatctgctagaaaggatgccacaccagttaaagcatcgggaaagtcaaaagacaagaaaaaagaaccgagtaatttaaccaagatgatgaaatcaatggaggagaacccgagtaacaacgaaggattcaatgtaggaaccggtagtaaacctgggaagaagccacaagctccaaagggtaaacaactacatacccaaagccagatttttaagtatgcatatggtcagattgagaaggagaaagctatggaacaaaacaacaagaacttgacattctcgggagttatttcaatggctactgacactgag

SEQ ID NO: 13562 - DNA, 3000 bp, Unknown
  misc_feature (1)..( 3000): cDNA_ID_2703372_gDNA_ID_2214637_Annot_ID_136145 3000 nt of promoter + ATG
ccaaaaagggaaataatttaaacaaaatatgattttattgacgttattttaattaagcttcagtcttaactcttaactcttaagtagtttcttaaatagtgtgtcaaaaaaaaaagtaagtttcttaatactgcttctaatttgcatgtcgtagtatcagaagttttttcaacaaaaaaatcattatgaagagagtttatatgaatatcgctaaccattatgtggaattgtggataatggataaattttgagaactaattggattcatgtgttgcctcacagtgagctgacgaccgttcgatcattgatatacatacacatatgatgaaaaaaagatgctaatttctcgttgctttttttttttggtcttttcaaaaaaggattgagacaaaaaaagaagagaaaaaatgatgaataattaggtacctttccgagaagcaaaaccctcgaaactctcatcaaatatcctaaccatacctttctttaaaatttggattttgcacaaatccatttacaaatttaattactttttcttttcgtaggtatatatttatttatacctttataaatatataactttataggaagaagtatcgtatagtactacttcctactcgctatacaataaataatacaatgcgaggttgtttgtttcttatcacaaagttgtaccctatgcaacaacattcatataatcatccttttcccgagcattttgactgatcaatgcttcagtgcttcttcattatcatacaacacgttccaaccaaacttgaatcatgtatttttcccaaatcccaagttacacctaaatgataccaaagattacaaatacaactaaacatactcctagttttttcttatggaaaaggaaaattaagaacactagttagatgcaaacaaataaaaggagaaamcaataaaaatatatatatatatatatgagtgtccgaatcgaacgaactgaataatgtggaataagtttgattcgggataggttttgttttctgaataatctgcaaaactgacaaaccgaaatcgaataaaccggtcggctcaaagtctcaggtttagatatagcccaaatatgattgcaaatcacttaaaagttatacggacaccactatttgatcaacataaaaccatgttctacaataaagatttaagaattttaaaaatgggttggattggcctgaaactggattggaaaaattggtatttcttcctttaactaaatggcacacgatcaatttctaatttctccaaaaataccatttcttttggtattactaggtactagcccatgaagataaaagaattcattttactttatttcattctagtatatttcttgaacaattctaatgcaatttcaatgtcttgactatactcttgatcctccaatcgaatccacaagattttctaccaaaaccgctttacgacttacacctcaatcgtaaccatccatgaacttaattcggccaaaatcgattattctatttggcacgttatgttatggactgttcatatacgtaccacgttccaaactcgtttgtatctaaaaaggaaaaattatctcacattagtgatttttttttacttgcatcaactctattactatatactaatatatattaccattaccattttgaacgcgttacatagacattatttagtcattagtcaaatccctttactatataatcccatttgaaatgtaagaattttgaatgttgacagatgcaaataaggattagcatacaaaattactttgtaacccttatttacgtgataaaaaagtttagcctatcgttccactattaaaaacatgaacatgtaaaagttgaattttctatcttttcttgtatcaactatcaagtaatttgcaagtacctaagtaaaagaaaacaaataaacacaacgatctttattactatatttaaaacaaataaaagatagacaactattaatttgtttatatgcatatcagtcctttgcaacgtagataaaagcggtattatgcaaataaacttttcttttgtcaattgtcgtcatcatgcaaataaattttcaaatatcactgtcattattcaaatttcaaaccctaataaaaaagcaaattaaaaaaatggtttcgtacgacaaagggcttaacgaaagatgataagaacaaacattaataccgtagcttttgtatttctaacatcagtaaaaataaaaaaatcagacctcgtaaccaatgaagctgccataaaacctgagatggtgtagttaaagagggaattatgatttgtgtcagctatcaatatcatcataattagctgaaattatatttattctttggagtttttatttatttatatttgaacatttattatacaaacaaattatatacaaatagtcgtaactcattttatttttctcttcttcttttgttattatttgtcaaaataaatagtcctttatattcgtaattcgtaaatcagtataaattaaagcagaagtgaaaacataagccaatagtggtaaaaactgttattctatctctattctggttctgcaaaaagcatatatcaatttataaaaaagtgaacagactaatactagtagagttaaaatagactgtagttaagttaagaaaatgtacgatcaacagcccacaccgccacagatgaaattacgtggaacgtggtaaaaaagccacgacggtaaaatagtaatttaattaactcttcgattttccttttaactctgaagagggcaaaatggtcaatgataatttcgtttatttagtcataaaaaaaccgggaatgcaaagagatgagggcaaaatagtcaaattaaaaaaccgacgatcttttagattccttttaaaacctagacgtcccactctcacacaatacacacaagtaaccagttttctctctcattttctcagtttttctctctctccgtttttgaaaagatttttgtttctactttgggaagctttccgctaca

SEQ ID NO: 13563 - DNA, 3000 bp, Unknown
  misc_feature (1)..( 3000): cDNA_ID_2703379_gDNA_ID_2214637_Annot_ID_136147 3000 nt of promoter + ATG
ctaacttttaacttctctcaaggaattgaatataaactgatgcgtctattgtgaaaggttaagaatgttgatgaacgttttagttagtgagtttaataggttttgtttactgtgtaggctaccttgaggttggtacagctggataaagtggcagaaactctgtctcaccatgttatggagcatcatgaagtaatgggtaagtattcttgaattgagaagatcatatgcgtttggttttgtgagtattaatatttgcttttggccagtgaaggggatgaatttggtaagagaattggagaaagatttgaagattgcaaatgtcatctgcaaggtatgagtttcatattcttaacctaaattttacataaacaatacagtggttttattttctattttatctattactggtttgacttggttttggctgtttttgtgtgtttattgccagaatggaagacgaaatttgacttcttctatgaatgaggcttcaagagatcttattgtacacactcattccaaaaagaaacaagctcttctggtaggcttctcaatttatttcagacatctaggctccactgattgtttctttaatctgctttcttgaaatatttcatgtgttatagtttccttctgaaatcaccatcaatgtgctctagaactttgtgtacaaaattactctgtattatcatctatcagaaagtggccgagtatcttttttgttttaatctctaaagttacgaacaggatgtttctagcaagtagtttcttagatacaatctaagtgtaacctagcctaattttttgttttaattgctaaacatactgttgagattattattcctagcatgcctgtttgcttctctggataccatgtaataagagcgacatgaaagtttaatctttttacttgcaggatatgcttcctatactaactgacctccgccatgcaagagtaatgcagtcaaatcttgaagaccttgttgaagatggaaactattgcaaggttggtagtttaccatcgtctctgttgtatacttccatggttttcttatatgaattatggtgatgttatgttatgaaactaacaagagatgggaatttattccttattatgcaggcatttcaagtcctatcagagtatttgcagctgcttgacagtctatctgagttctcagcagcccaagagatgacccgtggtgttgaggtagttatagcttattcatgaccaaccattgtcttcataattttctatcgtcagtcggttgagcttctcatactcttttcaaggtttggttaggaagaactcttcataagctggattcactgttgttgggcgtttgccaggaattcaaagaagatagttatgtaatggttagtaagccaactcattctcatgtatctctgtagctttctcctttgtaaactaaaaggattgaattgtgggccttcagtttagtggagaactagaaattttgttcagagatttaacttgtttatgtgctcatacctttaggtcctcgacgcttatgcactgatcggtgatgtctctggtctcgcagaaaagatacaaagtttctttatgcaagaagttatctcagaaacccactcagtgctaaagagcattgttggggaggtatgtgagctaaatatcatttgttgctcctgtaggatgtagtcgtgcatgcttggatggttgaatgtattgagcttgctggtgtatagcgcaatcgttgtttttcctatttttttggtgcaagccgcaatcctttttctgtgttgcttagatgtcacttttgatcctagcagatacacgaaagtagcaaattgaaacctgcacattagtacaagttttttttacacgttgtgatttatcttatttcattctgcatgcaatctttgtcataggcggtaatgcttttttacttcatcatactgagcacgaatgagcacgaaatgagtttattaacgtcagcatatcaaaccaatcagattgttgatctattctctgtatatatatttgcttttgtaggataacagtgctgccacccaatatagtaggtatgctctatgcacttgagttattactggtacctattacattatctagtatttatctctggtcccttttgtttggattctagtatccttgctgatttttttatttttttttaattaatttcagacttacctacagcgatctatgccttcaaacaccagaatccaagtttaggcaatgtcttttgagaacactagctgtgctttttcagttaatatattcataccatgagataatgagtttcacgccagaaaaggaggtaggttccattccttgctttagtttgtatttaacattttcttattaccttgatagggttgttgaaacagcctctggttctaatttcagtactacagtataatatttgttggtagatctcatagtcttaaacacctctgcagaccttttacttattgtctgagccaaactatacctaaaacttctctctaacactgtagttagaggaaatcttagcatatggttgtaaatttactgtgtgtttgtttagtttggtggtgtggaactctaagaagacctgctttattgatagggatctatctcgaaatttattacttgatttcctagttaacatacaattaagtggggtttaatatctaagcctctgtggcgggatttaccaggttaacttactctatgttaggtaattgattgtccaagaatttggataagttctttaattttagtttaatatttttgtcttattccctttcggcttgaaagataatgggtcctaaaatcttttctctttgatggcttcattgctctgtatcttatacattgtcagcatccttaagatttttttctgtatgttgtcaatgttaatttgtttaaattatctctaatgggttctaacttctaagggctaagcttctgaactggaacaggcagaaattttggtctcacccagtcttgcaacaactcaa

SEQ ID NO: 13564 - DNA, 3000 bp, Unknown
  misc_feature (1)..( 3000): cDNA_ID_3030824_gDNA_ID_2214637_Annot_ID_136148 3000 nt of promoter + ATG
ttatacattgtcagcatccttaagatttttttctgtatgttgtcaatgttaatttgtttaaattatctctaatgggttctaacttctaagggctaagcttctgaactggaacaggcagaaattttggtctcacccagtcttgcaacaactcaaatggttgattcagtgaccggaagttcatgtgacccacaggatggtggtctattgccgggaagcatacctccttgtaccatttccgctgaagagtcggatggaagtggaacatccagttcagtgcagctggcgtctaatattgcaatagatgagtctaggaattctgaagatagagtatcaagtagcgagtcaccatggtactatttacgaaaagaaagtgcagcttttgtttcagaaactcttcagagaggacgcagaaatctttggcaacttacaacaagccgtgtgtcagttttgctctcttccccaggtgcttcttcaacaagtatacatcagttcctaaaaaattatgaagacctgagcatctttatccttgctggggaagcgttctgtggatttgaagttgttgattttagggagaagctaaagggtgtatgcgaaaattatttcactgcatttcataggcaaagcatgcatgtaagttccgttttacaatgcctattgggctgacattgccaataccacatagctagttaatttcatgcatcacctctcctacatgataacgtgaaaataaagtctttgtttggtttttctcccttacaggcgcttaaaatggtcctggagaaggagacatggacgaaattgtcaccagatactgtgcaagctattaattttgctggtcttgtgggggatggggctcccctaattatttcttcccgcagtgcctcaggttcttccagattccctcactctgataagccaagtaactcaattgatccaagtggcaacaggagtggattttcatattggctgaaaagtgggaacccgttctcagcaaagttaactcactatagagaagatcaagactactcctcgatcaatggagaagatcatgaagggaatgatagtattcatgatgatgttgtgaatcccaagataagagacataaaacgcatcaacggaggtagtcctgtttcagaagatgaaaacgaagaccttcttgctgactttattgatgaggatagccagcttccaagacgaagttttacacgtagtcaatcaaggacttcttcttcacattttagtactaatgatgatttgacagctcaaacaggatcatccctttgtcttctaaggtaatatatgcggtttaggaaatgtttgaaattataatgacagccttccgatcgcatattttccctggcacttttatgacatggaattgcattaattgtgttcgatgtcttagatctatggataagtacgcgaggcttatgcagaagctagaaattgttaatgctgaattctttaaggtacaaatcctaatacttggaaattcgtagatttctctactctgctccctcgatttcatttctaacttttctcttacgtctgtttgaaattttgtagggaatatgccaattgtttggagtctttttctatttcgtgtttcaagtatttggtcaagaaaatactaattcaggtggaaaaggagtttccgactctttcaatcgtgagttactgattcgtttgcttttgatgctcttctttgtttgtaatgttactccccaccagtgtcagtatgagtcgtgttatgacttttaaggctacaatatctgcggaaagccattttgctcaacataagtatattttgaaatgcagatcgtttgaaaagctgcttatcacggatatcacaagagtgtgagcaatggataaaacctcacgtttcatcatcaccatcttcttcacttgcctttcccaacactgttcatagtcttgcggatgtgactccagcaagtcccttaaatacttctggtcacttatcaggcgtatcttttagtctcaaggtatataacttggggctaggttttcatcaatttgaactacagttaatactgttttatgttcattagttaccctaaatataactatcctaatcatttatactctagtatttgatatattgtgtgagaagaagagcagctgccttgctttcttcttatcatctcaaggttgtataataaaaggattatcgcttgcaggaaagatgtgctgctgtggacacagtatctcttgtggctcgggtattgcataaatcaaaggctcatctccaatcaatgcttatgtcaagaaatgggtctctggttgaagacttctttggtcaactggtatgcacctcttcagatcttattttttaagaaaaaccctggttggacgtattgcctcgcttggatttgctgttgacaacatgcatacaatcttattatacagacacttctgtagcatccaatagtcttttgcctctaaaaaatattgaattatacaggacatgattagtaccttcattgtgttacgttgctaaactaatttctcctatataaaatgaagaactatctatatacaatatgtggtatcaaatacatttgaagtagtttgattaaaaggagtgattcatcaggttggttccgtacctgatctgacagagcacttacataggacaactgcgaggatactgctgcatgttaatgggtaaattgccgatcttcttatgagcttgtgttttcgaaagaagtgattagataaattgcacctctctcttcccttgcgccttctgttcgattcttactaacctcaggagttttaaaactgttacattgaatgtatgcatgttcattcagcttaaactaattttacagatatgtcgatcggatagctaattctaaatgggaaatcaaggagcttggaatggagcataatgggtttgtttaccggatgacccctaactgaatcatgaaatatacttaaatgtaataaactctttgaactaacaggtatgttgatttg

SEQ ID NO: 13565 - DNA, 3000 bp, Unknown
  misc_feature (1)..( 3000): cDNA_ID_2713848_gDNA_ID_2214637_Annot_ID_136149 3000 nt of promoter + ATG
tggatgaggccattgagtaaatgagtttgatgacaaaattacaagctaattaaatgtgtatatagatcaaaatttgttccaactttgactacaaaaataaccaaaatattaaatgataatactttaaatttaatatatatatatatgaaaataattaaattcaaaaaatgtttctaaaatatatttaattaacatttatgatttgaataatagatttctcgaactattgaaacgtgtacatccaaaagaaacacacattatcaacatatgtcaaattaaagagatcaaaatttgttccaacttggaatttaattataaccaaaaaattataatggtaatactctaattttgacatatctatatcaataaatgaagaagaatatatatatatatatatatatatatatacatatataatttatggtttacctaagaaattcttcaaactattgaaacgtgtacgtccaaaagaaacatacataaattatcaatattttccacttggtattaatcttttggtttgtaaggttgatctttttgttcgagccaacattaaactacattagatggaatgttggctcgaacaaccacattattcaacttagtttaaagagtttcaaacactgtttatcccctcatgcaaaatttgaatctcttttctaggtgatgacattcctcatttcactatctttaaccgatactgcttttgagaaagattacaaggagttaactcggctgatgacggccacgtctgatgagtggtctggtctgtcaaagggtaaatttgtctatcattagcatggtgtagagagaaccttctaatgtaaatctttgactctttgtagtgtcaattgtaaaattgtatatgaaatccctcatcaagtaaaactgcatgaatgatttgttagttgagaagatcgatcatttggaacaaaataaaaataaattaaaatattacagacaaaaaaaaatattacaaacacgtaaactaaagttcacactaatcggtggacctcaaatatgatgggggaaaatgcccgctaattactctttagggagggtgctagcctacgtggttgggcgtgccgttttgagatggagagcatccgatcaggaccagtgtgtcagtgattgagtttggagcccatttcttcttattccttttgagttagttgatatttccctaagtgactttttctattgggcattctaatggacctggttttgaaccttttttgccttcagtttagtatgcttttattaggttaggcgttcgggtattcacatatagagtatagattgattggttctatatatgcgaaaaaaaattaactgacaaaaaaaattatgcgatgtcttgtgctcgaaataaagaataacaattagaaaatacgaatctagggttcaatccatggataattacttggaaaaatcctttaccttgtagaaattgacatgctattttatacaaaaagaaacataagatgtcaatttctttgtgtataaaacatgcaagaaaattatttgttataaaaaatatagaaaatgtgaattcagatgggtttgaatgtgttttggcctgtcacctttttcgtatgctaacttaattttttttttaatttgtttttataaaacaaatatggttatagttagcctaattaattatagttgcgtcgttattattattattatttagtaacaacataatttaaaatcggaatgttttgtgtgaatagatatactatcttggaattgaaaacttttatcaaacttctgacatgaaagctaagtttggccatgtacgtatgagttaagatattaaattgcctgaatattcagatgtacttttttgaaattttattttcctcttatctgttttttagctcaagaaagtgacgcaatactgatagccaacatgtggagtagttgttgcatcgaccttacgttaattccccgaatagctaaatatcaaattgctttatcatctcttactatttgagaataaattcagttacggtatttattaaaaaggataacggacttacgcatgaatctattcgtaatcaatgagtggaaaccacttttttggtgtcatagttgcattcgtgccggccgcatcatctaagaagcaaaccaaggagattgtttttactactacgttgctcttgctgtcttgcaaaagatcaacaagtaaatatccacccataaactcaggcccgatatccaaaatccagtatagacactaggcagaacactataagtagcaatctacacttcatagacaaaaaaggctaatcaaacctagtttcgtcttaagaaaagtaataatctaaaacaacactcgctcaaaaacaataaataacataatttacgtgatgttcttctgtttccctcaaatcgaatgaatccatttttccttgagtggtggaggttcatcggaaataaccataccgatatttttcatgaccacaatactttattccgtcgtacacgtttatctacgatctagcaatcaatctacgaagccaagaaacaagaacagaatgtggatgaccaaaattttgtgctacaaaaaaaattatccaaaaatatcacaacctattgctgtcagaaaaacaaaacaaaaatattaatgttctcttatggaagaaaatatttcttttactttttggttaataattacagtaagaatttagctgacattctatctttactagtgaattttcattatataatatatagtatatatataccaaataaggttgaaccaatagcattgacttaatgacttgacactccataatatattgcttcctatagtgtctttatccctctcaaattttcttttctctctccctctcccacaatcacaagataggaaaattgatccacaaagaatcgtctgaatgaagacaacagttgtttatctggtgattctatgtctcattgtttcatgtaccaatggagaaaccaaacatgtaagaaaaattaactccgatg

SEQ ID NO: 13566 - DNA, 3000 bp, Unknown
  misc_feature (1)..( 3000): cDNA_ID_3030802_gDNA_ID_2214637_Annot_ID_188171 3000 nt of promoter + ATG
atatccgtgattcacggtactaggttgtgacaaatcactgattctccaattactagggccttgtgggtctctatgtatcgactgaggcatgttcataaaggttgcggcagaatcttgatacaaatcggtttgaaccggtacggaaatctggttctgtaagataccaatcaaatcaaggttgttgggaattctgatgttctgatgctgctgctgagtccaagtgttgggaaaatcattcatttgctcaactctaaacttatctcttcggatttgttgaaaatctggttttatcatatccatctttatgtaccttttgatattctatcataagaaattaccaacaaattaaatatgcatgagttccatatatatagcaaattaattaataaacatctgtaaattggaagaggttttttttatgatcacagaaactacaaaagcgagttgtatgaatggaataatcgttagactgttcaaaaaaaatgaaattcttactaacatgaacttaaagatccaaaattaaaaccagtttacaagaacataaagattcatgcgacagggaccttttagctaacataatatatgcattaatttctatataaccaacaacaataacaacaaaagaacgacgacctttaattaaatttccaaatgaaaaactacaaaaaaaacagggaaaacacgaaatgagagatggacgaagtaaaaacacccagaaaataatactttttatataagaacaaaaccctaggaaacttcaagaacaacaaagagaagaagaacaagaaaacaaaaaataaggtgtgagaatataactagtattcggatttaaatttggtaatatatatcataatcgtcaagatttcaatttggaactataagtaccatgagcaaaacaaatactcgcgaggagaaacaaaatgaataaggtaagtggaagtgataaagacagatagatctcagaagaaaaaagggaacacaacacataccgatcggaaggtggccggaaaaatcgtcggagctccggtggtgagtttagatatgtatgtaaaccgaccgtgggagatagagagagagactgagagagactgagagagaataatgattgcgtaaagccgtaaaatctgtaatggtttttttcttgacgtattaaggtgggttttatcagtctttctattacacggtactgtacttactctcttaaaaatctattttgtcggtttttttccacgaaaattattttcttctttaaactgatacacatgtatcaatatccaaatgaaacacatttttatacaaattgaaacatgcaataaactacggaatatctaaaaaacaataaaattaacggccctaaaattaattttaactaaattctttaataaaataaaataaaatcataagtctataaagtattagttattttatggtagtttaatggttaataattgttttttcatatagaacataggaatgtggttaaatttcagaattttaatacacttttaacttaattatttgtttatatgaggcactttaagttttagaaaactataaacacatatgcaaaacatcaaaccaaattatgtttttgcatgtcttttgttgcatgctctatatatcctaactatttttgcttagtagtccactaaattgtttcgtttcaatcacaaccactcaagaaaataattacaatagattactaaaacaagttaacaacagtgttatttatttactctttttgtcgtaatgctttaaattacatgtctctttcttttcatcggacaactgttagtgtgtttttttgtacatcaggacaactgttagtttactcatgttttctacattgtacattttggcagtcaattttacggcacggtttccattaaagatatggacgtcatcttatggtaagctgcatcttttgaggaataatacatgtagacgtccctatttataatttttgtgttacgtaacttcccttttgttattaattaagtgtgtttatttggtcaattcactcaatcaaatcaaacccaacgccaaactgcaactatttatgtgattgacgcttcagagttgaaactgccacttttgtcagatttattatctcacttcccaacttttcttttccgtaactagtgaatttattcatgggaaactaatttaatgcatggtatatgatgcgtacaacaagcaatacttatatgaaaaaagatttagaaacaaattgtattggcttaactaaatcaattaatcatgtagcaattaggtgatttggagtctattctctgtttagaaaagtagtaactgttgtctttatgagagtttctgttttacttagcgggtaaatctactctaagctaggtgttttcatccacttaacatgtattttataatctcatggttttcacaagtcttaaattgtacttattagtttggtctaaatattactccctttgtttcattatattggatgttttagggattttattttgtttcagattataagatgttttacaagtttaaatttaaatttaatttgactatttgtgactatttatattttgcagttttcattatcattttttttaacaaaatctaaatactattttttatatacaaaatgacctaatatgtatccatttaccttaaacctcttatattttaaaacagagtgagtacattcagtaagagaatggataaaaacgaatttggaatacacaaactataaaagtttcttgagtactgtttctattattgggccataaacagtgagacaaacaggcccatagaagtaggtgaaaaaggcttattaagatcaacggttctctcgttacgaatgcaaagaatcttctggatcctttttctctcagctactctctccatttatctaataaaccctaacccctcctcccacactattcgtttacactaaccacttccttatccacaccaatccagaacgttcctcaaaaagctccctccttttctctcaaa

SEQ ID NO: 13567 - DNA, 3000 bp, Unknown
  misc_feature (1)..( 3000): cDNA_ID_2703390_gDNA_ID_2214637_Annot_ID_188168 3000 nt of promoter + ATG
gagctcgtgtgttgtgatacctgtccaagatcatatcataaaggtttggtatttgcagttttccatgtttgtttgttggaattcttctattgctacttttaaaatgtttttggagcgtgaacttgatagagcttatctgtctgttttggttttatctagtatgtgcttctctaccaagccttccgagtgagaggtggtcctgcaaatattgtgtgaatatggttgagagagagaagttcgtggatagcaatctcaacgccattgcagctgggagagttcagggagttgatgcaattgctgagataaccaatagatgcattcgaattgtcagctcttttgtgaccgagctcccaagtgtatgcgtgttatgcaggtgaatatcaagcttttccattatttctagtctcttgatgtcttccttcatagtgtctcattaaaaatgtttagttgagaagatgtgtattggctaactgaaaccatttgcttatgagactgacctttgcttaattttctatgttgttgcagaggtcatagtttttgcaggttgggctttaatgctcgcactgtgattatctgtgatcaggtactttgttgttcattgctgtatagggttccttgcctcttaaatctgcttctggtcttcaccatttttggttttgttgttttctcctcagtgtgaaaaggaattccatgttggctgtttgaaagaacgtgacattgctgatctcaaggttctttgcctatttagctctttcattccctcgggtgaaaactcagtatctatctttctcattcttgttatgtcttaacaggagctacctgaagaaaaatggttctgttccctcgggtgcgaagagatcaacactacattgggcaatctgatagttcgcggagaagagaagctaagtaacaatattctgaattttttaaggaagaaggaacaacctaatgaagaaaactgtccagattataaaaccactcctgacataagatggagggtccttagtgggaagttgacctcttcagatgataccaaaatattgcttgcaaaggcactttccattcttcatgtaagtcaagaccacatttcaaactcttctgtcctttctgctgtttgtcccttctaacaattgtatgctataggaacggtttgatcctatcagtgaatctgggaccaagggagatttgataccagccatggtgtatgggtaagcaattttgtatcttcaatcagtcgagtggattattctttgtgctgatcaacaacttttgtgtgtggaacagaaggcaaacaaaggcccaagattttagtggcatgtactgcactatgttggctgtggagtaagattcttcttctttttcactctaatttattttctgtgacgcatgtttcatctttttaatgttgtcctttttttgtttcttgtgcagcgaagtgattgtttcagtgggaatctttagggtttttgggtcagaacttgcagaactccctctggttgctaccagcaaagattgtcaagggcaggtaaacagtttttatctggaaccttggatgttttttctttacaacaggtgcctactcctatagaatggttaataaacgactcactcttactgtcaatcccatacattgataaattatacagtgatacatctaagcagacatgtttttgtgtcgaatagcttaagagcagaacaatgtgtagcatcttaattgcagaaggaatttttttgtgtcaaattgtacctgggggatgaaatgcttgtgattgctcttttttgagagtttgagaatttatgttttttttttcctattgtagggttacttccaatgcctgtttgcttgcatcgagaggctacttgggttcctaaacgtgaaacatatcgtgctaccagcagcagatgaagccaaatccatatggactgacaaatttggtttcaccaagatgaccgacgaagaggtatatatctatatccatataaacttatatacactcccaatgaatcccatctctgatacacactgtgtttgtgtgttattaggtgaaagaatacagaaaagactactcggtgatgatctttcatggaacatctatgttgagaaagagtgtaccagcaccgagtgccgtgagtaaaactgaggccagtaaggaggagtaagctcaaggttgtctttgttttttggtttttggaaagttggtgaaacgattggatgctcttttttaatctaatttcgggtagtagccacgttcttgtacaggtttctcccctaacgtgtctttctttgtaatggaaactagagagaaagatacacaaaagggttagagaatttggttttggtagagacgaagtagagataagagggggaagtaaatggggaagtctaaaacattagggcattcttttgggggtttagtcatgattatccgaagctaatttttttttgtatattagtgcccaaaaatgaaattcaattttctgaaatctttttctttttgtcactgatgtttatatatcgaacaaaggaggtatacaaagccggcgagtatacggacacctgaactctgactataagaggaagatactgatgcctttagaaatgaatctctgaaccgggaattataccggtttgattaacgtcgaaccgtaatcaaaattttagggctccactaagcgggaaggagcgcctctaagaaatttgaaactcaaaaaaatcaaaacacccgttgagaaaatgcccctataaatccccataattacttccttaccacaatgcctttttaattccctttcgctttccctcttctcccctaaaattcatttcgtttccgatcgcacttcttctcaaggtctgctttacttcccgattcttagattagggttcgatttctgatttgtttaggttctcgtcgttgtttagggtttagattactgacagattgctccatttcttttgtttagtaaatttaatagacgtttgttgggtgatttaagaagatg

SEQ ID NO: 13568 - DNA, 3000 bp, Unknown
  misc_feature (1)..( 3000): cDNA_ID_1010471_gDNA_ID_2214637_Annot_ID_188167 3000 nt of promoter + ATG
caggtgcctactcctatagaatggttaataaacgactcactcttactgtcaatcccatacattgataaattatacagtgatacatctaagcagacatgtttttgtgtcgaatagcttaagagcagaacaatgtgtagcatcttaattgcagaaggaatttttttgtgtcaaattgtacctgggggatgaaatgcttgtgattgctcttttttgagagtttgagaatttatgttttttttttcctattgtagggttacttccaatgcctgtttgcttgcatcgagaggctacttgggttcctaaacgtgaaacatatcgtgctaccagcagcagatgaagccaaatccatatggactgacaaatttggtttcaccaagatgaccgacgaagaggtatatatctatatccatataaacttatatacactcccaatgaatcccatctctgatacacactgtgtttgtgtgttattaggtgaaagaatacagaaaagactactcggtgatgatctttcatggaacatctatgttgagaaagagtgtaccagcaccgagtgccgtgagtaaaactgaggccagtaaggaggagtaagctcaaggttgtctttgttttttggtttttggaaagttggtgaaacgattggatgctcttttttaatctaatttcgggtagtagccacgttcttgtacaggtttctcccctaacgtgtctttctttgtaatggaaactagagagaaagatacacaaaagggttagagaatttggttttggtagagacgaagtagagataagagggggaagtaaatggggaagtctaaaacattagggcattcttttgggggtttagtcatgattatccgaagctaatttttttttgtatattagtgcccaaaaatgaaattcaattttctgaaatctttttctttttgtcactgatgtttatatatcgaacaaaggaggtatacaaagccggcgagtatacggacacctgaactctgactataagaggaagatactgatgcctttagaaatgaatctctgaaccgggaattataccggtttgattaacgtcgaaccgtaatcaaaattttagggctccactaagcgggaaggagcgcctctaagaaatttgaaactcaaaaaaatcaaaacacccgttgagaaaatgcccctataaatccccataattacttccttaccacaatgcctttttaattccctttcgctttccctcttctcccctaaaattcatttcgtttccgatcgcacttcttctcaaggtctgctttacttcccgattcttagattagggttcgatttctgatttgtttaggttctcgtcgttgtttagggtttagattactgacagattgctccatttcttttgtttagtaaatttaatagacgtttgttgggtgatttaagaagatgggtcagatccagtactccgacaaatatttcgatgatactttcgaatacaggtgattctcagtttgattctcctcccattttaatggagttctctctcacgttttagtttcagtctaatcgcgtggtcttttatttttctctcaggcacgttgtacttcctccggaagttgctaagcttttacctaagaatcgtattctttcggaagtaagttaaaaattagggctttcctctattcgctgtataacccttgaatcatcgtaggctaagagatttacatgtttaagaaattaagttaggaaattgaagtttggacttttgagagtcgaagaaattgaagtttctgcttaggaatttgaagttttgcttctcattaacttgtttattaactttaggttgtgtaattgtcagcagtgacgaagatagtttagatatttttttgtgttatcagtcaattctcagttttctgattttgaagttaacagttttcttgttttacaatctggttttgtagagtgaatggagagccatcggagtgcagcaaagtcgtggatgggttcattacgcgattcatcgtcctgagccacatatcatgctctttaggaggcctcttaactaccagcaggagcaccaagctcagattgctaagtagaagaattatgcaaaattctccctaatctctgtttatgtctctcgtaaacgaggttttaaaatactactctgatgttttgttcctgtagttttttttattgtgttcatgaattctcttcagtggagaatcatgtgagtttggtagaacaacttttaatgttatgttaagtctggtcctttgctagactttggttggatccacgtttgaacttcttcatggttaagaatgaagacgttatttctcatgcttatgtgcttgtttcatcatttcaacctctttttattgctcctcttagagtcttaagtccataactatgaacaacaaacaaggtatcattacaatgccaatctgaaggtctaatcacgattctcatggcgatactgattcaaagaaactcatattgtgtctcaatcaccacattcaccaaacaccatatattccttactgtactactattagtgtattgaaaccaggagattcagagccatttttataaattaactagatatgtatcttatacctagtgtgaagcactgattgttggaattaaatgaaatttcgagaaaatgaacgagttcgtagtttgatggtaaataacaaggtctttggtcaaagcaaccaaacaagttgttgaatttaattagaaccaaaccaatccacccaatttcaattcattttggtaactaaccggtttataatcattcatacccaatcggcgtcttctaaagaatttcaaaactctaaaaagttaatcaaacacccctctatttcctcataattacatatctaccccaaaccactttattctcctttcactatcttccccaaatttcaaacgatcagattacagattcttcaattcctctttcccttctcctccatttcctgattaaggcttcacatctctgagagagaaatg

SEQ ID NO: 13569 - DNA, 3000 bp, Unknown
  misc_feature (1)..( 3000): cDNA_ID_3030821_gDNA_ID_2214637_Annot_ID_188162 3000 nt of promoter + ATG
taaatatttattgttaatagtttattgggggaggaaagggaaaggatatataattagatatgatgtttggttaaggttgattcctaaccgttggatgaggccattgagtaaatgagtttgatgacaaaattacaagctaattaaatgtgtatatagatcaaaatttgttccaactttgactacaaaaataaccaaaatattaaatgataatactttaaatttaatatatatatatatgaaaataattaaattcaaaaaatgtttctaaaatatatttaattaacatttatgatttgaataatagatttctcgaactattgaaacgtgtacatccaaaagaaacacacattatcaacatatgtcaaattaaagagatcaaaatttgttccaacttggaatttaattataaccaaaaaattataatggtaatactctaattttgacatatctatatcaataaatgaagaagaatatatatatatatatatatatatatatacatatataatttatggtttacctaagaaattcttcaaactattgaaacgtgtacgtccaaaagaaacatacataaattatcaatattttccacttggtattaatcttttggtttgtaaggttgatctttttgttcgagccaacattaaactacattagatggaatgttggctcgaacaaccacattattcaacttagtttaaagagtttcaaacactgtttatcccctcatgcaaaatttgaatctcttttctaggtgatgacattcctcatttcactatctttaaccgatactgcttttgagaaagattacaaggagttaactcggctgatgacggccacgtctgatgagtggtctggtctgtcaaagggtaaatttgtctatcattagcatggtgtagagagaaccttctaatgtaaatctttgactctttgtagtgtcaattgtaaaattgtatatgaaatccctcatcaagtaaaactgcatgaatgatttgttagttgagaagatcgatcatttggaacaaaataaaaataaattaaaatattacagacaaaaaaaaatattacaaacacgtaaactaaagttcacactaatcggtggacctcaaatatgatgggggaaaatgcccgctaattactctttagggagggtgctagcctacgtggttgggcgtgccgttttgagatggagagcatccgatcaggaccagtgtgtcagtgattgagtttggagcccatttcttcttattccttttgagttagttgatatttccctaagtgactttttctattgggcattctaatggacctggttttgaaccttttttgccttcagtttagtatgcttttattaggttaggcgttcgggtattcacatatagagtatagattgattggttctatatatgcgaaaaaaaattaactgacaaaaaaaattatgcgatgtcttgtgctcgaaataaagaataacaattagaaaatacgaatctagggttcaatccatggataattacttggaaaaatcctttaccttgtagaaattgacatgctattttatacaaaaagaaacataagatgtcaatttctttgtgtataaaacatgcaagaaaattatttgttataaaaaatatagaaaatgtgaattcagatgggtttgaatgtgttttggcctgtcacctttttcgtatgctaacttaattttttttttaatttgtttttataaaacaaatatggttatagttagcctaattaattatagttgcgtcgttattattattattatttagtaacaacataatttaaaatcggaatgttttgtgtgaatagatatactatcttggaattgaaaacttttatcaaacttctgacatgaaagctaagtttggccatgtacgtatgagttaagatattaaattgcctgaatattcagatgtacttttttgaaattttattttcctcttatctgttttttagctcaagaaagtgacgcaatactgatagccaacatgtggagtagttgttgcatcgaccttacgttaattccccgaatagctaaatatcaaattgctttatcatctcttactatttgagaataaattcagttacggtatttattaaaaaggataacggacttacgcatgaatctattcgtaatcaatgagtggaaaccacttttttggtgtcatagttgcattcgtgccggccgcatcatctaagaagcaaaccaaggagattgtttttactactacgttgctcttgctgtcttgcaaaagatcaacaagtaaatatccacccataaactcaggcccgatatccaaaatccagtatagacactaggcagaacactataagtagcaatctacacttcatagacaaaaaaggctaatcaaacctagtttcgtcttaagaaaagtaataatctaaaacaacactcgctcaaaaacaataaataacataatttacgtgatgttcttctgtttccctcaaatcgaatgaatccatttttccttgagtggtggaggttcatcggaaataaccataccgatatttttcatgaccacaatactttattccgtcgtacacgtttatctacgatctagcaatcaatctacgaagccaagaaacaagaacagaatgtggatgaccaaaattttgtgctacaaaaaaaattatccaaaaatatcacaacctattgctgtcagaaaaacaaaacaaaaatattaatgttctcttatggaagaaaatatttcttttactttttggttaataattacagtaagaatttagctgacattctatctttactagtgaattttcattatataatatatagtatatatataccaaataaggttgaaccaatagcattgacttaatgacttgacactccataatatattgcttcctatagtgtctttatccctctcaaattttcttttctctctccctctcccacaatcacaagataggaaaattgatccacaaagaatcgtctgaatg

SEQ ID NO: 13570 - DNA, 3000 bp, Unknown
  misc_feature (1)..( 3000): cDNA_ID_3030824_gDNA_ID_2214637_Annot_ID_188161 3000 nt of promoter + ATG
ttttggctgtgatatggtccagaaaatggttaatggagcaaaagtcacttcttggacttgcgtaagtttctctactcggattgaccgtggtttaccccaagagttctgcaaacagttgattgggatgtgtgtcagcaaaggaatggtctgtcttgtctcatgcttattgatacttgtcacaatttcataccaaaaaatttactaactcttttttttgttttaattctttgtgccaggaatttaagcctcaacctgctattccgttcatctcttgtccccctgaacatattgaggaagctcttctcgatatccacaaaagggcacctggtctccaactgttgattgtaatattgcctgatgtgactggatcatatggtaagtctgtgctaatgattggtaatatttggtgcaaagtttattccgacaatctgttcatgaagtactctttctgtctgcaggaaaaataaaaaggatctgtgaaacagaattggggattgtctctcagtgttgccaacctagacaagttaataaactcaacaagcagtacatggaaaatgttgccttgaagatcaatgtcaaggtctagtcatctgtgcttcttattgttttttatgatggtgtaaaacgggtatttgtattacagactgggggaaggaacactgttcttaatgatgctattagaagaaacatacctcttattactgatcgtccaaccatcatcatgggtgctgatgtgactcacccacagcctggagaggactcaagtccttctattgctgctgtatgtatatcttattttacttgtatctcattatactactgtttcatcataaaaggtaattctcttatttcaactacaggttgtggcctctatggactggcctgagataaacaaataccgaggattggtttctgctcaagctcatagggaagaaattattcaggacctgtataagctggttcaggatccacaacgtgggctagtccactctggtttgataaggtaagagcaaaacatctacaacttcttgtgttctttgatttttcacaagaataaatataatggacactgtttgtgattgcagggaacatttcatagcattcaggagagctacaggccagatacctcaaaggatcatcttctatcggtaagtggttctcacattccatgcttaaacatttcatagcatgagcaggtttggctaattgctttctctttatacagtgacggagtaagcgaagggcagtttagtcaggttctgctacatgagatgactgctatccgcaaggcttgtaactctctccaagagaattatgttcctcgtgttactttcgtgattgtccagaaacgtcaccacacacgtttgttccctgagcaacacgggaatcgtgatatgactgataagagtggcaatattcaaccaggtttctcactctctgctcttctctatcaacttaattcctttaatgatccagatttcaagtaacatatttgtatttccttatcaggtactgtcgtggacactaaaatctgtcaccctaatgaattcgacttctatttgaacagccatgctggtattcaggtattgcttccagaatctagaccaatttatgacctgttttgtctcagcagaattacaacttcctttgaatgtttgaatggtaatagggaacaagcaggccggcacattaccatgtacttctcgatgagaacggtttcaccgctgatcagttgcaaatgctcacaaacaacctctgctacacgtaagagacaacaacattgtacattttccttatgacatgttttaactctctgaaactaacaaaacatataataaaatgcatatgcaggtatgcgaggtgtacaaaatctgtgtcaattgtgccaccagcctactacgctcacttggctgcattccgtgcccgctactacatggagagtgagatgtctgatggaggttcgagcaggtccaggagctcaacaacaggtgtgggtcaagtcatttcgcagctcccagcaataaaagataacgtcaaggaggttatgttttattgctaatgattcacttcttctcttgccagttttaaaagccgttaataattatgaaaactatattcggctctcggttatctcttttgggtttggctgttaatattttgaaggatctggccaacttttgcgccttaggacttatgttatgcgttttggtttcagatgatgactacttttatcgtttgtgaaaagacaaagggttaattatgatttttttggacgatgatttggctcagttctttttacttatggtattttgtgctaatttcttgttacaatttattttcttcgacaatttcttttatcctcttaattgtcggcctctgcttcaactttccatggtttatcgtaatcttcacaatgaatcaaagtaatgttttcagtagaaactggttgtttttgaaaggagtcttattgggagtgatttagagagaatgagaatccatagaacaaaatcagttagttgataaagatttgattccacaacaacaacatttgctcaagttcttcatataaagagaaacaaaaaagacaattctgagatatttgcaaaggttgatcttataccgttcttttggatggatcaatttcacaaaaatcaggtttgatgattcaagagctttacccggttcaatcaccggtccggttttaaaaaacatttaacactacacagaaaatttggaagaagagtgttaaataaacactggctttaatcattttgttgggtaaaacaaaacaaaaacaaaaccaaagagagcgagtttaatcacaccattgtcgaaacaaatcaaaaggctcaacaaaagtcttcttcttcttctagatctctcttcccgatccgatttgtgactcgccggaaagaaataacacacagacagacattttctccgatcgtgaaattagatggatcaataattgatcttactggtataaagaagagatgagag

SEQ ID NO: 13571 - DNA, 3000 bp, Unknown; identical to SEQ ID NO: 13562
  misc_feature (1)..( 3000): cDNA_ID_2703372_gDNA_ID_2214637_Annot_ID_188160 3000 nt of promoter + ATG

SEQ ID NO: 13572 - DNA, 3000 bp, Unknown
  misc_feature (1)..( 3000): cDNA_ID_1811861_gDNA_ID_2214637_Annot_ID_136152 3000 nt of promoter + ATG
ttaatcgacgtcacaacttatttcttctcgtgaagttttctcaaccaactttgtttttccattaaaaaaataatattaaataacttctataacttatataggcatacaacttgagagaaattcaagccatagcaaaatttatgatggatttgtgacaatataacaacaaaataatattagtttcttaaaaaattcgatggttggatgtgattgtgaaagatcagtaacgaacatattatagcacattacactcatttcttgataatttgtggtccacaaggagaagcttttaaaaattgattacattaattaccwwwarcacttacacacatttaactttttcgtagtcwwttgwaagagyactwwwakcactaaaagtacatttaacttttcgtwymrcattaaataaaaattactcaattttmyagtygyawwwtgttgcatatctccttrctcatacttggcataactcgtttggatcatcttttagagttttttaaaattatccgataatcttttaaagttttttaaaatcatatatttttatcaaatgttgggtttgtcatttcgattatctatcttggtmyarctccggttctccgtcatccaataatcttctrkaataacttgaacgtsmtagagacgtggactattagaagaagaggagagaacaactcakcaacacaaatgaattaaacaaaagttgaattgatatttttaatcatcaaaacatacaatatagttaattcaccaccaaaagggcacaaacacgaaaccgtttttagtgattataatacttagggttatactagatctactttttactgcaatcatgatcatttattattagttaatggtacaagaaaatctaattctacgatattacccaatcttccacatcaacaacttagatgttgcttgtcttttttctttaaactcaagacattcaataacaacacttataaattcatactaatacagttttttcatacttaccggcaacggaaagtttaataaaatgtatgcttatgaggcaaatattagccacccaatacttagaaaagctttaacaactaattcgacagtgtaatgattttaggttctgatcaggcctctccaccattcaatttaactgcggcgctgtgtaggactccacatgacatcaattagttggaataagaattcatataatgtaaaaattactataaactatgttcctttacaaaatgctactaatgtaattgtgtgttcttttttaatttgttgctttttccgaagttgtactaatcagtattgctcaaagaaaatgatagtcaattaatcatatgcattctcaattttgtcatctaattaattcgatagtctaaatgaaaagaaaataattaaaagtttgggtgaagactgaagatgacaaaatactaagatatattaattagttttcaaataaatgtcattttagagtaataattatgtttttgtttgtcaaatttttactcttgctattttaatgtactttcgataaggatctttatccattgcccctaagtaaaattaataatagtgtaacatataatacattgatacaagtacaaaatgaattttattttgtagacttaatcaaatatttaaatgagtcgtgtaaaaatgacacttcatatgaaatgaaaacaaaataaaaaatgtgcatggattacattactcttattggagattttgatatgaatctgatatcaaccccaactccgaaaattaggtatagtataaaatctaattctgtgattatttttttcatgttttaaaaacttgtttaaagacaaaatttatcagattcatatcaaaatatgcaaaatatcgtaatatttggattgatagccaaagtccatcgatttagagaaaacatatgagatcttcttatctagattttgttccaaatatctaaaaattgatatgtatccaaatcataaatatgagtttattttgatatttttctttatttatatatattttaaaataatactccatactagttgaagccaaaaagaaaaaaaccaactttgggaagcatgatacgtgtcaatcaggtattagtcggtagtctatttttccccagacgttcgtgttacggtaagattttcttcccgaagaagcagagaggtccacatgttcctcctctccacaattcactcttcttctctttcgtcttctcttctggttaaattctctctcggagctgaccgtttcttcactcctaaatccaagccacaccatattgattctcttcactggtaggtttcgttcatgacgtctctctcattttgtgtttcccctttcaagctaggtttttatttgttaatggcggattctttgggtttttggcttcatcaccaacactgattactcctttttcctttctggagctctaattttgcggatttggttttcgatcggattttgtggatctttgtttatttcagatccaattcaaggtttgtgttactgttatcgagcgtataaatctgtgactgcgtaaacggattagaatgtgagatttagggttcataatcgcttcataagtgtgatcgggaatctgatttttttttcttttttttcgccatttttatcagcaatcgagcatagagtcggtaacctgattgatatagagatcatctgtttgaaattcggatttgattcatttgaatggtgaatattttcaggtgcttgcttggagctaagttttaacctcacggaaggaatctttattctgcaatcactgcaaagagaaggagtctatattttggtggagaatgttgttggacgataataaacatatgatttcagtgcaacgcggctttaagagtcgtggtcagatgaaatatctgaggtattgaaattgatgagcaccataggagatgatctaattctatctggagaagccagtttttgtgtatattttgtagataattaggctttttgctaatacagttaaagattgatcaaatg

SEQ ID NO: 13573 - DNA, 3000 bp, Unknown; identical to SEQ ID NO: 13568
  misc_feature (1)..( 3000): cDNA_ID_1010471_gDNA_ID_2214637_Annot_ID_136153 3000 nt of promoter + ATG

SEQ ID NO: 13574 - DNA, 3000 bp, Unknown; identical to SEQ ID NO: 13567
  misc_feature (1)..( 3000): cDNA_ID_2703390_gDNA_ID_2214637_Annot_ID_136154 3000 nt of promoter + ATG

SEQ ID NO: 13575 - DNA, 3000 bp, Unknown
  misc_feature (1)..( 3000): cDNA_ID_2703394_gDNA_ID_2214637_Annot_ID_136155 3000 nt of promoter + ATG
caccgcaacaccgtatatctcgttggctctcaaacggacttcacgaagtttcaaggcccttagaaccgcaatagctgaacatgtgaagcaaatctcaagtcactcatcaaacggtaacaacaacaaccgattccaaaagaggcaaagatctttgattggtaacaatgtcgggtttgaatctcaacaacaacatatctggaggcctcaaaggggattgcccgaacgtgcagtggctgttcttagagcatggctctttgaccattttcttcatccgtaaagcctcacaatttttttgatgtaatttgattttatttgatatgatgttttgatgtgatttctcatatcctttattgctaatactgttattaggtaccccactgattctgataagcagatgctagccactcaaactggtctctctcgtaaccaggtagctcaattatgtaattctttgtttggtgaaacttttaaatatgcttgtctcttgaattattgctcttggccggtcctgttttcttctattggtttaaagcatgttgatgggacaataacctaatggttttagaatttcttactctcaaataacatcaatcttatatgttaaagtaaagcatgcatatatagaattagtctagattttatgaaagacaagtgcatgtgtaactaaaaactgaaattgttctacgtgtaaatagaagattaacttttttcaaacatttccaccatgaaccatgtcaggacaaagagcgtctcattatcctcacatgcaaaaactctttagtatagacttcacctaattttaggtttggtttttgacaagatttgctgacttggtttcgtgtttttttttaaaggtatcaaattggttcataaacgcccgtgtgcgattatggaaacctatggtggaagaaatacacacacttgagaccaaagcaattaaaaatgcagatactagtcacaacattgagccatcaaatagaccgaatactgttagcagtccgagccatgaacaaacgctaacgggcctctccgggacaaaacggtcgaggttagagtacatggacatggtggggttcaatagagggaacgtgtcactcacgttagagcttaggcgtggtgtggacaatgttatccaaacgcagactcaggatcatcagtttggaactggaagccaaatgtttcatgactttgtgggttgaaaatcctctgcttttgtttcacctttatgtattttgggtagagtgaaaataacaaagttgtcttgaaatggttactcctaacttagggccacaaagttctctgatcacctttttagttattttttttgttaaaaacctttttaattatttcttttatgttatactaagattaagatccgtcccttgtgggtttaaaatttttaagttaaattaaacttaacaaaactttgatttttaaaattttattgtataacttgccaatttggctaataaggagaggcagtccaccagacaacgagtggaaagaatgatagggtgggtggcaccgagtgtgggctggatgaagttggtgaagttatccgagatatagctggaggttcgtgtaaggatttactctaaatattggtcgttgttcggctctcttggcagaattgtgggggaggaggggagggggttattatgacatgtacatcgcgtgggagaggaaagcgaactttttggaagtggaagttaatcggaggtggcggttggatttctcacgacatgccacatccgctgtcttttttggtatatttgcgccatgacggtatatattcaagggactgaattgtccggatttctcatttgtataagaaagctaattaactcgcaaatgataactaactatgctattttttacagctaggttatcattttgattatgttccgccaattttagagacacttgttagtgataacaagactgtgaatacgtgtcctaaacaaacttttatatataataaactcgggagacattgtgtcccaaatgcattacatcaaaaaaaaaaagcattttacgtaaaaatttatttattttgaataattatgtagaatttttaaataatttttattattaactatagttaaattattttctatcttataataataatataatatttaatgttttaatacttaatataattataaattatatttttttgatcattttcgatttaactgttgttgtacctaattgttaactagtcataaaacttccgcaaaacgtatcaattctcaaccgctaaattaaacgcatctgcttcataatgcttgaaacaacaaccgctcatctgtacaaactacaacagtcgcaaccacatctactacgtataaaccagtccagccctaaatttctacgtgaaattgaccagttctacacaatacatctcacatatgaaatccttccttcatgggaaataaaaacattttgctacattattttcattttacacaaagccatgcaagtaaccaaagtatgcttcgaaagcttaagacaaaacaaacaagaaaaaaacatccaagattttgacaagacacattcaaatcctatacagttcatcgcaagaaaaaggattccaagctacagaatatacttctataggggttaaatcataaaacaataaaagtatatatgcttctaagaaataactcaaaactaatgatattagagaaaatttcgaataaaaatacaacagataaaatttcaaaaaataaaaataaattaagtcttcttcagaaaatcaaaacagctttttcaacttcttctttatctctcccttctcttctggtgataactacggaaccctaatttcttctccttcttcttttggttaggataagcgaatccctacaaattgaacctttaatcgcactcgttcatagatatgaatccataactacatcgatgcgttttctaggttttcgacattaataggaagttaagggattgattttacaagttcttgcgtttgaatcgatg

SEQ ID NO: 13576 - DNA, 3000 bp, Unknown
  misc_feature (1)..( 3000): cDNA_ID_2713844_gDNA_ID_2214637_Annot_ID_136156 3000 nt of promoter + ATG
aaaattaaccttttctcaccaacccagaaaccaaatagagaaaagcaattgaattgaaacagaacaaactaaagggtcaaattcaatcactttcttcaaaaacccaataaaccagatagagaaaggtttttgaaaatagataacactgaagggtcaaatccaatcaaaacaaagtaatgaaagatgattcattttcttctttagtaagtagctaaggaaggtaaaaaggaacaaactttgtacctgacgggaagaacagaggacggaggcggaagagagagcgtttgcagacgccattttgagagaaaaggagggagctttttgaggaacgttctggattggtgtggataaggaagtggttagtgtaaacgaatagtgtgggaggaggggttagggtttattagataaatggagagagtagctgagagaaaaaggatccagaagattctttgcattcgtaacgagagaaccgttgatcttaataagcctttttcacctacttctatgggcctgtttgtctcactgtttatggcccaataatagaaacagtactcaagaaacttttatagtttgtgtattccaaattcgtttttatccattctcttactgaatgtactcactctgttttaaaatataagaggtttaaggtaaatggatacatattaggtcattttgtatataaaaaatagtatttagattttgttaaaaaaaatgataatgaaaactgcaaaatataaatagtcacaaatagtcaaattaaatttaaatttaaacttgtaaaacatcttataatctgaaacaaaataaaatccctaaaacatccaatataatgaaacaaagggagtaatatttagaccaaactaataagtacaatttaagacttgtgaaaaccatgagattataaaatacatgttaagtggatgaaaacacctagcttagagtagatttacccgctaagtaaaacagaaactctcataaagacaacagttactacttttctaaacagagaatagactccaaatcacctaattgctacatgattaattgatttagttaagccaatacaatttgtttctaaatcttttttcatataagtattgcttgttgtacgcatcatataccatgcattaaattagtttcccatgaataaattcactagttacggaaaagaaaagttgggaagtgagataataaatctgacaaaagtggcagtttcaactctgaagcgtcaatcacataaatagttgcagtttggcgttgggtttgatttgattgagtgaattgaccaaataaacacacttaattaataacaaaagggaagttacgtaacacaaaaattataaatagggacgtctacatgtattattcctcaaaagatgcagcttaccataagatgacgtccatatctttaatggaaaccgtgccgtaaaattgactgccaaaatgtacaatgtagaaaacatgagtaaactaacagttgtcctgatgtacaaaaaaacacactaacagttgtccgatgaaaagaaagagacatgtaatttaaagcattacgacaaaaagagtaaataaataacactgttgttaacttgttttagtaatctattgtaattattttcttgagtggttgtgattgaaacgaaacaatttagtggactactaagcaaaaatagttaggatatatagagcatgcaacaaaagacatgcaaaaacataatttggtttgatgttttgcatatgtgtttatagttttctaaaacttaaagtgcctcatataaacaaataattaagttaaaagtgtattaaaattctgaaatttaaccacattcctatgttctatatgaaaaaacaattattaaccattaaactaccataaaataactaatactttatagacttatgattttattttattttattaaagaatttagttaaaattaattttagggccgttaattttattgttttttagatattccgtagtttattgcatgtttcaatttgtataaaaatgtgtttcatttggatattgatacatgtgtatcagtttaaagaagaaaataattttcgtggaaaaaaaccgacaaaatagatttttaagagagtaagtacagtaccgtgtaatagaaagactgataaaacccaccttaatacgtcaagaaaaaaaccattacagattttacggctttacgcaatcattattctctctcagtctctctcagtctctctctctatctcccacggtcggtttacatacatatctaaactcaccaccggagctccgacgatttttccggccaccttccgatcggtatgtgttgtgttcccttttttcttctgagatctatctgtctttatcacttccacttaccttattcattttgtttctcctcgcgagtatttgttttgctcatggtacttatagttccaaattgaaatcttgacgattatgatatatattaccaaatttaaatccgaatactagttatattctcacaccttattttttgttttcttgttcttcttctctttgttgttcttgaagtttcctagggttttgttcttatataaaaagtattattttctgggtgtttttacttcgtccatctctcatttcgtgttttccctgttttttttgtagtttttcatttggaaatttaattaaaggtcgtcgttcttttgttgttattgttgttggttatatagaaattaatgcatatattatgttagctaaaaggtccctgtcgcatgaatctttatgttcttgtaaactggttttaattttggatctttaagttcatgttagtaagaatttcattttttttgaacagtctaacgattattccattcatacaactcgcttttgtagtttctgtgatcataaaaaaaacctcttccaatttacagatgtttattaattaatttgctatatatatggaactcatgcatatttaatttgttggtaatttcttatgatagaatatcaaaaggtacataaagatg

SEQ ID NO: 13577 - DNA, 3000 bp, Unknown; identical to SEQ ID NO: 13566
  misc_feature (1)..( 3000): cDNA_ID_2703360_gDNA_ID_2214637_Annot_ID_136157 3000 nt of promoter + ATG

SEQ ID NO: 13578 - DNA, 3000 bp, Unknown
  misc_feature (1)..( 3000): cDNA_ID_1807975_gDNA_ID_2214638_Annot_ID_136163 3000 nt of promoter + ATG
ccagtacacttccatccttcgttttcctatcaatcatggcctctaagtaaggtgttcctctaaaacattcagtagcgacaagagatccatttagtagttcagtccagttggtggtagatttcttgtcacattcattaaacaaacctacattttgtggagcagaggtatatgaatcccagccacgtaaaaaagcttcaattccttcaggaagaccagaatcccgaatcttgcttggttcttcattaagcagttccccaagcggcacttgaacatcaagagaaggacgattgatgcttgggaccccttgtttaagctgtgcttgtgaagaaaatctttctgcccgaggcaaagatgaaaagatacgatcgaaaagtgaatccccgtgacagcagggagtgataagatcaagtgtgcggtcaacaagtaacaagccagcagatcgcttacgacgcgctacatcataaacacttgacatgtctgttagaatcttcccaacattcttcgattggtcaccaagtgaaaatatttccaacttcaactccatctacaattttaaaaaagtgacgacatggtcacaaatttaagaaaaacgtacagaagaaattaaattattgacaaacaagggaaacagatatcttctagtgttctagctcacgtacttcatgaacatcgtgaattaagttcaaagcggttactgcagtgttagtttaccttaagggccagctggtaaagaaaatgtgcggtaagagttgcaccaggaggaacatcatcagtgtcagacatagatccagtacttatgggaggcaaaccaaaactaagagaatcctcatgttgacgggacaaggacgcttctgcgactgatccttgggaaggtaagacaaacgctcgaggagtgaaaggacaaataatcaaggggaagtggtgaactgagacaaccaaaccttgtgcaccacctgatgaaatatctacattttcgctttcaataggctccatagtaagggattcaagtgcagaagagaacttagaaacccctttgtctttagatattttgtcgcttttcttagtatgttcattgtaatcctgaacaagtaaggtttcatactctcgatacgcgtctggacctagaggtgaatcagggatagctgagtgagacccctgtacaacgttcagattaatattcaatgacgcaagaaaagaaacaaatattctgaagagtctcttatagatggaaaattattttgaagaaggcatagagaagcagaactgctaaattaagttagagaatacattacaatcactttgaatttgattatataacgatcactagtgttgataagtcaaatagcttgtgattgttctagaaaataaaaaagccaatatatatatccagagaaaaaaaagagattaaataaagaatgagaccaaggataacgttaaagaagagcacctctgaaatagatgtgaatacggtgcagcgctgaacaccttcatgggtgcttagacaccgtagcatataccgatgagcatcattgagaagtcgagatgtcataatcacaattctcttggcacaatcagactttgaattccaatcagccacctagagcacaaggcatcaaaagtcacatcatataaattaaatcagaagatttctcactttctaggtaaaaagatccccttcataccaaaagtatgaggataacaatcttcctgttctttatctagatcctcaattaccaacactaaccgttgattgataggatattccttagccaacattgtgcaggaaaaaaagaaacggtaacaagcttaccgcatctaaggaagtcatgttttcaagactgcagacagctcgagcacctagttccaagaacaaagggaaagctcctacaaattgaaaactttctgtgcagccagcatcgatatacacaatcgcatcttttacatcctcttctatctacaaaacaaaacatttccaaaatatctaaaccttacttgttcaggattacagtaaggtacttttacatttcccaagaacacacaaaaacgagcaaaacgagatcatggagaaatcgtaatgattcaggtgcagcagatcaaaacgtgtaacaagatgagaccagatgaaaaaaaaaaaaaaaaaaaaaaaaaagagaattcggatttcttacttcgcggatcgaattgagacaagatatcgcgacatcgatcagagccattgctctcagctacgagaattggatacaattggtcgagctagagtgaaatcgccagttagaatcaaattactatgagatgtgttgtctgaaatcagactgatgcctgaaccaccggagaaacactgctttcgcttcgccgggaaatctcaccgacgacgaacatgatagcttaacttgatatcgttcgtcgtatgatcgtcactttgttgggcttttttacactttttgggctttgaattatctttgatttattatggcccatcatatattagttaacgggtctaggatgcaatgttatcaaagggggatatattggagatgaaagtgattaactgaaacataacattggttaacaaatcatttgcactattgaaggatgggtgttggtggggtcgcgaaaaacaaaggcatgctcaagaccgaggctggtgattgggtcatggccattccggacgacgaagacaagcctgtcgtcgcgtttgattagttgcaaacaaacaataagtctcttttcgtgtgtatcgattgatttggttgaattttcttctctctatttgattgggtttatttttactcttttttgtatggttgagaatgatgtgcaagtttgtggataattctatatgccaataatattcccacaccagtgataaccttttatcgctttggacataagtgggtcagacagcatcatcaccagtccacaaccatttgtataaagttaaacaacttaagagtcaagagtcacttattatctccttacacacaccatttctctctaatg

SEQ ID NO: 13579 - DNA, 3000 bp, Unknown
  misc_feature (1)..( 3000): cDNA_ID_2703442_gDNA_ID_2214638_Annot_ID_136164 3000 nt of promoter + ATG
tttagtcaatgctggaaccaacaaggcggcatcaagcggcacatctctgaacacaaaaatgcttgatgatgacactgagaaccttactcgtaagtcttatctttaatcatttggtttattaatggtgaattgatttccctagtgtctagaatatggtagtgtcaggctctgtatctaggctaatgtgttcatttcttgtttcaaagtgttcaacgtattggaaaactgttcttatatgagtagagtctgtctatctttctgcctgtgagtctttgatggttatagtgagaggaactttttattgattgatgtgtattggatgctgaagcttcatgttttgaattatgcaattgtgaattcagatgaacgtgtgcctactgagctaaagaaagccattatgcaagccaggacagacaagaagctaacccagtcccaacttgctcaagtatattatccttctctctatatgtcccttattattaccctattttgtaactcggttcatgacaaagtgtttgtttctttttgtgtagatcatcaatgagaagccacaagtgattcaagagtatgagtctggcaaagctatacccaaccagcaaatcctttctaagctggagagagcgcttggagctaagcttcgtggaaagaagtgagccaagttctactgatgtagcaagtaacaagaatcaatgctttcgtctaatgccgtaactttgccaagaagaatattttctgattgtaagaaagcaaaaccgtttgaatgtttgtttcgttgatggaatctctatctcataaactcatatcaatataataacttgggtcttttcatcacatagttgaactgcttattgttgatttatcatgaccttagagaaaaatacagaaatacaatttagaattcaggtacaggttcttcttcaacgggagcaagaacccattcaccatcttcgttcttgatcagtcctttgttcttctctacccaccaagatcctggcaccaaacactcagctttcaagaactcgcatgacttgttcactaatgcaatacttctcttaaccatcagtttaaactctcctttcttcccattccatccagctacaacatgtaacatcgcctgcacacatacatggaaaaaatatgtaaaagtttctactctgtatcgtttgagtcaaatttgaaagattcttctcacagattcttacctgaagattatgccaatcccctggattccttgaatcgcttaggaacggtgacttctttgtatcgatcacaaagtttattcctatgtccacataccctaaaagtccccctgggtatcgagttaagagatcaatcgtgttccttacatggaggatctttaagttcttgtgactcattacttcgtctctgaactccttgtttcctacctgtggacaaccaaagactatagcagtgaccggaacatcatcactggaaccgttctcagctatatcataggcggccagaacagcctctgtagctcccaagctatgtccagtcaacacaatgctcggtttctcgtccttatacttcaacagaagctccttgatcttggctaacaactgtgaccgtagactcagcttagtgaatttcgattcggggtgattagaagtatagattgtgagccacccgagcatcaccttacacccttcttcatcttcactgtcactatcaaaagtcgtaccttcaactacaccaccagaaccatcctgctcgggtccgtgcagcaaggggtcagctgaagttggcctagcacccaaaacattgacccactcatagttcctgctcgttcctctcaaagctatatagatctcacggcgtcctaaagccttagaccgttcatcagacgtgacagcaatgtagccaaaccagttagactcacggtcccaagaatctcttgattgtgattggagaagcaaaccttcggggagagaaacacgagctgtggcgtagaggaagtttacaacctcgtagtcggaagcgttttcgagcatgaccttgtcgaagaaagaagatttgccgtagcggctggctccacagtacttggagttttggtcgttgacgaaggcatcgtaggtggcttgacaaaagtcgccacaacgtaagatgagttccctaagtgattggtctaatgggtctaagatagtgtcccaattctttgagcctaagagttcttcccatgatgtggttgttgtagccattagagagaaatggtgtgtgtaaggagataataagtgactcttgactcttaagttgtttaactttatacaaatggttgtggactggtgatgatgctgtctgacccacttatgtccaaagcgataaaaggttatcactggtgtgggaatattattggcatatagaattatccacaaacttgcacatcattctcaaccatacaaaaaagagtaaaaataaacccaatcaaatagagagaagaaaattcaaccaaatcaatcgatacacacgaaaagagacttattgtttgtttgcaactaatcaaacgcgacgacaggcttgtcttcgtcgtccggaatggccatgacccaatcaccagcctcggtcttgagcatgcctttgtttttcgcgaccccaccaacacccatccttcaatagtgcaaatgatttgttaaccaatgttatgtttcagttaatcactttcatctccaatatatccccctttgataacattgcatcctagacccgttaactaatatatgatgggccataataaatcaaagataattcaaagcccaaaaagtgtaaaaaagcccaacaaagtgacgatcatacgacgaacgatatcaagttaagctatcatgttcgtcgtcggtgagatttcccggcgaagcgaaagcagtgtttctccggtggttcaggcatcagtctgatttcagacaacacatctcatagtaatttgattctaactggcgatttcactctagctcgaccaattgtatccaattctcgtagctgagagca

SEQ ID NO: 13580 - DNA, 3000 bp, Unknown; identical to SEQ ID NO: 13578
  misc_feature (1)..( 3000): cDNA_ID_1807975_gDNA_ID_2214638_Annot_ID_188181 3000 nt of promoter + ATG

SEQ ID NO: 13581 - DNA, 3000 bp, Unknown
  misc_feature (1)..( 3000): cDNA_ID_2703446_gDNA_ID_2214638_Annot_ID_136165 3000 nt of promoter + ATG
actagtgatcgttatataatcaaattcaaagtgattgtaatgtattctctaacttaatttagcagttctgcttctctatgccttcttcaaaataattttccatctataagagactcttcagaatatttgtttcttttcttgcgtcattgaatattaatctgaacgttgtacaggggtctcactcagctatccctgattcacctctaggtccagacgcgtatcgagagtatgaaaccttacttgttcaggattacaatgaacatactaagaaaagcgacaaaatatctaaagacaaaggggtttctaagttctcttctgcacttgaatcccttactatggagcctattgaaagcgaaaatgtagatatttcatcaggtggtgcacaaggtttggttgtctcagttcaccacttccccttgattatttgtcctttcactcctcgagcgtttgtcttaccttcccaaggatcagtcgcagaagcgtccttgtcccgtcaacatgaggattctcttagttttggtttgcctcccataagtactggatctatgtctgacactgatgatgttcctcctggtgcaactcttaccgcacattttctttaccagctggcccttaaggtaaactaacactgcagtaaccgctttgaacttaattcacgatgttcatgaagtacgtgagctagaacactagaagatatctgtttcccttgtttgtcaataatttaatttcttctgtacgtttttcttaaatttgtgaccatgtcgtcacttttttaaaattgtagatggagttgaagttggaaatattttcacttggtgaccaatcgaagaatgttgggaagattctaacagacatgtcaagtgtttatgatgtagcgcgtcgtaagcgatctgctggcttgttacttgttgaccgcacacttgatcttatcactccctgctgtcacggggattcacttttcgatcgtatcttttcatctttgcctcgggcagaaagattttcttcacaagcacagcttaaacaaggggtcccaagcatcaatcgtccttctcttgatgttcaagtgccgcttggggaactgcttaatgaagaaccaagcaagattcgggattctggtcttcctgaaggaattgaagcttttttacgtggctgggattcatatacctctgctccacaaaatgtaggtttgtttaatgaatgtgacaagaaatctaccaccaactggactgaactactaaatggatctcttgtcgctactgaatgttttagaggaacaccttacttagaggccatgattgataggaaaacgaaggatggaagtgtactggtgaagaaatggcttcaagaggctttgcgtcgcgaaaatatctctgttaacgtgagagctcgtcctggttatgctacaaaaccggagctccaggccatgatcaaagcattgtcccaaagccagtcgtctttgttgaaaaataaagggattattcagttaggggcagctacagccgctgctcttgatgaatctcaaagtgccaaatgggatacttttagcagtgcggagatgatgttaaacgtaagtgctggtgatacgagtcagggtttggctgctcaaattagtgacctgatcaacaaaagcgctgtggcagaacttcaagcgaagaaaaacgagaaaccagattcctcatcacgagggctgctatcttttcgtgatgccctgcttcttacaatagttggttacattcttgctggcgaaaatttccctacatctggctcaggtgggcctttctcttggcaagaagagcattttctaaaagaagccattgtcgatgctgttctggagaatccatcagcaggaaatctcaagtttcttaatgggttgacagaagagcttgagggcagattgaatcgtctcaagtctgaggaaaccaaagaaattccctctgatgatcaattagacattgatgctcttgatgatgatccatgggggaaatggggtgacgaggaagaagaagaagttgacaatagtaaagcagacgagtcctatgacgatatgcagctgaaactggatttgcgtgatagagtagacagcttatttaggttcctccacaagttatcgagtctaagaacaaggaatctaccattaagagaaggctcattggcttcagagagcagctttcctggcgagccttctggaaacaaagggctagtctacaggcttataacaaaagtgttgagcaaacaagagatacccggtttagaataccattcttcaactgttggaagatttattaaaagcggatttggaaggtttggtcttggtcaggttagttagacctttctctctacccatgactttcattttcctacacaagatatacattaatgtttggcaatgctattgcaggcaaaaccaagcctggcagaccagagtgtcattcttgtctttgtcattggaggtatcaacggtatagaggtgagtttcttcatcacaaaagtcacctcgcattcacgttgtagggctatattttttataactgtctatgtttcctccattgttaaggttttggaagctcaagaggctgtgtcagagagcggaagaccagacattaacttggttattggaggaacgacacttctaacccccgacgacatgtttgagttattgttgggacaattcagccatttttgatatcttgcaaactgacctcactctcataatctctgttgttagcttgtaacattagaagaaacagaaatacccatgaataaattaatgatcgaatgttaaaatctacaaaacaatagttccattttcaagagataagaaaagattggttattaattgtgaataagagatttttcaaaaaaaaatctcaaattatttatatctttggtccctaaagttttataacatttacagaaaagcttttaagttaaaaatcagaaatctccttaaacccccaaaatcacatttcacacgaaaaacctcgagtgagtgaagaaaca

SEQ ID NO: 13582 - DNA, 3000 bp, Unknown
  misc_feature (1)..( 3000): cDNA_ID_2713856_gDNA_ID_2214638_Annot_ID_136168 3000 nt of promoter + ATG
aaacacatcagattttaatgcccaaatttctctcattttcttgcttcgaaaccaaatattcaaagagagcgagagagagagatagatcaagaaagaaagagtgatgcagaagcaagagttcttggaattgttcaaggccgcacaacgagcggctaagtatgcgagtgatgagaattctccagaggtctcgaggtgtatccaattcatgaagcgtttgaaagaagctcctgcatctcttgattgtgacgtggtcgttaacacaaactccattggaaacggaatccgttttctccgagatcacaaaaaccccctaattcgatctgaggcagaacttctttcagatctttggctcaagtatctttacgccaccggtagaaaacagaagtcgacagattctgtttagttaaacagattcagagaaattcagattcaggttttgaatgtaactgtattaatgtgttagagacttgggtttgaatgtatatgacattatattactgcttcttaatatggcagattttgaataaagaaaaggtttcacgagagaagattagaacactaatatgtatgacaaaagctttcttcttgattcaatgaagtcacactcatttcaaatccataaataataaagcttacttaagtactatagttggttaaactcacaataatatgacaatgttttgctactaatcacatcacttggatcagttattttttgttaaaaccttgacttggatcttacactttgatgacgctcttggaagcatcataagattcctcatttccatggtggtttgcaagttattactgttgtttaccacgcaaattttcactagctcaagacacggtaacttctccaagaaatgcttcatttgattcagctctcttgtcgttccttgatagctcaatatctccagcaccttcacttgagatgatgataggcaagaggttatgctctcgtcggtatcatagcaaacacatacatccccacatctgtttgttatgtagtgatcgagaccctgaagcataacaaagaaaaagagtaatgttaacgacctaccaatatatatatggtgtttaggatgtgtttgtgacatgagataccatgaagatgagggtttctaggtttggagagttcttgatcagaagtggcagcatttgccatcctcttgccttgtcattcccaatagatagactaacaaggctgtcgaacaatggcatttctttacatgagaaataaagcagcttcaacaaaacacaatgtgttagtctgttgtcactcaataacacaaaagttgaaataaatcatcaaaagccccaagtgaatctcattctcgataagcaaaaaaaaagaagaatgttatttataaggaaagaacaatatatagaggaggctgacctctagagtgtggctagataagtgaaggattctaacatttctgattccattgatgagatttctcatatcagcgggaatggaaccgagagatccatttcttactcccaccattcttgtttcatccatccgaagattgagtctagcttcgatgagggaatccaacttaacattaggatacttacccaaaacataaccagagtgtttgtagtagataagattaggagcatctaatgaaatactagtaaacttgcgatcaaatcggatgtgtagtctctttagagatggagaagacacggaacaagtccaatctacacatcgccgctcctcaacaaccagttcttcgagaacaggacagcgagatataagagttccaacaacattatgacctccaacaaaattaactgagtcaagacataatgtcctaagcaaaggaagagaaacatcttgagaaagcttgattgtaaaaccacgtcctactctcagcttaaccaatgtcttgctcttaaagatcattgcaggcactggtggagattttccttttaaagtaatgaacacatcaagatccataacaccatggtcaagaacgttgcaaatccaactttgaatgcgagatgaatcagtgccacctcgaacaccaacatgactctttagagtgagcttctttatagaagaaccacgttgcgtatctagcaatttgtcaacgaaagccatgtaatttctgtgaatctcaatccggttttgcttagtcttaggcacagattgacgatcatcaatatcaagattggaaaccaaaacaaacatgttcttccacctcttagagagtactgaggttgaaacagcttcttttgtggagataagagacagaatacgcccaagaacctcatctggtagacggctgattacatctttagcattcattgataccaaaaccttaaaaccacagcaattggattcagaaacagtaactagacagagttgatgagttcaaaggtctgttctttttcatacaatgcaaagtctaatacaaaagttatcatgtatctcttcaatcacattgattaccatagaaatgaaaaagacgaaacagagcagacaacataccttgctaaagtgctacttgctacagagtcgtgaaagctctccactttcaataccaatttaatcgtgagatcaaaagtgaaaacatcgaatactagggttttggaaagtttaagagaagagacgaagaaactgaaacaacttattataagcaatttcctccatttccacatgaggaaagagtaaagcagaaagactgatgaagaaaaggtaagtagtctgtttgggaaagaaagtcacgtgagagaagcgtgggcctttaagggtaaaactgtcatttaaatagtcgccgttctttacacttaggattagggcttctaacatttaaatagtcgtttcgttctccgtctctcctttcccgtcggccggtgataatttcgcaacccaaattccaaatggtaagtttcagttcttggatttgtatgattttgtaatgtgaatagggatttgaagatttacttacttttgaaattcaggcgtcggagaagaagctatcgaaccca

SEQ ID NO: 13583 - DNA, 3000 bp, Unknown
  misc_feature (1)..( 3000): cDNA_ID_2703454_gDNA_ID_2214638_Annot_ID_136169 3000 nt of
cccaccattcttgtttcatccatccgaagattgagtctagcttcgatgagggaatccaacttaacattaggatacttacccaaaacataaccagagtgtttgtagtagataagattaggagcatctaatgaaatactagtaaacttgcgatcaaatcggatgtgtagtctctttagagatggagaagacacggaacaagtccaatctacacatcgccgctcctcaacaaccagttcttcgagaacaggacagcgagatataagagttccaacaacattatgacctccaacaaaattaactgagtcaagacataatgtcctaagcaaaggaagagaaacatcttgagaaagcttgattgtaaaaccacgtcctactctcagcttaaccaatgtcttgctcttaaagatcattgcaggcactggtggagattttccttttaaagtaatgaacacatcaagatccataacaccatggtcaagaacgttgcaaatccaactttgaatgcgagatgaatcagtgccacctcgaacaccaacatgactctttagagtgagcttctttatagaagaaccacgttgcgtatctagcaatttgtcaacgaaagccatgtaatttctgtgaatctcaatccggttttgcttagtcttaggcacagattgacgatcatcaatatcaagattggaaaccaaaacaaacatgttcttccacctcttagagagtactgaggttgaaacagcttcttttgtggagataagagacagaatacgcccaagaacctcatctggtagacggctgattacatctttagcattcattgataccaaaaccttaaaaccacagcaattggattcagaaacagtaactagacagagttgatgagttcaaaggtctgttctttttcatacaatgcaaagtctaatacaaaagttatcatgtatctcttcaatcacattgattaccatagaaatgaaaaagacgaaacagagcagacaacataccttgctaaagtgctacttgctacagagtcgtgaaagctctccactttcaataccaatttaatcgtgagatcaaaagtgaaaacatcgaatactagggttttggaaagtttaagagaagagacgaagaaactgaaacaacttattataagcaatttcctccatttccacatgaggaaagagtaaagcagaaagactgatgaagaaaaggtaagtagtctgtttgggaaagaaagtcacgtgagagaagcgtgggcctttaagggtaaaactgtcatttaaatagtcgccgttctttacacttaggattagggcttctaacatttaaatagtcgtttcgttctccgtctctcctttcccgtcggccggtgataatttcgcaacccaaattccaaatggtaagtttcagttcttggatttgtatgattttgtaatgtgaatagggatttgaagatttacttacttttgaaattcaggcgtcggagaagaagctatcgaacccaatgagggacattaaagtgcagaagctggttctcaacatctccgttggtgagagtggagatcgtctcaccagagcctccaaggttcctcctgttttttacccattctctgtggttttcactcttgttgtcacttggttataatcgattgattcgtggttacttggtaggttttggaacaattgagtggtcagactcctgttttctccaaaggttagattttttctcatatttgaaagcttacaaatagtctggttgatagatttagtaatctagaagaatttgggaaacatagtttagttaagtctatgaatgggtgcatggtttgatgatgaatttgagattttggaatccagtaagtcccttatctggtggtttgtgataacttgataagcctaccagtccaaattaggagctgttcgtttccccgcttctgatatagttgcgttgtgcactctgttttatatgcatcgcttttggtttgctctgagagacatgatttggtttagcttcttccattgcaattttcaagaacccttgttatgtgtggcttttgcagctagatacactgttcgttcttttggtatcagacgtaacgagaagatcgcatgctatgtaaccgtcagaggtgagaaggcaatgcaactacttgaaagtggattgaaagtcaaggaatacgaacttctcagaagaaacttcagtgacactggttgcttcggttttggtattcaagaacacattgatttgggtatcaagtaagtcaatccccttaaatcatcctgtcataacacttggggttcaccacattcttggtgatactcattgatctttgtttcacttcttataaaggtacgatccatcaactggaatctatggtatggacttctatgtggtcctagaacgtcctggctaccgtgtagcacgtcgcagaaggtgcaaggctcgtgttggtatccaacacagagtaactaaagacgatgcaatgaaatggttccaggtgaaatacgaaggagtcattctcaacaagtcccagaacatcactggctaaaacaattcctcctaactctttcttctgttttagaaaaccctgtctcagttttgtttacttgtctgaatcttaatctttgtactttatatgcattattggctttagtttcagttatttaagtatctaatttcgtgtgaggataagcaagataagaaaattttggcgggtagttgaagcgtgtggagacatataaatccactagctgacacgtgccacggacggctaagcacgctttcgccgatcgccgatcgccgctagattcatctcggattcctccaaataagcttccctggttcttatcttgccacgtcagcatttctccctcgtacgccttaaattcttcacaaaaataataaaaatattaattcaaataaatgttcatcttctcctacgaatgaaattgaaattaatttgagcgatcggaacaggatcgggtcggatcttttgaagttcttca

SEQ ID NO: 13584 - DNA, 3000 bp, Unknown
  misc_feature (1)..( 3000): cDNA_ID_2703461_gDNA_ID_2214638_Annot_ID_136172 3000 nt of promoter + ATG
tggactaattacgtgtggacccttttgctgcacaacacacattaacacacaagtaacaagtgcaatcaaattcaaatgtcagactcataaaagtcataatacaccattagaattgttgattaattacttgttctttccgttatacaattcaaattgttcataaataagaaatttttatatgatgcgtacactgtaaagtatatgatgtattcaaaatttattcttattattcatttatatatttacaacgtagataaaaatacatattactccaaggttcattttggctcttccaaggttcgaatatctttagatgcgtgtggactcaaagggagcgtaggaaaagagtggagccatcataaataaacaaatactaatatttagaagcaactcgttataattatttagcaattcttttcatatttaacatgtggtaagacatttccatcctatacctaaaagtgaccaacctctctgcaccttaatttgatatctctcaaccacgaaaccaacttacaaaataaaagagttgttggttagtcttacgtacatatacgattctctacttctctttcatatatgtaatctatcaacatgtaatagtgaaacacatatacagtcaatcaaggcgtccacaatataaagtatatctggagattagttttcttttggaattagttctttggttgtaagaaaataataattgtagcaaaccagattatcggggtcgggattcatcattttttatagggtaaaaaatcaatctagtggtttaatggttatttttaaattaaagtagccgtactatatatctcaaaacataaaaatcaagttgtttctcagtacaacaaatatacaatttaaacattattaagcctaaaattaaaacaataatatctaaaatacggaatacggtaaataaaggcatttgaattcataaaataaatggtggaaaaatcaggccaatcactgagaataaaattaaaaggttaagtcataagattcaaaagtttaaagtaatttgttactgagagttaaaatgataaaaattcaaaaattatacagtaacttctcgaaactaataatcccaacacccacaagtagttgaactcaagaaaaacactcaaactaaagtttttagaggagatagttttccatgagtttgatcagagtaacacattagttgtgcgatactcaaagaaaggaaggagtgaggatgagaagagccttccatagtctcttggtaaacagtaattttgtatttgaaacctttcagaatgatatattatcactcagcgaggctgaagaatacaaatataaatgtaactacttgctcatagttgaagataagtagaagttccaaaacacagaacccatggacatgaacgctactcgagcttgaagcgggactaccctgtaaatttcacctttcatcagacctcaatcctattatacataatcacacaatctataaagaccctctccaaatgacttaatgatagagaaagaaagccataccaaaagttaagtatgctaacgggaacccagaagcgaaatcctgcagtaatcccaagaacagtaaatatttgaacgatgctatgtaatagtaaaaaaattactctctgtaattggtagctcaccataaagaagcgtaggaagagcatctttctgatacttgtttccaagctcagagagctttcccagccacaagttgttccaagcaaatataacagcaatcacagatggaccaaggattacttggttaagcagaacctaacatgggatcagtataagcagtaaaaactatatcacaacgtgttccaagtacaaattaacaaaacacgcctagatttgtaccttaagcactagatttgtcgcagttggtttaggcaaagaatgatcaaggaattggtaccacgcataagaaccaggaccatacaagagaaacccgtaagaactcatccgcagcgcacgaatccagtcatgttctgagaaaatgttccacaattccccctaagtaaaacgatccaatcataaatccttagtctcaagccaagttccaccaatgtacgagaccattttgcaagagagtaaatatgagtcaccccaacaagaattcaaatcaaacataacctaaccaaagactgtcactactcactaaacaaccatactcaccaacatttttggttatgcaaagatccagtttcagtagaattctcactataccacactaggaacttgattcatgtaatatttcaaacaatcaaaacattcactaaaacctctaaaattcaaatctatgactcgaaaataaccaaaacttggtcagagacaaacctcgtcaagctcagaagatgattgtttaagagcggttctctttttccatctccctgatagctgagcaatcgtgtcaccggtgaaagtgagtgctccggccgtcacagcttgcttcaaaggaaaccgataaccgccggcgtctctgctcacatcgacggaatccgacgatccagaattacgtttcttacctctatcaccggaagacttcttctttctccgttgatcgaagccattccatccccagaaaccaccagcgccgccgcaaccacccaatgcgtccattaaaaatgcttccttttgcgtcgaaacagagaagagttttgcctaaatcttaaaaatcgcaaatgagtcctgtccatttgttttttccggtttggttcgattccaatttattggatcttgggttttcggaaacaggtcaaaagtcaaaccaattctgaaccgaacgaatgttatcaaactgaaaggatcaaaccaatttattggatcttgggttttaatcagtattatatctttttgaggtctctatatttatttcactgaatttcgatttattttgttcagtccatatgattcggtataagaattaatctatagtttgagttaatattcggttcatttattttgatttggttcggttttatgcttagtgtacataaaacg

SEQ ID NO: 13585 - DNA, 3000 bp, Unknown
  misc_feature (1)..( 3000): cDNA_ID_2713852_gDNA_ID_2214638_Annot_ID_136173 3000 nt of promoter + ATG
ctcattgaaaagcctcgtacacctcgatctcagctacaacaagctcacaggtaaaatccctctgcaattagggaatctaaataacctcgttggcttagatttaagctacaattctttaaccggtacaatccctccaacgatctctcaactgggtatgcttcagaaactcgacttgagctcaaattctctcttcggaagaatcccggaaggtgtagaaaagcttcgttcgttgtctttcatggcgttgagcaacaacaaactaaagggagcttttccaaaaggaatctcgaaccttcagagtttgcagtacttcataatggataataacccaatgttcgttgctctccccgttgaattagggtttcttcctaaacttcaagagctccagctcgagaattctggatattccggcgtaatcccggagagttacaccaaattgacgaaccttagctcgttgtctcttgctaacaacagattaaccggcgaaatcccatcagggtttgagtctctgccacacgttttccatctgaatctcagcaggaacttactgatcggcgttgttccgtttgattcaagtttcttaagacggttgggtaagaacttggatttgagcgggaacagaggattgtgtctgaatccggaggatgagtttagtgttgtcaagaccggggttgatgtatgcgggaagaacgttagtagtggtggaggtttatcggtgcattcatcgaagaagaaatctcaagcttctcggtattacagatcttgcttcttcgccaatgctctgtttccgtttgctctgtttctaggtttacatcaacgatgggttctctaagagtgagataaagacaaaacagacagagaattaaatatttatcaaatccctaaaaaagagagaagaattgtgtttgttcccaaagtagaccgatgatttctagggaaataaattaatagagtcgattttgatgtgtattagtttcctattaaagcaatgtacgttaatgttgtgttttttttttagtttaataataatactagtattttcagatttttatatgattgttaataaaattatttcgagtcatccataatggtcctgaacaacttcatagccgtgtgtataaatatgtgtttgtatacaaaagagaaaataacaaatgaaatgaaacgacgtttttgttttctattgggtaagaattaaatttctagtaaatctgttataaaatttacatacatagagtgtaataaacaaaaataagggagcagtttggacaaagagtttgcagtgagtctgataaaacgacacaacctgattcaagtctaaccatgcaactaaattgaagacctagaaaaattaatgttaattgagtttcaactaaccatttcaaatttgtgttaagctaatttatttatcttaatcaactaacgtaatttgtttttaaactgctatttgctaaattcattatgtaggagtagccgagtaggaccctgaatggtacgctcaaaagaggtagcagcgtcatcgaacttaacgttaggacaccctatgattgatcgtatcaaatgaccaaaattaaaaagatgattgagtaaaccaattaattttggtatataaacaatctttttattatcgtacacatttttgggatgtgatgtgactaatgaaaggtttaaatatatttaaacatgataaacgcagaaaccaccatatagaggagaaactagaaaaatataatttgtcagtcatgtgtctaaatccacacctacttttttctcatgctttttttcttcctgcaaatattgcatttcctttgcctctctcacacatttcctctgtcactttcttttttatatatttttatttcggaattccattaccgtgaaaaagctttgtttacaacagtaattttgtttcaaatgctttcttgttgtctatttttatcaattactatgcctctgcttgaataacttaaaaacacaagtgatgttaattgtgttattgtagatcctatgaacaaatttaatttatagacgtgtgaagttataaatgaaagatatcattgagtgagtgatcaccgttgcagataatgtttaaagaaaaaaaaaaggaacagttccttgttcatgtcatcatgtgttgaaaacggaaggagggaaagaaaaatctatcactctcagattcagagcctcacgtggggtaaacttagaattctatttttaggtacgaatcaaaatatacgacccgtcgcttttaacatgtcatttattatacctttcactctcatttcctccatgctttttttttaaaacgtaattagacctattcattctccataatataatacataaatacaacttataagattaatagcctcgtacactaacattaaagagtaaataaccgtttgtattttccatcttttgattaatgataactataatttatgaagaacatccataaactcatgagttttattttgaacgcaacatccatatttagctttacattcatttttttaataagatttcagtcatagttcgaaaaatgaatgttgggttggttccgatggtaaagcgagccgtatcaacaaaaaaggcccaaataaaaagtggtatactgttgggcctaaagatgaatatacagaagcccatattaagacaattcggcccattcagcattgcgtagcaatcgaattgatatttagcaaatcgaggaaagcaattgactaactagataatactgataagtgggtcccacataattctgacagcttagagatggagaagatcatcaccgttagtccaagttgggtcaataaggcttacgccgttggatatcaagatatccgttagatcgcatacacgtggatactgttcaatactcctgaccgcaggggataagacacgtgttatattaacgaagagtaagaatggtttctaataatttcttcgctccctttcttcttcttctctccttctttgaattttgattttggttgaatg

SEQ ID NO: 13586 - DNA, 3000 bp, Unknown
  misc_feature (1)..( 3000): cDNA_ID_2703469_gDNA_ID_2214638_Annot_ID_136175 3000 nt of promoter + ATG
gtaatatatatatgtaagaaagatgaattatgtaaagattgcttttactagccctgtgacaaaaaatgttaaatctttatcaaattgaacgatgattgataattgaaatttaattttaatgaaaagaagtagtatataaatgggtaagaaagagagatttccaaattaaaggacaggtgatttttactcaagtatcataatcaaattgtgtatacgtccaatctcattaattagtgcataagttattgatcactaactcttgtgaaaaagaaaagaatcttttgttttgacgaaaacatattccaaataccattcatagggatactaaacccaagactttggatttcccttcatcagaaattttccaacgtttactttgagatattttttttcttcttagaacatataataaataggttcatgaaaacgtaacaatgcgttggagattctttacctggcttgttgccttaactcccacaaagattcttttgcttgaagaaatttcaagcttttgtgtatatatccaacgtcacagtgctaaagacgtttgagaaagtttctgttgaaagaagagtaaaaactcaaaaagaaaatgggtttcattattgcgattgcaaaacgttttgatgctctagttgggtaggattttattcaaattctgtctcatataataaaaataaacactatatttgtcaaatttttaacattattttcttcctttttcttgttgcatgcaggcctggagtcatgcttctctatcctctgtaagtgatatcaaatctgaatttaaatgtttggtttttacaaatgcaacttgatagttaactgaataaatgattaggtatgcatcatttcgagcaatagagagtccaacaatgttagatgatcaacaatggcttacatattggatcatttactctttaataacgatattcgagctatccgtttggagagtccttgcctggtaattacaatattattcactaaattctgttacgaattcaaaaatttatgcctataaagacaaaaaaatggtgttcttttgcatattgtaggctaccattttggccatacttgaagcttttgttctgtatgtggttggtgctaccaatgttcagtggtgcagcttacatttactccaattttgttagacaatacgtcaaaattgggatgaatgttggaggaggaacgaattatacagacgaacaaagaagagttttacagatgatgagtcttgatgctagaaaatcggttcaagactacgttgaccggtttggatgggattctgttgagaaagcaatcaaagcggtatatgatttctcttgttgatctttaatatagttatgtatatataatccaatacatatattctgggagtttaacttcattatttgtgttcaaatgtaggctgaaaaagaaactagaaagcattgagatggaagatcaagagtcaagaaaaacattactctttggtttgtacatgtatgtacatagattgtatagagcaatactataatgaaaaagatatatatgtttgaaagatttatggtgacaaatttgtgttctagtactctatgaccaaagatactattagagaagccagtccaactctttttgacaacatacatttggatgggtctcaatttgattaaacaaaacatcaggacacgattcgaattaaaatgagaatacaacactctttttgacataaaaataaaaataaaattcaagctcgcgctatatcacaattggtgttttgctaatttcctaaatctaattttattctaatttaattatgtaaaataataaaatcacatctttggaagtttttaaatgtaattcatataacgacaaaaaaaatgtaattcatatgacgtaaaaaaaatgtgattaattttgttagggtcattaatctatattctatactttaatactctgagatccgtgattattattatttgtccatctctatccacaaaccatacataaaaaattgatatatgacgtcagaaaaagataatacaagtctacatatctcttcgtccatttatttaatttaattggtaaagaattgagtgcgcaaaattaataatttccaatttatcaaaaaaaaacacattaataattttattttttattttgttcaacttaaaaaaagaaaagaacacacattaataatttccaaaaacccctcttttctcatagattgaagcgtatactctaatttgaccaatctaatctagggtttctagtcacttgaagcttctcttaaaaaacctgtctcactcctcgtcaacctcttcctctcccgctgtcgccaagattgaatcttttttcaggtttgaatctatctttagagtaatgagtttctctgatttcccgacaaaacatgtcttaaacgctggcttccttctgttgttgtccagttctgctttcctcttatctgggttttaatagatcctttcacagaatttgtttgtaagtgatatattttttccacttgtcacggccacgattctgattattcttctaattcgttgttgagctgttatgaaaacgatgcagaatttgaaagttcacaactttttgcttcttatctattcgcttaatgcttttttatctgttatgtttcgtgttcttagctggatttagttatgtgcgtttttcaagttcattaatgtgtaggaatgtttttctgtgtgaatgacttctcttcctcctatgtatctcgttgcatgactaaagtcagtggctgtattacgaaaaatctatactttatttaggttgagtataatttcaatgtctaaagctcttaaactagctccctgttaagtagaaaacttattgatgaggaattggccaagtgattatgattattgctatcgtgcatttgggcatgactgagataaaaccttaactttacatattttctgtcaatcagttgtggcttcaccggataataaggaattcagtaagagataagttcatcctgacaacatg

SEQ ID NO: 13587 - DNA, 3000 bp, Unknown
  misc_feature (1)..( 3000): cDNA_ID_2994546_gDNA_ID_2214638_Annot_ID_136177 3000 nt of promoter + ATG
tcaacagaatcccatccaaaccggtcaacgtagtcttgaaccgattttctagcatcaagactcatcatctgtaaaactcttctttgttcgtctgtataattcgttcctcctccaacattcatcccaattttgacgtattgtctaacaaaattggagtaaatgtaagctgcaccactgaacattggtagcaccaaccacatacagaacaaaagcttcaagtatggccaaaatggtagcctacaatatgcaaaagaacaccatttttttgtctttataggcataaatttttgaattcgtaacagaatttagtgaataatattgtaattaccaggcaaggactctccaaacggatagctcgaatatcgttattaaagagtaaatgatccaatatgtaagccattgttgatcatctaacattgttggactctctattgctcgaaatgatgcatacctaatcatttattcagttaactatcaagttgcatttgtaaaaaccaaacatttaaattcagatttgatatcacttacagaggatagagaagcatgactccaggcctgcatgcaacaagaaaaaggaagaaaataatgttaaaaatttgacaaatatagtgtttatttttattatatgagacagaatttgaataaaatcctacccaactagagcatcaaaacgttttgcaatcgcaataatgaaacccattttctttttgagtttttactcttctttcaacagaaactttctcaaacgtctttagcactgtgacgttggatatatacacaaaagcttgaaatttcttcaagcaaaagaatctttgtgggagttaaggcaacaagccaggtaaagaatctccaacgcattgttacgttttcatgaacctatttattatatgttctaagaagaaaaaaaatatctcaaagtaaacgttggaaaatttctgatgaagggaaatccaaagtcttgggtttagtatccctatgaatggtatttggaatatgttttcgtcaaaacaaaagattcttttctttttcacaagagttagtgatcaataacttatgcactaattaatgagattggacgtatacacaatttgattatgatacttgagtaaaaatcacctgtcctttaatttggaaatctctctttcttacccatttatatactacttcttttcattaaaattaaatttcaattatcaatcatcgttcaatttgataaagatttaacattttttgtcacagggctagtaaaagcaatctttacataattcatctttcttacatatatatattacctttttcttcattagtattctatttgattatgattattttgtcataaagctagtaaattaaacactcgatatgagaattatattacttcacgctaattaactcttaacacaacaagaactagtgcatattcaactttcaaagcatatactatatattgagaatatagaccacgaaagtcaatcaaaagacctaccagctctcatcaagttctttcttgaaatgattttgcagaatttccaacttaattaattcgacatgaatgtgaaaatgtgtgttgctcgttaagaaaattgaatagaagtacaatgaaaatgatgaggaatgggcaaaacacaaaagagtttcctttcgtaactacaattaattaatgcaaatctgagaaagggttcatggataatgactacacacatgattagtcattccccgtgggctctctgctttcatttactttattagtttcatcttctctaattatattgtcgcatatatgatgtagttcttttgtctaaattacgtaatatgatgtaattaattatcaaaataaatattcaaattgccgttggactaacctaatgtccaagattaagacttgaacataagaattttggaaaaactaaaccagttataatatatactcttaaattgccatttctgaacacaaccaaataataatatatactatttacagttttttttaattggcaagaacactgaaatcttattcattgtctcgcttggtagttgacaagttataacactcatattcatataaccccattctaacgttgacgacgaacactcatataaaccacccaaattcttagcatattagctaaatattggtttaattggaaatattttttttatatataaaatgccaggtaaatattaacgacatgcaatgtatataggagtagggcaataaaaagaaaaggagaataaaaagggattaccaaaaaaggaaagtttccaaaaggtgattctgatgagaaacagagcccatacctctcttttttcctctaaacatgaaagaaaaattggatggtcctccttcaatgctctctccccacccaatccaaacccaactgtcttctttctttcttttttcttctttctaatttgatattttctaccacttaattccaatcaatttcaaatttcaatctaaatgtatgcatatagaatttaattaaaagaattaggtgtgtgatatttgagaaaatgttagaagtaatggtccatgttctttctttctttttccttctataacacttcagtttgaaaaaaaactaccaaaccttctgttttctgcaaatgggtttttaaatacttccaaagaaatattcctctaaaagaaattataaaccaaaacagaaaccaaaaacaaaaaataaagttgaagcagcagttaagtggtactgagataataagaatagtatctttaggccaatgaacaaattaactctctcataattcatcttcccatcctcacttctctttctttctgatcataattaatcttgctaagccaggtatggttattgatgatttacacttttttttaaaagtttcttccttttctccaatcaaattattagggttcttcagttaatccttataaaccatttcttttaatccaaggtgtttgagtgcaaaaggatttgatctatttctcttgtgtttatacttcagctagggcttatagaa

SEQ ID NO: 13588 - DNA, 3000 bp, Unknown
  misc_feature (1)..( 3000): cDNA_ID_2992072_gDNA_ID_2214638_Annot_ID_188205 3000 nt of promoter + ATG
taataatttaaataatcaaataattaattattagtatatactataacattatgggccctaatcaacatttaaaatatgggctttaattacatgttagaaaaaccactattattttggtcttaatatgtcggaacttattttgaaatatagtagtagtatatgatagttggggacaaggtcaacaaggatgcaacattgaacattcgatgagaaaatttagtctgatactcaactttatttctcatagattcatctctcgcattattatgatcaacttgtaagaacaaattctaggacggacttaaaaagtcacaaatacacttatgatgcaaatcagaaatgtaaaacttggagttgttactttattttaaatacttttgctgttttctgaatgactttttaacatgtaaactgaataaataaaattcatcacatttacttattctaactatttctgacattctcacatttattatccgataaatttaattgaaaaatagtttaagtcaaaagtcacataaatttttcattaacggatttgcattttgtcaaagtgatcagttacaaaacaaaacaatgttgaggttttattggtatgtgatttatatcatactagtattacaactcgtgcagaattttgtattttcataaaattaaattgtgatttttttttatcgaagtctattatggacctaaaacaaatctagagatgtgtttaaaaaaaaaacaaatctcaatataatctctatatatgtaaaaaataatcactctatcatcacaaatattaggaaaataatatattgacaaaacggttgggaaaaaaacacttaccaattaataatgcatttaatttcttcaaaactaaaaatcgagaagtacattcatttttaccaaagagagaaatacgtattaccaaagagagaagtacaatgatagatatatgtttaacagtttatgtacctcatgttaggggatgaaactagtagtttatgtacctcatgttaggggatgaaactagtattgttattgcctctttctggttttgctcgatgatccaaaacggttatgttttgtattggcactgtaccttcaggacatttggcggtactgacgtgtgcctctgatgttcgccattcacttttcttgctagttccagtcattctaggaatcataagtaatcgagcaacaaaatttaaaaagtaaagaaacaaaatttaaaaagtaaagaaacaaacctgtatcttgagatgtattaaacgaggatgggcaaaagctggttggttatgtttggggaagcaaatgacaagatctccatcggaaacctgttaaaatagatttcaaacatataaaatactttagtaaaaatgtaaaattttctcctggtgaattacctagcttttttttttgccatccctctacccttatatttcttctatattacaagccactctcttattattttttatttttttttgtctttgtcagcagttatatagtttactttcgaacaagtaaattctttttgcaagagatttttctctacattacttacgttgaaatagtaaaattgttactggattttacaatccaaattaataaaataaaataaaataaaaaccaatacaaaaattagttccggtaaaggccataattagatttggtttttgtggtcggccaaatataaacaaacaaaaattatgtaaaacataagtagagtataagcaaaagataagcaaatatacaatttgttaacgttttctagtattttatctacaagatgaatcaaacttgtctcggctatgtacttaaaacaaattgaacttcatcatatttcaaggccgttgagtttttaagatatgtacaaaattttaacatctaagtttggtccatcatgtgaactaactatgaaatctaatttggtccacgatatgagttatatgttcacttgaactaaatagaaaaggtgagtaacaacatgaaattgaaaacataaacttgcttcactatgtaaactaaattgatccatagtgtgggagaaaccaaactatgatcatgcatgcaaccatgactgtaccaggagacagactaattattagctggtttattacatttgacaacaagtctctcacgcgtcagagacaacgtgtcaacgtggagttaaataatcggatacagtgtgagagaaactaaactatgatactccttctctccccttctcctccgtttattcgtttcaggatcactctatcttttccagtttagagcgtaaaattctctccgtcacaattcatttagggcaaaatagttgtgtgtataagttttaatatagacgaaatattgaacccattacctttttttttttttttcacaattgaacccattacctatgcgaagaaaacatgaaacagtggggataaagaaggagtggttttcgaggacccgtgatattcattttttttttttttcatcacccgtgatattcaaactcatcatatttatacacacagactataaagagaaacagactataaatagaaacatacattattttgataagttttggaatattcgacaacagaaaattctctctatgtgtgtccaattatattcggtttatgtaggtggtaatttagtaattaattaccagtttaccacacagaataatggtcttccagtcaaagtgattgtaatgtgatttatacaaatacattttgatattagtatttaatttctccaacatgaactttgcattaaatttgatatattcaagtatagtaattttttttataagtattcaagtatagtagttttaagattctttctacttaaagaagataataaaaagaaatgaaaatctctctttaccaaaataacaaatttatttatggaagatctacttactgtaaaataaaaacagaggataaaaacttgaaactttccaagaaaaatagtcctataaataagactttcacgaaaacctaaaagataatagaacctatg

SEQ ID NO: 13589 - DNA, 3000 bp, Unknown; identical to SEQ ID NO: 13587
  misc_feature (1)..( 3000): cDNA_ID_2994546_gDNA_ID_2214638_Annot_ID_188198 3000 nt of promoter + ATG

SEQ ID NO: 13590 - DNA, 3000 bp, Unknown; identical to SEQ ID NO: 13586
  misc_feature (1)..( 3000): cDNA_ID_3030920_gDNA_ID_2214638_Annot_ID_188195 3000 nt of promoter + ATG

SEQ ID NO: 13591 - DNA, 3000 bp, Unknown
  misc_feature (1)..( 3000): cDNA_ID_3436496_gDNA_ID_2214638_Annot_ID_188192 3000 nt of promoter + ATG
cgggattcatcattttttatagggtaaaaaatcaatctagtggtttaatggttatttttaaattaaagtagccgtactatatatctcaaaacataaaaatcaagttgtttctcagtacaacaaatatacaatttaaacattattaagcctaaaattaaaacaataatatctaaaatacggaatacggtaaataaaggcatttgaattcataaaataaatggtggaaaaatcaggccaatcactgagaataaaattaaaaggttaagtcataagattcaaaagtttaaagtaatttgttactgagagttaaaatgataaaaattcaaaaattatacagtaacttctcgaaactaataatcccaacacccacaagtagttgaactcaagaaaaacactcaaactaaagtttttagaggagatagttttccatgagtttgatcagagtaacacattagttgtgcgatactcaaagaaaggaaggagtgaggatgagaagagccttccatagtctcttggtaaacagtaattttgtatttgaaacctttcagaatgatatattatcactcagcgaggctgaagaatacaaatataaatgtaactacttgctcatagttgaagataagtagaagttccaaaacacagaacccatggacatgaacgctactcgagcttgaagcgggactaccctgtaaatttcacctttcatcagacctcaatcctattatacataatcacacaatctataaagaccctctccaaatgacttaatgatagagaaagaaagccataccaaaagttaagtatgctaacgggaacccagaagcgaaatcctgcagtaatcccaagaacagtaaatatttgaacgatgctatgtaatagtaaaaaaattactctctgtaattggtagctcaccataaagaagcgtaggaagagcatctttctgatacttgtttccaagctcagagagctttcccagccacaagttgttccaagcaaatataacagcaatcacagatggaccaaggattacttggttaagcagaacctaacatgggatcagtataagcagtaaaaactatatcacaacgtgttccaagtacaaattaacaaaacacgcctagatttgtaccttaagcactagatttgtcgcagttggtttaggcaaagaatgatcaaggaattggtaccacgcataagaaccaggaccatacaagagaaacccgtaagaactcatccgcagcgcacgaatccagtcatgttctgagaaaatgttccacaattccccctaagtaaaacgatccaatcataaatccttagtctcaagccaagttccaccaatgtacgagaccattttgcaagagagtaaatatgagtcaccccaacaagaattcaaatcaaacataacctaaccaaagactgtcactactcactaaacaaccatactcaccaacatttttggttatgcaaagatccagtttcagtagaattctcactataccacactaggaacttgattcatgtaatatttcaaacaatcaaaacattcactaaaacctctaaaattcaaatctatgactcgaaaataaccaaaacttggtcagagacaaacctcgtcaagctcagaagatgattgtttaagagcggttctctttttccatctccctgatagctgagcaatcgtgtcaccggtgaaagtgagtgctccggccgtcacagcttgcttcaaaggaaaccgataaccgccggcgtctctgctcacatcgacggaatccgacgatccagaattacgtttcttacctctatcaccggaagacttcttctttctccgttgatcgaagccattccatccccagaaaccaccagcgccgccgcaaccacccaatgcgtccattaaaaatgcttccttttgcgtcgaaacagagaagagttttgcctaaatcttaaaaatcgcaaatgagtcctgtccatttgttttttccggtttggttcgattccaatttattggatcttgggttttcggaaacaggtcaaaagtcaaaccaattctgaaccgaacgaatgttatcaaactgaaaggatcaaaccaatttattggatcttgggttttaatcagtattatatctttttgaggtctctatatttatttcactgaatttcgatttattttgttcagtccatatgattcggtataagaattaatctatagtttgagttaatattcggttcatttattttgatttggttcggttttatgcttagtgtacataaaacgatgtgttcacgtgaaaccggtgaaggcgcgatcagacaggcgcggtggttaataaataagttaataacttactcgttactagggccgataatcgtggttttgaacgcgcgtttacgagaattgcgttagccaattgtattcatcatcatcatcgtcatcatcgttggggtgagtatacatacgattaaagaaacccaaaaactccggcgtctgtttaccgctatcatcattcttccgggaagaggaaaaggtttcttcgatcgtcgaagagattctttggacaagtcccctccttcctggttcaatcttcgattcagctctcttttaatttttttggtaacctcctcctctgcatctactgttttcgatttggaaatagattggttcaattgtgaattggaattgagggtttgattgattggatcatctcaattcataaatcaaatcctttgaatttagatttagaaagctctagagtttatgaagatctgcatcgttcttatgagttatatgattgatggattttttagtgtaaaggaacctactttaatgatcaaagctaacgttttgtttaaattttgaggcaaaattcaaatttattcatatgaatattctcataagctgatgaattctgtatctttgtacattagtgatatagtctacttgtgtgtatccttgttaattcatatttaaagtgtgttttttcttgtaggttttgggaagctgct

SEQ ID NO: 13592 - DNA, 3000 bp, Unknown; identical to SEQ ID NO: 13583
  misc_feature (1)..( 3000): cDNA_ID_1450637_gDNA_ID_2214638_Annot_ID_188188 3000 nt of promoter + ATG

SEQ ID NO: 13593 - DNA, 3000 bp, Unknown
  misc_feature (1)..( 3000): cDNA_ID_3030936_gDNA_ID_2214638_Annot_ID_188187 3000 nt of promoter + ATG
tgtggcatataaaattcattatttagtaatataaatacatcacacaaaagtataggcaagcttgggtggcaagaaaccagaaggcggcggtacagaatttttgcatataaacacatcagattttaatgcccaaatttctctcattttcttgcttcgaaaccaaatattcaaagagagcgagagagagagatagatcaagaaagaaagagtgatgcagaagcaagagttcttggaattgttcaaggccgcacaacgagcggctaagtatgcgagtgatgagaattctccagaggtctcgaggtgtatccaattcatgaagcgtttgaaagaagctcctgcatctcttgattgtgacgtggtcgttaacacaaactccattggaaacggaatccgttttctccgagatcacaaaaaccccctaattcgatctgaggcagaacttctttcagatctttggctcaagtatctttacgccaccggtagaaaacagaagtcgacagattctgtttagttaaacagattcagagaaattcagattcaggttttgaatgtaactgtattaatgtgttagagacttgggtttgaatgtatatgacattatattactgcttcttaatatggcagattttgaataaagaaaaggtttcacgagagaagattagaacactaatatgtatgacaaaagctttcttcttgattcaatgaagtcacactcatttcaaatccataaataataaagcttacttaagtactatagttggttaaactcacaataatatgacaatgttttgctactaatcacatcacttggatcagttattttttgttaaaaccttgacttggatcttacactttgatgacgctcttggaagcatcataagattcctcatttccatggtggtttgcaagttattactgttgtttaccacgcaaattttcactagctcaagacacggtaacttctccaagaaatgcttcatttgattcagctctcttgtcgttccttgatagctcaatatctccagcaccttcacttgagatgatgataggcaagaggttatgctctcgtcggtatcatagcaaacacatacatccccacatctgtttgttatgtagtgatcgagaccctgaagcataacaaagaaaaagagtaatgttaacgacctaccaatatatatatggtgtttaggatgtgtttgtgacatgagataccatgaagatgagggtttctaggtttggagagttcttgatcagaagtggcagcatttgccatcctcttgccttgtcattcccaatagatagactaacaaggctgtcgaacaatggcatttctttacatgagaaataaagcagcttcaacaaaacacaatgtgttagtctgttgtcactcaataacacaaaagttgaaataaatcatcaaaagccccaagtgaatctcattctcgataagcaaaaaaaaagaagaatgttatttataaggaaagaacaatatatagaggaggctgacctctagagtgtggctagataagtgaaggattctaacatttctgattccattgatgagatttctcatatcagcgggaatggaaccgagagatccatttcttactcccaccattcttgtttcatccatccgaagattgagtctagcttcgatgagggaatccaacttaacattaggatacttacccaaaacataaccagagtgtttgtagtagataagattaggagcatctaatgaaatactagtaaacttgcgatcaaatcggatgtgtagtctctttagagatggagaagacacggaacaagtccaatctacacatcgccgctcctcaacaaccagttcttcgagaacaggacagcgagatataagagttccaacaacattatgacctccaacaaaattaactgagtcaagacataatgtcctaagcaaaggaagagaaacatcttgagaaagcttgattgtaaaaccacgtcctactctcagcttaaccaatgtcttgctcttaaagatcattgcaggcactggtggagattttccttttaaagtaatgaacacatcaagatccataacaccatggtcaagaacgttgcaaatccaactttgaatgcgagatgaatcagtgccacctcgaacaccaacatgactctttagagtgagcttctttatagaagaaccacgttgcgtatctagcaatttgtcaacgaaagccatgtaatttctgtgaatctcaatccggttttgcttagtcttaggcacagattgacgatcatcaatatcaagattggaaaccaaaacaaacatgttcttccacctcttagagagtactgaggttgaaacagcttcttttgtggagataagagacagaatacgcccaagaacctcatctggtagacggctgattacatctttagcattcattgataccaaaaccttaaaaccacagcaattggattcagaaacagtaactagacagagttgatgagttcaaaggtctgttctttttcatacaatgcaaagtctaatacaaaagttatcatgtatctcttcaatcacattgattaccatagaaatgaaaaagacgaaacagagcagacaacataccttgctaaagtgctacttgctacagagtcgtgaaagctctccactttcaataccaatttaatcgtgagatcaaaagtgaaaacatcgaatactagggttttggaaagtttaagagaagagacgaagaaactgaaacaacttattataagcaatttcctccatttccacatgaggaaagagtaaagcagaaagactgatgaagaaaaggtaagtagtctgtttgggaaagaaagtcacgtgagagaagcgtgggcctttaagggtaaaactgtcatttaaatagtcgccgttctttacacttaggattagggcttctaacatttaaatagtcgtttcgttctccgtctctcctttcccgtcggccggtgataatttcgcaacccaaattccaa

SEQ ID NO: 13594 - DNA, 3000 bp, Unknown
  misc_feature (1)..( 3000): cDNA_ID_3030940_gDNA_ID_2214638_Annot_ID_188186 3000 nt of promoter + ATG
ttggggtggagtcatcaagaaaaggattgatggcagtcactgtatacccatgaatttcatcgtaaaccatacgctgtacagggtcactgagaatctgcaatgcaacggtaaatcattaaacgaaaaagcatatggaccttactaaacgcttacaaaaatctataaggaagtcaagtaaaaaactcacctcatagatatcgttaatgaacatgcagaaatttgtggtttcggggtcattgccactcaagtctggatggcacgatttcatacagttatagtaagctttcttaatctcctcctgcgtagcatctggaagctattgacatagcaaaggagagttattaaagtcacaatctttgatcttaatgattgtaacctgtcaaaggcttcacaatttcgacaaagatgaatctagctacaaccatatgaaatgcagagtatttttccatgatacacaagaagtttcaatcataagcaaacaacttaaaccaaaaaaaaaaatcatcacttcaaaatccctatatgcatatatcaaatcggattgaaatagccttggttcttacgagtccgagaacggcatagtaatcatcggcgacatcaccggtggaaagagaagaagcatcctcagttgcaactctcaatcttccgattgaatcggttcgcctctttcctgcgtaccgaggtaagtaccaagatgaagaagcaccggtggtcttcgccgagaaccgcggcgacgcacctgatctggagctaagagctgagttctggaacttcaaaagatccgtacaaacaggggaaagtatctgcgccattgaagaacttcaaaagatccgacccgatcctgttccgatcgctcaaattaatttcaatttcattcgtaggagaagatgaacatttatttgaattaatatttttattatttttgtgaagaatttaaggcgtacgagggagaaatgctgacgtggcaagataagaaccagggaagcttatttggaggaatccgagatgaatctagcggcgatcggcgatcggcgaaagcgtgcttagccgtccgtggcacgtgtcagctagtggatttatatgtctccacacgcttcaactacccgccaaaattttcttatcttgcttatcctcacacgaaattagatacttaaataactgaaactaaagccaataatgcatataaagtacaaagattaagattcagacaagtaaacaaaactgagacagggttttctaaaacagaagaaagagttaggaggaattgttttagccagtgatgttctgggacttgttgagaatgactccttcgtatttcacctggaaccatttcattgcatcgtctttagttactctgtgttggataccaacacgagccttgcaccttctgcgacgtgctacacggtagccaggacgttctaggaccacatagaagtccataccatagattccagttgatggatcgtacctttataagaagtgaaacaaagatcaatgagtatcaccaagaatgtggtgaaccccaagtgttatgacaggatgatttaaggggattgacttacttgatacccaaatcaatgtgttcttgaataccaaaaccgaagcaaccagtgtcactgaagtttcttctgagaagttcgtattccttgactttcaatccactttcaagtagttgcattgccttctcacctctgacggttacatagcatgcgatcttctcgttacgtctgataccaaaagaacgaacagtgtatctagctgcaaaagccacacataacaagggttcttgaaaattgcaatggaagaagctaaaccaaatcatgtctctcagagcaaaccaaaagcgatgcatataaaacagagtgcacaacgcaactatatcagaagcggggaaacgaacagctcctaatttggactggtaggcttatcaagttatcacaaaccaccagataagggacttactggattccaaaatctcaaattcatcatcaaaccatgcacccattcatagacttaactaaactatgtttcccaaattcttctagattactaaatctatcaaccagactatttgtaagctttcaaatatgagaaaaaatctaacctttggagaaaacaggagtctgaccactcaattgttccaaaacctaccaagtaaccacgaatcaatcgattataaccaagtgacaacaagagtgaaaaccacagagaatgggtaaaaaacaggaggaaccttggaggctctggtgagacgatctccactctcaccaacggagatgttgagaaccagcttctgcactttaatgtccctcattgggttcgatagcttcttctccgacgcctgaatttcaaaagtaagtaaatcttcaaatccctattcacattacaaaatcatacaaatccaagaactgaaacttaccatttggaatttgggttgcgaaattatcaccggccgacgggaaaggagagacggagaacgaaacgactatttaaatgttagaagccctaatcctaagtgtaaagaacggcgactatttaaatgacagttttacccttaaaggcccacgcttctctcacgtgactttctttcccaaacagactacttaccttttcttcatcagtctttctgctttactctttcctcatgtggaaatggaggaaattgcttataataagttgtttcagtttcttcgtctcttctcttaaactttccaaaaccctagtattcgatgttttcacttttgatctcacgattaaattggtattgaaagtggagagctttcacgactctgtagcaagtagcactttagcaaggtatgttgtctgctctgtttcgtctttttcatttctatggtaatcaatgtgattgaagagatacatgataacttttgtattagactttgcattgtatgaaaaagaacagacctttgaactcatcaactctgtctagttactgtttctgaatccaattgctgtggttttaaggttttggtatcaatg

SEQ ID NO: 13595 - DNA, 3000 bp, Unknown; identical to SEQ ID NO: 13581
  misc_feature (1)..( 3000): cDNA_ID_3030947_gDNA_ID_2214638_Annot_ID_188183 3000 nt of promoter + ATG

SEQ ID NO: 13596 - DNA, 3000 bp, Unknown
  misc_feature (1)..( 3000): cDNA_ID_2990498_gDNA_ID_2214638_Annot_ID_188217 3000 nt of promoter + ATG
tcaagaatcaatgagaagtgttttggtggtgtgcccacaagcacgtccatgaagtattcaccagaaccgagcgtcataccagactcaagtgttgctatcagcttccccggtgaaacctctggagctcccaccaaagaaatatctgaggtaatcttcttcctaaccttctcgtttttctgtttcttcgatttgttgaaccgagcatgaagcgtcttaattcttgtgaggtcttggatttgaagatcaacaactgaatgtgttgttctctttgtttcttgtttaatccttgattgaggcttcaccgattctctggtatgttccttggaaggatcatgttccttggaggagaaaccgcaatcgttgcttgttgaagaagaagcagaactgaaacgcatcgtatcttgggaattaaacatgttaagggatgaagagtaatgctcatgtttccctgaaagagttctacagtctccggaaaatggtgagacagagaacaaaatcaggccaagaagaaatatactgagtttggtcgacattaagctgctgctgagattactaatattaataaaaccattcaagaataaggaagaaaagaaaagagaagagagacctatgagtgattttgaattatagcttctaaggacaaaagaggagctaacataaaaaagagtagaggattttgtgaaagtcaatggaatcgaaaatattaaaataagttacaattcgatatctatttgactgagacagaaagccatatcataccagaaagcaagaaaaataaacaagaaaacattttaaaaaataagagaatattgtaggtggtgatggtcttctcttcagtgagactggttcaaacatgtggaatctttagtatttttgtttttctgattcgtagttttcgttgaaatgtgaagttacccgcttaacagtagttggtagtactacaaaagtaaaacttcaggtaagaattacttaatccaacttttactatgataaacaacctaatttccaatacgctctcctctacgtatttttatattcaactagattttgtggtgtatatatatatatatatatatataagctcttgagcaatagtcacataattagctcaaaagccagccacatctataacgggattttttaattaaattaaagatcaaatagatgatatactttaattgactgtagaagagtctttctaagtgtgtttgactgtgactaaccacatatgaacagttaagaaaattctttatttaaaataaataaattaaaagatagaggaaacaagaacggagaacctatgttggaaatgcccccaaatctttggaaaatttgtaagtagaaaagttattattttcctttaatttgcaacactattcttgtattgtaaacaaaaatacttgaatcaattattttgaaagaaatgatctaaagatagtgacataattcaatagatttttattttaatataccagtcaattttgttttcctaccattcatattacacaaatgaggaatttcatgaaaggctgcctttcagaatttctgtgtttatacgaatcaaatagtttgttaaaatctaaaatgattatttataaaatgaaatcaataaaagatcaagttcagaaaaatgtatgttgttttacttagatgtatttttgtaaataaagcaaaagattcgaatttgactttcagagttaatactgtttaagtgtaacgtattcctaactatattgtgatgaacaaactgattagcattcaatttgttataatcccaaccaaacatttcatttttaagtgtgcacgtaattccaatatattcccatgtctatctttcaaatctacttttcaattttcatattcaattaacaaaccctacatgtgtttttctttttcttttttgtcaaacgctacatgtgtttagtagattaatatttcatttcagttttttaaaatatgtagtgttatattataaccgatttgtttgacgtaaaaaatgtggtaaagttgtagccaaattgcttgtttttctaatgtgaagaaaacatcctgaatcactaataagacaactattgagaacaaatcggtaatcaatatcaaataataagtaatcgtatgttaaaagaataaaaaataacaaataaacaccattttcgtacgtcgttagtttttattaggtttggattaaactattaaaacaatatgattgttacgaatcatgcggttcacggggtcagacgaaatcataagtgtggaggtgcaactaccagaactacgtacattattaaaacctaccattatacatctcttctacatgtgccgtttcatttattacctcaccacccacttttctcactataaccaaaatttaatacccttccacactatttcttcgtttttttgtcttccacatatttcacttatttgtgttttctcacctgttatagcaaaattaccaccttgcattcatgtggcgtttcacttatatattactgacacgtctactaaaattcaacataatttgaatgtgctatgaagggttgtaaacaattagagtcaattttatcaatatgatgtatctaatttttatacttgactggttttaggtagatatctgttaatgagcgcactgagcatgcatgcattatatatcatacacccaccaacttctaattcaataaatacttccaactttgtccacttttttggttatttaatcaactttgtgtagagtttatatatgaaaccaaaaaaaaaaaaaaaaaaaatctcaaataaaagatatgaaagatcaaatatcttaaatctaatgttcctaataaaaataattgattcaccgaattcgaataacttaaaaagtacactgaaattaacccaattcatatacaaagaattcgtacatatatatctaaaattttagtttattaaatactacatgttatgtatataactgaatgaaattcctaggtaccatcgccgcatgctaaacaagttgttagc

SEQ ID NO: 13597 - DNA, 3000 bp, Unknown
  misc_feature (1)..( 3000): cDNA_ID_2703430_gDNA_ID_2214638_Annot_ID_188214 3000 nt of promoter + ATG
tcaatgaagacatagtagttatatggaattttgcttaaagttttcttatgtcaaattcttaaacttataattgagaaatttgtccctatgattcaagtaagaggaaaacatatgtaaatgtacggtttaagactttttgtttatggttgttgaaatatgggcttggctttcctcttttatcttgattttgataaatttatatatgacactttacctcaataacaatttgtgtattagaattctaagcttcttttttagcagtaaattgttacgtatgttttatcataattaagtgttgttttgaagacgaagataaaaagatagtacatgttttatttttgtatctttttatgtgtgtttattcacataaatgttttaaaacggagcatcgagtcttggaagtcgaaactataaaaaaacggaggtagagagaatgtgttcatacggttattgttgtattgagcattgaaaggaccgtggtactaggattgtcggtctcctaataatagccgttgtggatgcttatgtcttattggtggtcaaagcaaaggagaaaagtttgaaaggagagacataaaaattgatgaatcacacacgaaagaaaaacttttcctctttaatccatctttatatctttacctataaaagtgttacaaaaaggaaacgcaataatacacacatacgggtgtatatagtatatacgacaattggatttgctttaaataattatttctatatttgaaaacaccaaaaatcttcgagtgatgaagcttacctatatgtgacttcttttgcttaatgatgggatcgaagaatgccttgcgaatgctagccatgacggcataaaatcaaaggattcaagcataagtttgattgaatctcattcgtttcccatccacctcaataccaaaattttgtagataaattacttaaatcgatttgaagtacgtagtctgttgaatttatgatctgattctaatgacacttgtcaacttgcgccatcaccccatatgggttcattatctatatcattagattttttttttttttttgtaaaaagaaatatgacatatgggagtcaataatagcataaattacacacatggagaagtaatataaatctagtatcaataatttgatcaagagtaatcattcttttctgactttccatcacattttctccatcaaatcacataaattcaaaaactaacgaatcacaaaactttgggagaataacacttgaggacgaatctagctaaaaggaggtgtaagacacgtgagaagcacgtgatcacatggcagcaacaacaatattcagtaaaattggccattcttcctctgcaaaaacttggccttagcctgtaactccacccaccatcaaccaatcacacaacgaccaacatgctagtgcaaacgtttgtagtataaattattagggacttaccatatccaaaatgatctttattaaaacttaaaatgaatatgattatgtttaaaagctgataagatttattaatctgtaggcataaaactttatccaaaagttatgcttcaagtaaagcctccatcaaaggcttttaaatctctctctctctcatatgaattcattttctccaagaaaggcacattggtttcttagatatgacttatggagttgtaacattccccaaaacaaagacaaaaatttctctaaatgtgcatttgaatgctatatattattctcctcgatcaaaataaaaatactaatataaagtcttcaataagcttatagtatattataataaaatatttgaagtacagaaaatttttttgtaaattttgatagaatccaaaactagacatgtgaaaggaagaaaaaaaggtatattgaagagtgagaataatattgacctaaaaattccaaagcctgtgtttgggaattccctcccctatctatctctctatccacttcaattttttttatgaaataatttttatttatttatagataagtaaaagtaaaaattgtaaaaatatatatctttaattcttcaagtagctataaatgtcacagttgacaaatccactgtctttgctttcccttcactgctcacttcttctctctttcttgtttcctccattgcaaacaaagctttctcccactaaaccatttttcaccaaagtttttttcttctgttccccattaacccattactgtgtaactctatatacacacacacacacacttccttgctatattaatattttttttggcttttaaccataaccctgaatcaagttccttgtgggtaaattaattttagctcaaactctacaattcattattggtacatctctgccaattaatttactgttgtttgcttcagaaacagattaaaaaaacggagccttttctttttccattgtttcatctgttctgttctaagatgaagacaaatctaaaggacaaagctttagtctctctcccaacatactaactaaggtaacttcttcagtcttcttttttttccataagacccagaaatctttccttgaatgttttcttttgatatcattatgtgattgattctctgtaaattgtctcttgcttcaaagttaagtgatgcttttttcgatgatttttttaaagccgagattctcttgtttcttcaagctcccatcttttgtggggacacgtaatgcccataacttatttgttgatatgccgctatatttttacttataccaatgaaagtgtgcgtttttttaatttcttactgtgtctgtgaaggttttttttaactcacatctattagattgttccatgtggcctcagattgagttatctaccattgcttctacgctttctgttttggtggctaaatgtgaaatgagaagtgtgaaagatttctttttagtccttgtgtgatgtatgcaagtgtttatatgtgaatgtgatacactctcttgttttaggtgattatagtgaagttgtaagagaagcatacaggaccagagatg

SEQ ID NO: 13598 - DNA, 3000 bp, Unknown
  misc_feature (1)..( 3000): cDNA_ID_3030890_gDNA_ID_2214638_Annot_ID_188208 3000 nt of promoter + ATG
caagatgctggtggctgaaatcgacgaaaagcacaagggagactatgactttctatgcttgccgacagactttaaggtattatactataagagagagtgaactcatgatgcacttgtatgacctgagaacttactaacaatctagcttttttctggatacagaataaatgcaacatgggtcacgcttttatcaacatggtctctccattgcacatcgttcccttccaacaggtttctttaccttttctcttcagtattgtctttaaaacttctcttcactagtcatgaagttgactatgtattgtggatatggtaattatccgattcaatggcttgagattgttatagctaaaagatattcataatgtgtgtttctgcagactttcaatggtaaaatatgggagaaattcaacagtgggaaagttgcttcattggcatatgcagagatccaaggaaagtctgcccttgcgtcatacatgcagactccaagttctatgaaggaacaaaagcaattgtttccagaagtctcctaccatgatgatggtcaagacgccaatgatcacgtatgtttatccgatacaaaatctcatttttgtttttgtttttgatacatgatttcaaaatgcatatgcagtatcttcagatttttccaccgatttcaccttgtatctatgaatcatacaggagcaactgttttcaagcatttggaacataaccgcgcctgattcagattggtcttacacaatggatcttatcgaaaatccgagggagaacggtaactccaagaatgctgcagaagagtcctcttgaatccccactaaaactagtagttgggaactctaactcaccatcaaaggtaaactaagtgtacaggtctggcgcggttatggaagaaacagaatgtacagtattaaggcttgttttctccacggaacaaagtaaccagtttttagggattacttcactcgaagcaaccgattaaagaaacatccctattagtacattacgttgtatactttatattcggaaacttctctctatatcagtcatgtgtatataacatcctcttgcgtgtacattatcctttccatgtgaaagacatgatcagtatttagttgtacaacaggttcgttataagtttctgtctcaattagttatcattacaaaaccgttacacgtctctctctatgtagacatctatccatggtttcaatgacggatcagactcttcttcaacctttcctagccaaacccaccaccaaaggcttagcaacggaatcggattcaggtattattctgcggcttttctctatacttctcgtcggagcaatctctttgtgggcaaaccatgaggcttcaaaaggcttctccataagtatcatcaatgatgctaaagattctccttccggtaaaagattcgcccttttcttcgaatctgatgatacggcagtgcggatattgctcgatgcaagcttctttgtggagaggtttctctacgagggtgttcctcatcgtctccgtaagcctgtaaaccacgttaccgtccaattctgtggaaacagtagtgatagagtagataggttctcggtaacttcaggtgcaagtcatggagagtatgtgatcagattaagcccatctctcacggaaagaaaaaagtttagcaacgccgtggaatctgcattgcgacgttctatggttagaatatggctatggggagacgagtcaggagcttcgccggagcttgtggccggcatggtggagtatttggccgtggagagccgaaaacgacgtcactttgaaaagtttggtgggaattggaaggataaggaaaagtctgtgtatgtggttagcttgttggattactgtgaacgacgtagcgagggtttcatccgacggttgaaccatgggatgagacttaggtgggatgatcggacggtggatcttgcttcgagtggtgcgtgtggttcacgcaaggatgtgttgcgtgagcttaagatggacgacagtggattgataattgagagacgaacatgatatgttctcgtgctgccatattgtagcacacatggctccacgtcattatttcaatgtgtataattcatcttctatattcttatcgaaaaatgttttttttttttttttgtcgttcgaaaaatgatttaattttttctcagataaataaaagaaattatctgaaatttctttgttgttagtctcagaaaaagaaattattggagcccagttttggtgagtggaaacttttggttttgttatttcaaggccttgtccaacaagagtaggatcaggacctacgggcctatttatatagtatatttatttgagtgtcagtgtcacactaatcaaggtttaattttaaaattgcagtattaaatattaatgaaggtttttatgcgagctgatagcggcctcaaataaatatattctcgattggatttctttaaaaaaaaaatcactttaaagttgacaaaaaaactcagtttaaagaaaattaaggtggaattatctagttaagtgttactctttaatatttggctaattgcgttggttcatgcctgtttaagaaggaaatataaaaagttttgacttaggaaaatgaaaatgaaaatgaaaatgatgcagcttcccagcttttttacagattccagatattgatcagatttttgataccgagatttctcttctctattgatttgatagagtttgggaaggttttcaaatatcaaagaatggaaataatgacaacattaatggaaatacattcagtaaacagtacctaaagttttatttttatttgaaattaaaataaagataaacgtatcatttacagatttggggtacagaaataaagtgcaaggaatcaaaattgtcagccgaacaacaaaaaaaacaagggcttttcagaaaaataaaaaacctttaaaccctttttttgtgtatccgattccgtcgcaagtacattcggactctttcacggcgtca

SEQ ID NO: 13599 - DNA, 3000 bp, Unknown
  misc_feature (1)..( 3000): cDNA_ID_3030898_gDNA_ID_2214638_Annot_ID_188206 3000 nt of promoter + ATG
atcggatggaataattggaaaaaaggaagagtttttgtttcacctttttgcgattatcttgctgcatcgtgactcaattgaaacacagactaaaaacccaggaattagaagaaccctagaattcgatctgaattggggggagggaaatagaaattcagatcagccgcattggccccatcgaccactactccaaatggcgaagctagaatccgacctggttctgctccggcaatcgatcaccgacagagacagaatcgcaggcgaatttctcattcacctctctaattcacccaattacccccaacgaaatcgaaacaacaacaaacaatcgcagttcaagataaatcgaggaattgaagatagcagagtgcgaacagcattgctttagacgcacgttttcgtcggcacgagatctgatcaccgacacacaagggatacagagagagagagagagagagagagagagagacgaagaagtagtgaaaatgaaaggagagagagagataaggaaggaatctagacggagatttatatatagaggttaaagtgtcgcgtttggtaagctgctttggtcactgtgatccaaaaaaacaacccattagtaaaacgaaaaaataaattatttgatcaagtgttaataaattaattaggacattattgatctggtcattattagtgtatgatctatttttgatctttattgccattcattcatgtcttctttatccaattctttcgttttgtcacgtacttatctcatagatataatgttaatagaatgttatcatctttatccttaaaagcttttttgctaattttagttgctaaaactttgttttattcactttatcatttgctatattgtatatactgctaaattatattttcaatctatatttcatcatcttcatttttgtaaggaatttttagcttattttttgtattaagtttctggtaatatgattctcaattattttgctgtaaaaaaaaatatatattattttgtttttttccattaatattgtatatcaaataaccttcaattaaaaacaacaatattaatttagcttttggttgtggcatgagtgtaatatagtaatattaggggtagaaaaaaaaacaaactctcacttaactagcccaatgggccatgccatttttttaaaacacgcagggcttttcatatccgaatagttaacgccacgtcatctctgacgcgtgagagatttgttgtcaaatgtaataaaccagctaatcattagtctgtcttactgtctccttcttgtggttaaaatcaaaagtcaaaccagctcacattagtgtaattatttaactaaattataaaaaagataatcatattttgattagctaataactaaactacttgacgattgagcgaatcttatatttagtcttacgggattaaacaaaaaatatcaatcagaccttgttacgtaagcacaaatcatagtgtttggttgaaaaacgaagaataatacatttttttttatagtgtgttagtactgttttactttatacttccatattcttttttcaatagacatgttttttctaatcttctttttggtgttaatttgatttaaattaagttaaatttttgttgttttatgtatttggccaaaatgatatttgcatcataaggttcatgtagaagaaaacatatcttcatttttttttactttctagtctttttcaatctagtggacctaatcctttttcaaaatgatcttcaaagaatttttgtacctagtcttgaataaatgtgaggaaatctttctttctttttatgtgaaaaaatgtgaggaaatctaatttacgtctttcatttttctgcgaacataaaatgggtaaggagatatggaaaatgtaagattcggtttgcaatttttctgcaaacacaagatctctgttttctgcaagaacagaaccaatttcccaccagggtaactcattttgaccacttacaagcgccaggcaataatccttcttcaaggcctttcaccactccccaagttctctgctttggatcatataagctctcaaaaatcataatccaataccaaaattcatgataagttatatgttttattcattatcaagaaattgaaaaacaacaattcaaaaagttcatcttttagaatcatatactagaaaacacataaatcaagctccattcaccaattattgatgaagtcatgaagataaatcgattattatcctctgatgcaacaacagcgtggaggatttccaacacaatgtccagtccggtaaatagctacattagtacagtcatagaagcatgcatgatcatcccgtctagcatcacatagaaaaaggcaagcaccatattttgctggctcgatcactgcacatatatacaactccacattaaaactataaatctgtagatacatgtccaaataacagttttagtttcttcaaggttcttaacaacatatacatatacacagatacatgtaatattgtattactaattctatatttttaagaattttttgtttcctgaattattgttttggtagtgatcaaagatagttgaaaataacaaaaaaaaataaacatcttcgcaaagaaacaacatacctgactcggcctcaacatcgtaataagaaaacgaaattgtcaatataattacaagaaaaacagttgcagaggtttttttgatacccataggttctattatcttttaggttttcgtgaaagtcttatttataggactatttttcttggaaagtttcaagtttttatcctctgtttttattttacagtaagtagatcttccataaataaatttgttattttggtaaagagagattttcatttctttttattatcttctttaagtagaaagaatcttaaaactactatacttgaatacttataaaaaaaattactatacttgaatatatcaaatttaatgcaaagttcatgttggagaaattaaatactaatatcaaa

SEQ ID NO: 13600 - DNA, 3000 bp, Unknown
  misc_feature (1)..( 3000): cDNA_ID_2703480_gDNA_ID_2214638_Annot_ID_136182 3000 nt of promoter + ATG
ttgaggccgagtcaggtatgttgtttctttgcgaagatgtttatttttttttgttattttcaactatctttgatcactaccaaaacaataattcaggaaacaaaaaattcttaaaaatatagaattagtaatacaatattacatgtatctgtgtatatgtatatgttgttaagaaccttgaagaaactaaaactgttatttggacatgtatctacagatttatagttttaatgtggagttgtatatatgtgcagtgatcgagccagcaaaatatggtgcttgcctttttctatgtgatgctagacgggatgatcatgcatgcttctatgactgtactaatgtagctatttaccggactggacattgtgttggaaatcctccacgctgttgttgcatcagaggataataatcgatttatcttcatgacttcatcaataattggtgaatggagcttgatttatgtgttttctagtatatgattctaaaagatgaactttttgaattgttgtttttcaatttcttgataatgaataaaacatataacttatcatgaattttggtattggattatgatttttgagagcttatatgatccaaagcagagaacttggggagtggtgaaaggccttgaagaaggattattgcctggcgcttgtaagtggtcaaaatgagttaccctggtgggaaattggttctgttcttgcagaaaacagagatcttgtgtttgcagaaaaattgcaaaccgaatcttacattttccatatctccttacccattttatgttcgcagaaaaatgaaagacgtaaattagatttcctcacattttttcacataaaaagaaagaaagatttcctcacatttattcaagactaggtacaaaaattctttgaagatcattttgaaaaaggattaggtccactagattgaaaaagactagaaagtaaaaaaaaatgaagatatgttttcttctacatgaaccttatgatgcaaatatcattttggccaaatacataaaacaacaaaaatttaacttaatttaaatcaaattaacaccaaaaagaagattagaaaaaacatgtctattgaaaaaagaatatggaagtataaagtaaaacagtactaacacactataaaaaaaaatgtattattcttcgtttttcaaccaaacactatgatttgtgcttacgtaacaaggtctgattgatattttttgtttaatcccgtaagactaaatataagattcgctcaatcgtcaagtagtttagttattagctaatcaaaatatgattatcttttttataatttagttaaataattacactaatgtgagctggtttgacttttgattttaaccacaagaaggagacagtaagacagactaatgattagctggtttattacatttgacaacaaatctctcacgcgtcagagatgacgtggcgttaactattcggatatgaaaagccctgcgtgttttaaaaaaatggcatggcccattgggctagttaagtgagagtttgtttttttttctacccctaatattactatattacactcatgccacaaccaaaagctaaattaatattgttgtttttaattgaaggttatttgatatacaatattaatggaaaaaaacaaaataatatatatttttttttacagcaaaataattgagaatcatattaccagaaacttaatacaaaaaataagctaaaaattccttacaaaaatgaagatgatgaaatatagattgaaaatataatttagcagtatatacaatatagcaaatgataaagtgaataaaacaaagttttagcaactaaaattagcaaaaaagcttttaaggataaagatgataacattctattaacattatatctatgagataagtacgtgacaaaacgaaagaattggataaagaagacatgaatgaatggcaataaagatcaaaaatagatcatacactaataatgaccagatcaataatgtcctaattaatttattaacacttgatcaaataatttattttttcgttttactaatgggttgtttttttggatcacagtgaccaaagcagcttaccaaacgcgacactttaacctctatatataaatctccgtctagattccttccttatctctctctctcctttcattttcactacttcttcgtctctctctctctctctctctctctctctctgtatcccttgtgtgtcggtgatcagatctcgtgccgacgaaaacgtgcgtctaaagcaatgctgttcgcactctgctatcttcaattcctcgatttatcttgaactgcgattgtttgttgttgtttcgatttcgttgggggtaattgggtgaattagagaggtgaatgagaaattcgcctgcgattctgtctctgtcggtgatcgattgccggagcagaaccaggtcggattctagcttcgccatttggagtagtggtcgatggggccaatgcggctgatctgaatttctatttccctccccccaattcagatcgaattctagggttcttctaattcctgggtttttagtctgtgtttcaattgagtcacgatgcagcaagataatcgcaaaaaggtgaaacaaaaactcttccttttttccaattattccatccgatactatctgttctgtctgagatatttatgtgtgtgtttcggttaatcttgtttgtttcctgttactgtctttaatctttttgccgttttggacaactctgtttatgatcaatgaacgttacaagtgtcatcaaacaaacaacgcataattgtcatcattcaagacaagatgatgtgttgttgagacattttttttatttcttcatcagcaaattgacattcaattgcattgatccttcattaggcgtcctttgtagcatcagtagagaaccttctgcatctgattcttgtatagtgttatctctattgtaatgtttctgacttggaagtaatggtatttgtaacagaataatctggagatg

SEQ ID NO: 13601 - DNA, 3000 bp, Unknown
  misc_feature (1)..( 3000): cDNA_ID_2703484_gDNA_ID_2214638_Annot_ID_136183 3000 nt of promoter + ATG
tctatttagttcaagtgaacatataactcatatcgtggaccaaattagatttcatagttagttcacatgatggaccaaacttagatgttaaaattttgtacatatcttaaaaactcaacggccttgaaatatgatgaagttcaatttgttttaagtacatagccgagacaagtttgattcatcttgtagataaaatactagaaaacgttaacaaattgtatatttgcttatcttttgcttatactctacttatgttttacataatttttgtttgtttatatttggccgaccacaaaaaccaaatctaattatggcctttaccggaactaatttttgtattggtttttattttattttattttattaatttggattgtaaaatccagtaacaattttactatttcaacgtaagtaatgtagagaaaaatctcttgcaaaaagaatttacttgttcgaaagtaaactatataactgctgacaaagacaaaaaaaaataaaaaataataagagagtggcttgtaatatagaagaaatataagggtagagggatggcaaaaaaaaaagctaggtaattcaccaggagaaaattttacatttttactaaagtattttatatgtttgaaatctattttaacaggtttccgatggagatcttgtcatttgcttccccaaacataaccaaccagcttttgcccatcctcgtttaatacatctcaagatacaggtttgtttctttactttttaaattttgtttctttactttttaaattttgttgctcgattacttatgattcctagaatgactggaactagcaagaaaagtgaatggcgaacatcagaggcacacgtcagtaccgccaaatgtcctgaaggtacagtgccaatacaaaacataaccgttttggatcatcgagcaaaaccagaaagaggcaataacaatactagtttcatcccctaacatgaggtacataaactactagtttcatcccctaacatgaggtacataaactgttaaacatatatctatcattgtacttctctctttggtaatacgtatttctctctttggtaaaaatgaatgtacttctcgatttttagttttgaagaaattaaatgcattattaattggtaagtgtttttttcccaaccgttttgtcaatatattattttcctaatatttgtgatgatagagtgattattttttacatatatagagattatattgagatttgttttttttttaaacacatctctagatttgttttaggtccataatagacttcgataaaaaaaaatcacaatttaattttatgaaaatacaaaattctgcacgagttgtaatactagtatgatataaatcacataccaataaaacctcaacattgttttgttttgtaactgatcactttgacaaaatgcaaatccgttaatgaaaaatttatgtgacttttgacttaaactatttttcaattaaatttatcggataataaatgtgagaatgtcagaaatagttagaataagtaaatgtgatgaattttatttattcagtttacatgttaaaaagtcattcagaaaacagcaaaagtatttaaaataaagtaacaactccaagttttacatttctgatttgcatcataagtgtatttgtgactttttaagtccgtcctagaatttgttcttacaagttgatcataataatgcgagagatgaatctatgagaaataaagttgagtatcagactaaattttctcatcgaatgttcaatgttgcatccttgttgaccttgtccccaactatcatatactactactatatttcaaaataagttccgacatattaagaccaaaataatagtggtttttctaacatgtaattaaagcccatattttaaatgttgattagggcccataatgttatagtatatactaataattaattatttgattatttaaattattataaattttttgatatacattacatatgaccataggacatatagataaattcctgtaaatattaacatattagatgtcaaaatatttttccttgtagagtttaaaacaaattatcagtgtccatcaaaagctggtttaggttcgtgtcaacggttgggccgaaaaaataaacgaatttcaaaaattatagactctaattaagtaggattacttattttgattgtaatcactacataaataaaataattaaatatccattttttctctctctctttctcagtttttttttttttgggtaagcgtttgctcgttgtgtaatttcccggcaacggaagagaggaggaggaagagtgtaagcaataaattcctcttcttctacgaaacatttgctcttctcctctttctcttctcttctcttctcctttgcttctccgattctcttccttttttttagtttgatccgactactcaagctttttttctgttcatggtttcctccatcatcgcaggtactacttcacttcttcttcgatgaaatttctgctaatcggtttgatttttggttattattcatatgaaattttgtattccttatttgtttgactgctctatgattatcatgtagtttgattgtgactgttctggtttttttttactcaaaactgatcatggtttttaacgagaaaacaagttgatactctctttggttccgtggaattcactgatcatcgaatcggtttttgacctgtttcaaaggtttaagctttgatttgagtttattgctctgtctctgatgatgttttgtcgccacaagcagcaaaattttctattcatcgagttgaccaactcatggtcttgcttcgattttcttcttctcagttatgtttgttgatgtatggactactaggaaacacatgagtagcttgtgatcgagaactaatgatcttagcaagttactgttctgctttatgatgcaaaatcagaaatcaactagcaggtctttgatatttgattcatatctgcagttgcagaaggcaaaaag

SEQ ID NO: 13602 - DNA, 3000 bp, Unknown; identical to SEQ ID NO: 13598
  misc_feature (1)..( 3000): cDNA_ID_1017476_gDNA_ID_2214638_Annot_ID_136185 3000 nt of promoter + ATG

SEQ ID NO: 13603 - DNA, 3000 bp, Unknown
  misc_feature (1)..( 3000): cDNA_ID_2703495_gDNA_ID_2214638_Annot_ID_136189 3000 nt of promoter + ATG
ccttttccaatggtgagcaatcagcaccatttttgcaagcccattttaggctcgaaatcactcttctaaagtaggcatatggattttccatgcaccagagtgtgtatgtaggtataatgcttgtgttctgctgtgcagcaagtgtaccagtcgcttctgatgttcctgctactgaaactagtgcaaagagggttattaacatcttcgtcttcattttctgagaaatttcttgctttttggtagaaaaataaatggagaaactggtgatgattatatttgatgatgatgatttgttgtctatcatgtacatttgcatgtatttatatcattgcctggagacgtatttaaagcctatgcatgtgttgaaccaactattgaaatttataacaggcatgattatatgtctttatctctaattaatgccatgacatgctatgcagtttacactgaccatgtatagtgcctctgttgtgtgtgatcattacaggaaagcgtcctaaacggaatctttcaaagaaacttcatcgagaatgttggtttggaaacgcacagcacaagttattgatccaaatccagaaaagtttggaagtttgtgcttgaaggttagtttatcattcgatgtcagttttaatgtgtttgtgatttatctactaagttttccgtgaggtgcaaggagaaaactttcacatattttcgtcttcactggctagatataagtacataacgattagcttcagcatcaccaaacatgttattctacccacagaagtactgattttaattcaaggtagttagataatgaaatagggatttagggaaataggctatgatgtttaaggtgatagacgtactaatgtttttggcattgctcatgaaagtacccaatcataaacatgagaaaccgcgtttatttccttaatccccagatatctgaaacgtcaagagtttgtatcttgttagtgaaaccctcaaaaatcctctagagatttacagattatataacatgttgaaactgggatgagagtggagtaaaatcagaagttggttgctagctcagtttcctaaataattgctggaacggtgcaactgcaattggtatcacacaggtaaagagaaatcaccagtttgtatgattcttcacatgttctgctattaatggccaacattcactttggatcaaggataaaaatattgtaatattttcgtattaaattagaggattgtgcttaaaattcataatcatttacttttgcttttttcagttttttctttttactgttgcaggtacaaactacaaagggagataagcttcagtttcttaaccagacttacggttctctctcaacctacagacacatttatctttgattccaaggtaaatgagataataagattaaggcatttgatatgatgaaacgtggagattagagcagtagtattaaggtttcgacatgacacgctgcgcaggcccccaagagtagatatcagaagccgagtttccattagtgagcagattttgaggcagtccatgaatgtcatctaaaggacgggatcttccattctggtagtactgctggttctgcatagaggcagcttcatcatcatccataggaagacgatcaaaaacagcattcatgaaagatgcagccatgagaacaacaggaccagatgcgattagcccaccaaccactcctccaccaacaacctgtccttgaggtccggctaagtaaatggtcagaccagttattccaagtggtgctggtggaggcaagattgatccaagcaatgagaggatctcgtaacgtccgtgtaatgtgacaattgctcctgatgaagctggttgccttaatgtcacattggtgacacaaccattggcactgagaatgcagagacctctctgtttccttcttgcaaaatccgataaagtctcacagatgtcacaacctgagctgatctcaacggcgttagctctgagggaatttggactgtcgtgagtcacaatgattggtggtttgggtttgttcttggagccagcgggtctgccacgtggcctcttagccatctctccttcgattgatgaaaccggttggacggctttgggtaatgctctcaggttgttgttggtgttgcctctctctgttgcttcatggttcctcattggaacagacttggatcctacagaggttggagttagagctgtacctccagccattgttatgaatgttgttatatgttcaactgaaagattcagaaaatttgtgaggagtttgtgagtttaagtaaggagattttggtgaattattaaatggtagagacaccaaaagaatgattgtgaggagtaggagatggttaagttgtcaccaaaaattgtgattaatagttaacaaatttattttgcaaaaaaagaaaaaaaagaaaagtttctggcagcctacttctcaacagatgattaagtatttgattcatgacaattgtcttctttaacagagagattcataataatgcttaaacatcttgtagctatttacaaccaaatttataccctttttgggaccaaaactaaaatcaaatactgatcgagagttgagaaacaacaaaaaatgagagtcgtccactgctctgtattttatcgccttccatactcgactcttattgggcttttaaattggtcctacagagaaggtccaataaggcccaaaatatgtaaatgtacacgtgtggttggttcttagccttgacttgtcgtcctcgacctgtgccacattcatctctctctctcagtcaaattgttgttttctttcttcgaatcggtgcagaaaattcagggaagttctggggaaggttgttgcgtttgactcctttggcttagttttctttcgaattccgtgcttcctgatgatcttacgtgaaattgcagcctaaaatttcgagattgttttttttactcagaaaacgagatttgactgatatgaatcgaaaatctgtgatttaaagtgaagc

SEQ ID NO: 13604 - DNA, 3000 bp, Unknown; identical to SEQ ID NO: 13597
  misc_feature (1)..( 3000): cDNA_ID_2703430_gDNA_ID_2214638_Annot_ID_136190 3000 nt of promoter + ATG

SEQ ID NO: 13605 - DNA, 3000 bp, Unknown
  misc_feature (1)..( 3000): cDNA_ID_2990498_gDNA_ID_2214638_Annot_ID_136192 3000 nt of promoter + ATG
tctgaggtaatcttcttcctaaccttctcgtttttctgtttcttcgatttgttgaaccgagcatgaagcgtcttaattcttgtgaggtcttggatttgaagatcaacaactgaatgtgttgttctctttgtttcttgtttaatccttgattgaggcttcaccgattctctggtatgttccttggaaggatcatgttccttggaggagaaaccgcaatcgttgcttgttgaagaagaagcagaactgaaacgcatcgtatcttgggaattaaacatgttaagggatgaagagtaatgctcatgtttccctgaaagagttctacagtctccggaaaatggtgagacagagaacaaaatcaggccaagaagaaatatactgagtttggtcgacattaagctgctgctgagattactaatattaataaaaccattcaagaataaggaagaaaagaaaagagaagagagacctatgagtgattttgaattatagcttctaaggacaaaagaggagctaacataaaaaagagtagaggattttgtgaaagtcaatggaatcgaaaatattaaaataagttacaattcgatatctatttgactgagacagaaagccatatcataccagaaagcaagaaaaataaacaagaaaacattttaaaaaataagagaatattgtaggtggtgatggtcttctcttcagtgagactggttcaaacatgtggaatctttagtatttttgtttttctgattcgtagttttcgttgaaatgtgaagttacccgcttaacagtagttggtagtactacaaaagtaaaacttcaggtaagaattacttaatccaacttttactatgataaacaacctaatttccaatacgctctcctctacgtatttttatattcaactagattttgtggtgtatatatatatatatatatatataagctcttgagcaatagtcacataattagctcaaaagccagccacatctataacgggattttttaattaaattaaagatcaaatagatgatatactttaattgactgtagaagagtctttctaagtgtgtttgactgtgactaaccacatatgaacagttaagaaaattctttatttaaaataaataaattaaaagatagaggaaacaagaacggagaacctatgttggaaatgcccccaaatctttggaaaatttgtaagtagaaaagttattattttcctttaatttgcaacactattcttgtattgtaaacaaaaatacttgaatcaattattttgaaagaaatgatctaaagatagtgacataattcaatagatttttattttaatataccagtcaattttgttttcctaccattcatattacacaaatgaggaatttcatgaaaggctgcctttcagaatttctgtgtttatacgaatcaaatagtttgttaaaatctaaaatgattatttataaaatgaaatcaataaaagatcaagttcagaaaaatgtatgttgttttacttagatgtatttttgtaaataaagcaaaagattcgaatttgactttcagagttaatactgtttaagtgtaacgtattcctaactatattgtgatgaacaaactgattagcattcaatttgttataatcccaaccaaacatttcatttttaagtgtgcacgtaattccaatatattcccatgtctatctttcaaatctacttttcaattttcatattcaattaacaaaccctacatgtgtttttctttttcttttttgtcaaacgctacatgtgtttagtagattaatatttcatttcagttttttaaaatatgtagtgttatattataaccgatttgtttgacgtaaaaaatgtggtaaagttgtagccaaattgcttgtttttctaatgtgaagaaaacatcctgaatcactaataagacaactattgagaacaaatcggtaatcaatatcaaataataagtaatcgtatgttaaaagaataaaaaataacaaataaacaccattttcgtacgtcgttagtttttattaggtttggattaaactattaaaacaatatgattgttacgaatcatgcggttcacggggtcagacgaaatcataagtgtggaggtgcaactaccagaactacgtacattattaaaacctaccattatacatctcttctacatgtgccgtttcatttattacctcaccacccacttttctcactataaccaaaatttaatacccttccacactatttcttcgtttttttgtcttccacatatttcacttatttgtgttttctcacctgttatagcaaaattaccaccttgcattcatgtggcgtttcacttatatattactgacacgtctactaaaattcaacataatttgaatgtgctatgaagggttgtaaacaattagagtcaattttatcaatatgatgtatctaatttttatacttgactggttttaggtagatatctgttaatgagcgcactgagcatgcatgcattatatatcatacacccaccaacttctaattcaataaatacttccaactttgtccacttttttggttatttaatcaactttgtgtagagtttatatatgaaaccaaaaaaaaaaaaaaaaaaaatctcaaataaaagatatgaaagatcaaatatcttaaatctaatgttcctaataaaaataattgattcaccgaattcgaataacttaaaaagtacactgaaattaacccaattcatatacaaagaattcgtacatatatatctaaaattttagtttattaaatactacatgttatgtatataactgaatgaaattcctaggtaccatcgccgcatgctaaacaagttgttagcatggcaacacattatttgtcaccatcaatattatgcattattttgaccactcttgtctccatcgccggagcaaaaatcccggcgattatagtcttcggtgactcttccgtagattccggcaataataacttcatatcaaca

SEQ ID NO: 13606 - DNA, 3000 bp, Unknown
  misc_feature (1)..( 3000): cDNA_ID_3031051_gDNA_ID_2214639_Annot_ID_136197 3000 nt of promoter + ATG
cggcgcttctatctcctttcttttcccttgacctcctccacgcgtcttaggcggcatgactgatttcgaatcggaaatagaacggaaatactggtgaaagcaagaagaacgctcgattgaatttaaagaaatagggaatgttgtggttaatttcagcggttactaaggagaagaagtcaaaaaatcgaaaacggttgtaatgagaacaagaaacaatttcgaattggaaaatccctggaaatattaaggttttttttatttgattttcaaataaagagtaaaagtggttcgggtggtttggttcggaaacgaaccatgatttttctggtaattaataggttcggataaggatatactagtaatatccatctatttcgaattaagaaaaaataaataaattatttctgttttttacaatgattttttggcttcctctttgcaaaaaggactgccagacgatttttcgattttggaagaccgtggagatcaaaacagtctcttttgtctactcagtcccctcttgatctggtacgtttacatctgcaatctcctcatctctttaacccattttcatctcttcccttagagtttcaatcatcgaacaaaattattctgatttggtcattgatttgcttaaagaatgatctttctagttcaaagccaagttttttcagtacccatctcgatatctctttgtcccttgttgcaaaaatgtcgaatctttcatatgtctcatgttgagtaaaagctgcatacaaagtgttcgtaaaaatgccgcaacgaaagttacttgacattccagatcagattattatttttacatatagtatgcctatagaattatttcttgaaaatttgggcatgtcaataaattcttgttgcatagcgcattagcagattctaagtatagcacagtaagtaagttgcaatttggtttgcatatcgatttagttttagtatggtcagcttcttattaggattatcaaggaacttaggacttgcggtctatgtggtgaagcttctgtgatgatctctgaagtgtttttgttgaggacattatgagagagagaggtatagtctccaccatgtccaggataggtgtgttcttgtaatagggcttctggtaaaagaaaaagagagacttttccacatgagcttaaatctgtcgcattttactttctgtgattgaactttatatgcaaaactgtccattaaaagttaatttctgcttgatgcttgtgttggagtagggcttatggttccagtttggctaaactgtgtttttctttatctttggcatagaaagaagatccctgtttctggttatgatgtctcgacagagtcagttatttacattgcttaggagaaggtttcattcaccgtctaatgatgccccaacggagaccttaagaaagaagatagccgatttgcaaaagagtaagaagcgaaggaacccaataaagaaccagtttctagttgaggttccagaatcaagatcatatttagacacagcaacgatgcctatgttcctcgctgttgtaggtatcgcattatttgcaaaggtgctaatgatggtaagccttcctctgtcatctctttgaatgcgtctttcttgtcagtgactttagcagctgttaagtagaagttgtttcgtaattgagctgttagattgctttatacttttttgtgcaattgaattaggaaggatctgtggaaattgctgattctcagtattggtttgttgttagatcgatgattcgaaatcgcaagaaatgattgaacgcaagataaagaatgcaccacaggggcaaggcacggtacgaatgatcgatcgtgaggagtgggatgagtttagagaagtaaggccaagaacaccttttgagtcaaagcttgctcgcccaaatgcacaaataagaactggagaacctgtgcgcaaggtaaaccgctctattaaatcaccaatccttgcagtatcttaccaaatcatatcgtcactcgatgaccaaaccttttgcttgtttcctttttaatcaggatgacttgaaaaactggacaatagacgtgctaacaaatgctcttgaacgaaccgaagaaagtgttcgccgtggttccagttagattttctttcctcaattcaattggagcttcctagttaatagacatatatatatcttgagaatttggtactcaagaacactctcggtcatctcctaagcgaacataggcatcatttaggacagttgagagaaggaacagaagctgtcttgtaacggagaaatctttgaaatggagatatgaatattcttactttgttttggaactgctttgtgtattcatatgtgtttgactcacacatttcatcaaaatgcttataaagggtttgattgataactcggactcggttatgggtgtaacgttttaatatttaaaatcgcaaaattggaaccgcttttttaaactgagtgaaatatagcgttttgaaaaaagacgtttctggtggcttctgaattgaaaaatcagcgtttttacttttcacaatattcaattggagaatctttagaacttcaacgaagtagcgtctccggaatttcaggtaaacgtggcaagaaaaagccaaacggagaagcatccacgtgtccctccattagccatctcccacgtgtccattaccgtaccgacgaaacattccttaaccaaaggcttcccgaaaaaggacagagtccacaagcttcggattgttcacaacttcaaagcatcgaaaaggtttaaactttacgtttttctctggaacccgattcgaagaaatcatcaagaagtttcctttcactgatttctcaatctattcgtaggtaacccaattccaaaaaacgtttcttttttctcgatgccttagcttctttggattctgttgtgatctaccgattttgaatttgcttgatcgatcatcggatcactgtgattagtgttattgttcctttcctttgtgtagctttcgcgctt

SEQ ID NO: 13607 - DNA, 3000 bp, Unknown
  misc_feature (1)..( 3000): cDNA_ID_2713882_gDNA_ID_2214639_Annot_ID_136202 3000 nt of promoter + ATG
aaagagactcttgagatgcttgcttctctaggaatgtctgacactctcggcatctctgcagtcgacccacaacaagctatggcaccaatccctgctttcggcggcggcagggcacccagaagatactaagatggacgattggctctcttttttcacagttagggacaagaaagacttgtgtggttgtttattgtttcttttgattatgtcttaaactcaatgtgagactctttcgtattaatggtttttgagttatgtggaaccaaaattggagttcaaacattgatgatagtctcttatcatatatcctagtttttgcaacctgttaatccaggaggtgacggaaaacaccagaatgaaatgtgtcccaactttgatgatagtctcttatcatacatcctagtttttggcacataagattataaaacaaaatggtaagagattcttgtcgtaagcagaaaggtgggaagtagttactgaaagaaacctcaagaagtactaacctcatgatcttttcaactaaacgatcatcctgagcgatatgatgaacctttgtagagctggtaacgttgattacccaagatcctctatcaacttcacagagtaaatggtaaagtttcacccaatcaccaggtttaacccgataaaagagatgactgcttagatgaactctcaagatcgttccaacggttggaaagctgagcagtacatctcttgacagtaaagtatgaacagagagactgctaaacattgtacaccaaatagaagaagagtaagcgtaggatatggaaagcgtagagtcaagcctgaatgaatgactcagctcaaaacagataatctgaagattgaaaactcttttccttgctagttaatactcacttagccagaatagatgctgggggtgcatcagtcccgtcccaaacaaaaacagcgctcgtatcttcatcggcatggagaatctccatcacaagaaacagcagaaaacaaggtagtatcagtcaacaaaacataaaaggtatacagtttgagccaaaaaaagatttgtaagtaacaatgaagtgctttctcatgttaatagagagtatagagcatattaccctacacaccaaatcaaagcgttttcctatctacggagcaaggttttgttctgtaagatatactctgcatagctaagtaccaaaacaggaaatgaaagcttattggaactacattggtaacaaaccaaatcctcaccttcgaacaaggcaaaggaagaaacccatctactacaagcagcgtttactctttttccactatcaaaagtttgcatctacacaataaaaatccaaactttattacctcctccacaaaacacacaaggaaaatgaagactctttgtgccttaatgcgagtaaacagaatcatgtcgtcgtggttcttgatttgaggaagttgttcaagagtcctactatatacattaacagtaagtccaggacttggatacgtatcatcaattatccggagagtacaaatccaatctaagaaaaaaatccaactttcagattttgggtaaaatgttagagctttcacaaaacaaattatatgtatttgagtcaaatttagggggtttaggataagtaccattgttgcgacattgttttggttctctttgttcaaggacgataccaatgagactgacttcttggttgatgagtttaatggcgtctttgattttgatgagcttcggactgtctctcttcttcgccatctcccggctttgctacaacgttttcaagtattatcctgacgtcattagacagtgataatatggtgaaaatgaccatttgatttcgggaaacatgtcattatttttttttgtcaatatatgtcatttcataacttaactttaaagatgttttatacatcaacttaacgtatggttatttatatatatgaactaaatgttaactaatgatttgaaacatgagaatgtgcagaaaagacatatcactatctaggtataaacatttggatttatttgaattagaataattcgggttggagaattttcggattttatgattattctatttgtttttggttaggaaaggtgacgaattttgatcattttccttcggttttcaaagaaaaaaaaaacaaaaaaaaatagtcataaataaaaattagtttaaccttactaaattttgtctaaaatttgcaaaaaacaaattatatataattttaataaatataactaaatttttcttgatatcaaattatttaagatatgttatttaaaatatgttatttgttataaaattatagctaaatataactaaatgcaccgaattacatttagttattaattgttttcttagctttttcaatctcgtaaaattgttccattaatttttgtttttttcaagtttgaattaactacgtaaattaggtttggagaaagcaaaattagaatacttttgtaatcgaatgtctttgaagatttatagaacaaaagaaattgagcaaaattattacatgttccctagatgagtgtcaggaacttggtatatatggagtttagaagtaaggttaagaaaaaggttggcttcgaggaactggagtgcatttaagtggatgaaccgtgcataaggtactatacaagaagttttgaagggagaacttttgaaggaatgaactaaggaatgaacttttgaaggaatttgaactcttcctaaccaaagtatagaagacttcctaaccaaagtagtgtagtaaacgaaaaacaatcaaaatgtgacaaatcaaaggtaaagactagaccagtctctgctcaactgtatttttcaccaaccattgcaaaaaaaaatcgccgtcttactattaacccacgtgttaatcacaccaactaccaaaaatattcataatccaacttctatataaacttttgtttgaccataaattacaaaaaccatttgaattttctttcttcttcaaaagttcgaaacttttttttttccggca

SEQ ID NO: 13608 - DNA, 3000 bp, Unknown
  misc_feature (1)..( 3000): cDNA_ID_3594295_gDNA_ID_2214639_Annot_ID_188266 3000 nt of promoter + ATG
tctaaggttcctatttctctactttttcaacttctactacagaaaacaaaatcaaggacatcatcctagagattagtgtcaaattacgcaaaaacatgttcctactggagaagaagcttccatacataaatcttggtactattcaagaaaactgtgcttttcgaaaaccacaatgaagctttgaatttagtatgtcttagtcgttaagcgacactgtttagcaagcattctattcactaaagctcaatgattctctcgtacaagtttgatgaaacaagttttgtgttgtttacctcgtaactccttaagtaaacggaaagagaagccctttgaatcaacagtcacaacaacatgtggcttaaacttaaccgcagcatcaatagtctccttcaacttcacctagtatctcaaaaactagactagtcaatcaaaagaatctagagtagctttatatcaaaccattcaaaaggttactcacacggaatttatacaaatgtggcaaaagctcccatacacccattacagccaaatcctccattggaaacaacgaattcaatcctttcttgcacatcaaggatctatcaatttgtaagaagcaaagatacaaatgttccaactttatgaaattttcaattgagaatcaaaacttttcataagaaacttctaaattgggggaaacccaagtgcttaccctccaactccattgaaacggatgggtaaaggagagagctttttaagcgaggacataagacgagaaccgatgttatcgccggaaacttcgccggagacgatgaaaactctgagctccccatcgattgcagccttgtcaatcaccgatttagcagcttgaaatgatgagtatctcttagtgaatgttgagagagggaaacgaagtttgctctttgtaatctgaaacatcatttcggagaagagagagaatcaaaaactctgaaagagtgaaagtgacgttgttaaacaatgaactgcgatgaaagcaagatttctcatggggactttaatgggcctcttaagcccacttcttatcagcatgttattgaggcccatcagtcatagtgatacttgtttaggagacagtgatagttatagacttacagtgagtgattgtagatgttgaatggcctatgtttattgtttttggatctaaaacttatcaagtaagagtttttttcttctgttaaattagtactccatctgttcttttttgtttgattgtttagaaaaaaaaattgtttaaaaaagattattttttaggttttcaatgcaataattgttagttataattgataaattgtaaacttcgatacaaattattaaatattattggtttagagttattgaaaattgtaaatcacgaaaaacagtaaatttaaaagcaacatttcatatgttttcttaatatttgtgtttttcctaaaggatcaaacaaaaaggaacagattgagtattacttaggataagtttggggtttatagcaaaaagtttgatatttggggcttatagcaaaaagttggactgacaattataaaaatagtaaccaagactatcaaaatatttgataaatttagcttatctttttattaacctttaggattctgattttcttaaactaacttttttttaaggttggtcatatggataaaaaagattaaactgttcaattttgggttgtctgaaatctatataaaagaaaagctacaaacacaaaagcttattattccaaaaactctttaaatttattttctctttaagggaaaaatagataattgacttattcatcacaccatttctgcttttagatatttgtgaaatcctctctatgtttcttaatcgtctcatttaatcccggcgatagtaaatattgtaataaaagagatacacttccaatcatactttggaggaatgacatggtctcataattaagtcatgttgttggatgtttcgtgtttttcgtcctaatttatttgttatgtttcttgttgtgggctttagtttaaagagctatgttcatgtacttcagttctcattttggctataaaacatatacttcatgatcactaaaaatgcaaaaagggtgaacttatatcacatcacatcaaattcttgcatttaacaacgttaaggcgatggaatttgataaaactatgaaaatgttacttacatcaaactttaaaagcaaaaatatcatttatttttccaaagttaatcttaatattttgatggagataggattaaatctaaggtccttcagaatatttggcggattttaagagcaatagagaagaattctccactttttttttattattaatttctcgcagatgtaaaagcggataatttggcacgaaaactccgtatcgaaccacatcatatcacatttataaacaacatactccacaaatagctcgtttgagttgttgtttttttagtaaatcggttgacaaaaaaaaaaagaggattaaatctaaggtccttcatgtaatcaagatcctaatttcagaaagtttaactattttgagaccatatcgtttaaaacccaaaacattattccaacttgaattgatgatgagataagatatgtagaccctactcaactaaatatatcatttagtctctcgacagataattcctttcataaactgaaacctaactgaagaattaatacacaaatatttccctttttagtcatatccctaatcatataactacaaaaatttagagagtacacacatagcaaagtcaatccaacggtaaaagagagcagtattgatggagcggcaaacgaccaaacaacaaatcgtgctgaaaataataatgtctcaccagaatttttcagcattaattgaaacacacaacaaacctctccttattcaatgaaaccacatttcaaacactcatgttttcttataaagagaggcctctattcttttatacagctcatggaatcacactatcacaatcataaccacaaaaacaaacact

SEQ ID NO: 13609 - DNA, 3000 bp, Unknown
  misc_feature (1)..( 3000): cDNA_ID_3030995_gDNA_ID_2214639_Annot_ID_188265 3000 nt of promoter + ATG
cagtgccaatgttggtggctctctctaaaggcatgcatcccattggaggtaacccacctagtgagatctttctagcaccaagtccatgcaacttcttcacaaattctttcgcgattccggctagaaaatcttggtaaagactgacggaatattgcgaagaacggcccggaaaggcaaagtaattctcgaggaaatcgttggtccctatgcttatgaggtagagagagctttctatagtctctgtgcctctgtcttttccttggtatgctttaagttttgtttggtattctttgtagtattcgagttgtttccatagaggtagtaccgactacaatcgcaatcagtggaatataattactacatgtaggataatatcccaaaacaacatttgccaacaaaacaacatgtagtacaaagatttgttacattatataaccaagacaactatgatagttatactatatatctcatcaatcataaatgtctataaagacgtgtagttatgtaacatatcaatgtaataaatacaagggagagaaaagtccgtaccagaacatcagaagtggcgttgtcatagccagtggcagcagaagcaaaggtaacacctgttgcaaaatccgaaatgttataagaaggatccaagtacgccggaatgattggtttaagccctaaggcttcggacataaaatccgtcgcaatctttccgttacaaaaccgtccggtcggctttccaccaacaaagtcccgtccatatggctcaaagttgcttctagcaacagttgggatatagttgttgttcccggcatcaacggaagagtcgccaaacacgatgatcgcgggtattttaccggcaaatgttacggttgaagacatagctattaggaaaagaattgtgaagagacttttgaggtgtcccatagtgtttgtttttgtggttatgattgtgatagtgtgattccatgagctgtataaaagaatagaggcctctctttataagaaaacatgagtgtttgaaatgtggtttcattgaataaggagaggtttgttgtgtgtttcaattaatgctgaaaaattctggtgagacattattattttcagcacgatttgttgtttggtcgtttgccgctccatcaatactgctctcttttaccgttggattgactttgctatgtgtgtactctctaaatttttgtagttatatgattagggatatgactaaaaagggaaatatttgtgtattaattcttcagttaggtttcagtttatgaaaggaattatctgtcgagagactaaatgatatatttagttgagtagggtctacatatcttatctcatcatcaattcaagttggaataatgttttgggttttaaacgatatggtctcaaaatagttaaactttctgaaattaggatcttgattacatgaaggaccttagatttaatcctctttttttttttgtcaaccgatttactaaaaaaacaacaactcaaacgagctatttgtggagtatgttgtttataaatgtgatatgatgtggttcgatacggagttttcgtgccaaattatccgcttttacatctgcgagaaattaataataaaaaaaaagtggagaattcttctctattgctcttaaaatccgccaaatattctgaaggaccttagatttaatcctatctccatcaaaatattaagattaactttggaaaaataaatgatatttttgcttttaaagtttgatgtaagtaacattttcatagttttatcaaattccatcgccttaacgttgttaaatgcaagaatttgatgtgatgtgatataagttcaccctttttgcatttttagtgatcatgaagtatatgttttatagccaaaatgagaactgaagtacatgaacatagctctttaaactaaagcccacaacaagaaacataacaaataaattaggacgaaaaacacgaaacatccaacaacatgacttaattatgagaccatgtcattcctccaaagtatgattggaagtgtatctcttttattacaatatttactatcgccgggattaaatgagacgattaagaaacatagagaggatttcacaaatatctaaaagcagaaatggtgtgatgaataagtcaattatctatttttcccttaaagagaaaataaatttaaagagtttttggaataataagcttttgtgtttgtagcttttcttttatatagatttcagacaacccaaaattgaacagtttaatcttttttatccatatgaccaaccttaaaaaaaagttagtttaagaaaatcagaatcctaaaggttaataaaaagataagctaaatttatcaaatattttgatagtcttggttactatttttataattgtcagtccaactttttgctataagccccaaatatcaaactttttgctataaaccccaaacttatcctaagtaatactcaatctgttcctttttgtttgatcctttaggaaaaacacaaatattaagaaaacatatgaaatgttgcttttaaatttactgtttttcgtgatttacaattttcaataactctaaaccaataatatttaataatttgtatcgaagtttacaatttatcaattataactaacaattattgcattgaaaacctaaaaaataatcttttttaaacaatttttttttctaaacaatcaaacaaaaaagaacagatggagtactaatttaacagaagaaaaaaactcttacttgataagttttagatccaaaaacaataaacataggccattcaacatctacaatcactcactgtaagtctataactatcactgtctcctaaacaagtatcactatgactgatgggcctcaataacatgctgataagaagtgggcttaagaggcccattaaagtccccatgagaaatcttgctttcatcgcagttcattgtttaacaacgtcactttcactctttcagagtttttgattctctctcttctccgaaatg

SEQ ID NO: 13610 - DNA, 3000 bp, Unknown
  misc_feature (1)..( 3000): cDNA_ID_2703519_gDNA_ID_2214639_Annot_ID_188263 3000 nt of promoter + ATG
gttgtcgaccgctaataatttagcttaaaagagtcattcctaagaaatgttgtttacataggtaatatgatgcggttcgatacggatttttcttgtcaaagaatccgctataatatttacactaccaaaaattaaagatgaagaaaaacttgtgaattctttcttattgttccgtaattcctccaaatactctgagaaagtcgtccattcggttggagaagacactatattcaccaggtctgaacagtttgtaaaaagttatttaaactttattaaatacgagaacagtatttgataagggaaactgaaattaaattatttattttacaaaatttaataaatgtgacttctcgcaacgtcaaaaatatatgtacatatatatatataataaatgttacgcaaattatgtagaattcattgtcattatgtatgcatagtaattaacttttttacgtctacataaacgatttcgatcgttgtaaatgacattcattatttcaattacaagagaagtaataaaacatttttctcctcttttgtctctttactatttagtattttgatcactttacaagtttaaaaataatctactatttatatttatatccaccataaaaataattcacttatttgtaacaatttgtaaatttataattcgctataagtgttaaaatataggagattgacataaatgacactaaaaaggtttattattgcaaaaatgacacattcttttaaaacttgtacaaatagcacacaaaaattttaatcctctaaaaattaattaaaataaaatatagaaaatacacaatatctaatctcatttcttccaaatccaacagctttgccttcgaaaaacccgacgacttcgtcgctcaccggatcaaatctgaaatcttcaatgacactctcaactaagcccttgaatgagatattctcatctacctcacaaagggatccacctttgtttgtgtctacaagaaaacccactaaaacttatcattttgttcacactctccacaaacagagtatatctctaccatttatataccaaccctaaagaaagcaacaactaatacaataaacaaactagaagatctatagtataaaaacaccaaaaatctacaaaactttcaaatacttggacatgacttacaattatttcagagattcgcttgttttttaatgtttgtggatgatatattcctgagacaacaagactagctgcacaaagaggcaaatatgtcatgttaggtgttcaaaatcgattgattttgatgcttatttgcagtgaatcaattcacgaatcaacaaattcgcctaattccacattgaacgcccattataccaatattaatcgtctaatttcgtttccgaaacgtttcgaaaacgagaaacgcactacgggaagagttcccatgcaacatagattattattaatagagccaaaaaaaccggacactagtaaaccaaaacaaacatgggccattatttataacaaggcctaaaaatgaaaaccaagcccaacaagaaaactcttaggcaaagcaacacactctgtcatctctaaacgtggtgccgtacaaatgaatttcattgacttgtttacacgcgtccaactcgtcatctctgttttgtctatcgccggattggaatattcgccggcaaagagagaacagtcgaatgattctttcttgacctggtaatcatgtggaaaaattaacgattctcaaataagcaaccaaatctcttttgatttctactgagaataaatgattcagttctttttgttataatcttttccacaataccatgctttaatagatcttcatgcgctttcttaaacttccatatctctattgaatttttagatcttgagatctaatccgattagaaggttaattttttgaagctccatactcttccgtcaaagcacaaaccttagagactttcttcttcaaaattgaatgtcacatatatcagaaccattaatgtcacatatatcagaactattagagatttaccttgaagtccaatgtttttaaacccgacccggacaatgaaccggactaccttcttggttactgggtcattgggtcaaccaggttgaaccacgaatcaattttttttttttttttttaatagagattttagagttttagaatttttataaatttaaaaacaaaaataatcatatcatgtttataaaatataaaatcagattatgtttaataaaaagtaaaatcatttacaccaaaaaaaataatatatatatatatataatatataatatcaaacaataataatgtgattaaactttttaaatccaactaaatgtttaatactgtaacaaatatagtaggagattaccaatgccgaaaataaactaataaaatattgtgaattcacacaattaataccgggtgtctcactcaccattcgatttattttttaagacggcactgtgaagtcttcgtcgaaatttaaaatatcaaatgagtttaacaactgaaattttttttaaaaatgattaaataaagtataaaatcctatattttatttcaaaatgaagagagttttttaaaaccgacacccgactggttcaaccggttcaccaggtcatgggttaatggtgagtttttgtggggttttttcgtttttgaacttgtcgggttttagcactttatccaaaccggaaaaatgttcggatcacgatcaaccagtcggaccggacggtccgagtcgggcatgaaaacattgtaaataaccattccattgttgtcgcgtttgactcgaaaagctcctacagtgcacggtttgatgattaatcagtctggttaacgattatttgcaagaatcaattaatttccggcttaaccgattggttaaatatgattaaaccattggttaacttcatatctagaggacgaatttaaatccctgataaattctaaaaagtcccatcatcgccgtcgtctccgtcaccgtcgctgtgaaatg

SEQ ID NO: 13611 - DNA, 3000 bp, Unknown
  misc_feature (1)..( 3000): cDNA_ID_3031023_gDNA_ID_2214639_Annot_ID_188254 3000 nt of promoter + ATG
ctccatcggatccattaagtattcaaggtttgagatcaaagcttgatgtatatacatccaatgcttttttttctttctttttgtgtgcacaacatccattttgctttcttacttttttttcccatgttggggatttcgtatcattattatctgaataaaactcggatactgcaaactaatttttttttaatttttttttttgcacttcactgtgctctttgtttttttaatgttgttaatttaatttggtttatggattatgcctttgttataattattatctctactgcgtttgtctaataccatatctccaccaaatttactaagcagtactttcctatcatcacaaatacatttctctttcatttgccgctagaaataagatttggtacattaataaatgtaattgttatcaagttttcaattcaagtaattttagtcaccactcacatttccattgtgtgtttaaagattggagggttcagagttaatccggtattgtaatatactttataaaccagtactacttctcctccatgatcggcataaagcaaacgtctcgaggtatgtcatttcacggagagatgatgaaatagtttcagaagtacagctgccagtgattagtgaagtatatatagagactcctaagcctagtcaaagggaagagatctaacacaaaaaatcagaaagtatctaggtgtaagagttctctattcctcagaagaacttgaaggtttcatcgacaacaaatttcaagaagagcaaacatgagcggaagttcaaaggaaagtgtcatcattgtagcaagattggacacaaagctgatgtttgcaagagcaaagccaaggatatcaagagccagacaaacctaactgaagaagatatggttgcagtggtcactgaaaatataacatagtggaagacaaccaagtggagtggtactaggacatcggtgcaaccgcacacatctactctgataggaccatgttctccacctatgtgaagaacaagtaaacccttcatgggtaacacggcgatgttgaagattgaagctgacttcaggacgtgagcttattctgtaaaacgtgaagcatgtacctgacatgcagaagaatctcatctctggaacagtgctaagcaacaatggctttaccgttaactttgagtctgataaggtagtgattaagaaacatggggtgtatctgagaaagggttttgttaaggctggactggtcaaaatgtctgtaatgacagcaggaatctggattagcccagaacatgtgtgtgtgtggggggggggggggaagctttgcttaccactaactacatcctcaacaggataccacataaagtgactacaaagtcaccacatgaactttagaaaggcacagtaccttcgtacaaatacctaaaagtgtgggggtgcctagcaaaagtggttgtaccacctcccaaaaaggtcacaatctacctatacatttttgcagccattttgtgaaataaatcttgtagttgagacttatttacaatgactgccactagattttaattatttttttttaattaatggtttgaattttttatagcaattaattgggtaacaaacaaaaaatattcgaaatatatggcaatcccatatgtcacgcaaaatacaataaattatctttttcttatctcacctacgatattcactaaatcttaaaacatccaaaatttgaactatttgaattaactgtattaatttttggcaataaattaaaacaaacattgtaaaacaaaccaaaatacatttgcgaacccgtaaaatgagcaaacccaattacatgtgcacctaaaaacattccttatcttggtttgaatattccatggaattcaaaattccataacttttttggcataaaatcacaatcacaactaattccatatacacgatcttaacctcaaaatggtgcacaatcaaatcaaatcttcaaacaaaggaatatcctcaaaattccagctcttaacttactctcatatacattattaatatttaaacttataaataaaaaaaagatatcatgagaaatatagcgggacgtgtttgaattgatataaaatatagcggaacgggttcggattgatataacacaagttaaatttttattttattattttatcataaccaatttttttagttataacattaatataaaattatataattttaatactatattaaaaatagtaaaatttaatattattatatatatgaataaaatatttgttccgtggtgtaccacgggttaaattctagttgggcttaagaccgtagactgtatcttcatcggatatgcgcacaacagtagtgcttatcgatttttggtgtataaatcaggtattccaaatatccatgaaaatacagttatggaatcaacaaattcatcgtttttaaagatgttttcctttataaaaaagatcaaaaacgaacttctgaacaacgagatgcagcaacctcggaagctgaagacaatactttgggtactattactgttgaagaaacagaacaggaacttgaagaacatcctaggcggatcaaaagagcttgaaagagaaatctttatgtgatgatttcttgatggcgtttttagctgaaaacgtaccaaaacctattcagaagcaatgtctacccttgatgcaccttattggaaggaagcagtcaatactgaaatagactctattttgcaacatcatacttacgagatagcatatctaccccaaggctctaaaccattggggaagaaataaaattttcacaataaaaaagaaaacgaatggtgatattgataggtacaaggctaggcttggggtacaaggatttcgacaaaaaaaaaggtttagatttctttgatacctattctccggtaacgagaatatcttcaatcaagatgctcataggcattgcagccttactagatcttgaaatccatcaaacggatgtaaaaacaacctttttaaatg

SEQ ID NO: 13612 - DNA, 3000 bp, Unknown; identical to SEQ ID NO: 13607
  misc_feature (1)..( 3000): cDNA_ID_3031035_gDNA_ID_2214639_Annot_ID_188249 3000 nt of promoter + ATG

SEQ ID NO: 13613 - DNA, 3000 bp, Unknown
  misc_feature (1)..( 3000): cDNA_ID_3031051_gDNA_ID_2214639_Annot_ID_188243 3000 nt of promoter + ATG
ccgccatccgcaacctatcctttgatctagccggttccatctccattagcttggtttttacgtcttcacgtctaattaccccggttttgaagtacctgttggcgaagttcatattaccagcactctaataattagctggataggccttgcagttgaaaccagagatcaaagcatgctccctaataccatagcggatgggaactccattaacaacgaaccaaacctccttcttcttctcaatagatgtcgttcgaagaaaaagcatccacatcctcattaacttgtgggtatatccggaaggtaggtgatagatgtgcttgaaactcggatgctccataaaataattattttcaacattcgttagaggatgttccaagtcagcgaaggtcttcaacacctccgagatataacacctcgttgctaacttcatcttcttggtatactccgacgccgggaagtacataccaagtggctgcattgccatcgcttcctccatatcctgaaagaaacaaacattcattcatatatcactcaattgtaaatagtatgccacattattactctgtatttccaaaaagtattccccgaaattaccagtattacacaaatcgtactattcatatatcactcaattgtaaatagtactgccacattattactctgtatttccaaaaagtattccccgtaattaccagtattacacaaatcctactgttcatatttcactcaattgtaaatagtactgccacattattactctgtatttcctacaagtattccccgtaattaccagtataacacagatactcctattttactatatagtatttctcaaagttactagtactaactactgataaatcacaattgtagtattactctaaggtattacccacatccgccaatattacctaaatatcaacatagcatttcccaatgttactagtactgtccacagttcacaattgcattattacccaattagatcggtattacgaaatggaatacttaccacatttgcgatgtcctcgtctatggtcctctcctccacgggtttttccactatcacgtcctcgtctctctcgtcctcgtctccctcatcctccacggacttttccacattgacgtcctcgtcgctcgcggagctcctctcctcctcctcctcgataacggctaggccgtcatcttgtctctccgcctcttccacgggattagcacacgcgagttctttgtttgtctccgtctcctctgaatcggaatcggagcccaaggtttggctactactccctgattattcttcttcacttccttcttctttttcattttcatcttccacctcatcagtttgcatattctcttgagtttcttcagccggaatatgcttcagagcatcataaaacgtagaatcatcaagcatcgggctctccgtcgttggagccgtcgttggagccgttgtcgttagagccgctgtcgttggagccgcattggttgccatcgccgtcgcaatcgtttgtgccgtcgcagtcgtcttcgccggcgcctgaaccttcgctttcttcgccggcgcctgaaccttctctttcttcgccggcgcctgaaccttcgctttcttcgccggcaccttctccttcactttctccgccggcgccttaactttctctgtcttcgtcggcgccggcgcttctatctcctttcttttcccttgacctcctccacgcgtcttaggcggcatgactgatttcgaatcggaaatagaacggaaatactggtgaaagcaagaagaacgctcgattgaatttaaagaaatagggaatgttgtggttaatttcagcggttactaaggagaagaagtcaaaaaatcgaaaacggttgtaatgagaacaagaaacaatttcgaattggaaaatccctggaaatattaaggttttttttatttgattttcaaataaagagtaaaagtggttcgggtggtttggttcggaaacgaaccatgatttttctggtaattaataggttcggataaggatatactagtaatatccatctatttcgaattaagaaaaaataaataaattatttctgttttttacaatgattttttggcttcctctttgcaaaaaggactgccagacgatttttcgattttggaagaccgtggagatcaaaacagtctcttttgtctactcagtcccctcttgatctggtacgtttacatctgcaatctcctcatctctttaacccattttcatctcttcccttagagtttcaatcatcgaacaaaattattctgatttggtcattgatttgcttaaagaatgatctttctagttcaaagccaagttttttcagtacccatctcgatatctctttgtcccttgttgcaaaaatgtcgaatctttcatatgtctcatgttgagtaaaagctgcatacaaagtgttcgtaaaaatgccgcaacgaaagttacttgacattccagatcagattattatttttacatatagtatgcctatagaattatttcttgaaaatttgggcatgtcaataaattcttgttgcatagcgcattagcagattctaagtatagcacagtaagtaagttgcaatttggtttgcatatcgatttagttttagtatggtcagcttcttattaggattatcaaggaacttaggacttgcggtctatgtggtgaagcttctgtgatgatctctgaagtgtttttgttgaggacattatgagagagagaggtatagtctccaccatgtccaggataggtgtgttcttgtaatagggcttctggtaaaagaaaaagagagacttttccacatgagcttaaatctgtcgcattttactttctgtgattgaactttatatgcaaaactgtccattaaaagttaatttctgcttgatgcttgtgttggagtagggcttatggttccagtttggctaaactgtgtttttctttatctttggcatagaaagaagatccctgtttctggtt

SEQ ID NO: 13614 - DNA, 3000 bp, Unknown
  misc_feature (1)..( 3000): cDNA_ID_1665243_gDNA_ID_2214639_Annot_ID_188236 3000 nt of promoter + ATG
accaactctagacaattgctcgagcaattgctccggctcgggcggtttagagatctcctccacaaccaaaacacttttccgattattttttgcggatgttacataaacaaagacatcctcatcatcacaaacgttcatttcttcctctactccgaacaaccgtggattgtacctcatatgcaattttaccttatttgcatctaatccaagcttcgtcattatcctatcttctaacattgagaaagtaatcttctcccctaatgtcttcatcatcacattatacatgcgaccttggaatttaaaatatatgatcacgttctctttcattgtaacctgccaaaacaatacacatactcagtcaatattactagtattaccgattctagtacattttcagtaatactagtactaattctgaaatattacatgtgtgagtaatactattacatatatgaaatactacgtgtctaagtaatactggtgctattaaaacatattatctatataaataacggtactactatagctagttcgaccagtattattttcgcgacaagaacaaatattcgatttgagttcaatttagtatgaatcagcatgtgaaatcaattgcttacccattaacagaccaaatgaagcctaaatctatacttaaacttctaatgtaggtgctaaaacacaataacccaaatctaattggattgaatctcaaaatcttcaaaatatgtaattcaaagcttttgaagctctctccatacctggacttagtagattgatgcagcttgcaggaggagaaaaacgacaatgcggctcgccggagctcgccggaggaagaagcccgaagaagaaaacgagctcgcgctcgaggttcgtttttttttttgttttcagtttttgttttttttttcaaaatgttttcagaatattaattattcattcaaaataaaatataggggtaaattcgtcttaacacaattcattaactcaaagttgatatgaagactctaaagtggttttgcagattatttgttccacaaaggggacacaagagatgatcactctccaaaatcgctaatcttcagaaataaaaaacaattagtttccttctgaaataacttcggttatactttggttaaccgaaccgaaccgaaaattgtgaagaaccgaaattactcatgagagatgagttaggttttgtgaaatggtctggaaccaaaccaagtcacactctctcagtctcacctagtctagaaagaaaccgaagtagcaacactcacgtgggcgaagtttttgtgtggacaaacaacaatattggatatgcagacgtttgcttcggaagtgtttgtttcatgcttgcccatttttgccttcaaaagatgacaattaacacaaccaaaaataaacaatatgacaatggaagtagttgaacaaagatgccgatacatacgcccccattttattttgtcatttttagataaccatcttctttttgttatctataacacaattatcaattagttaggacttatgagtcataattagtactttttcatcaaaatttagtcttatctttcccaaaaaaatctaaatttagtcttaattattaagggcatcttcaaccctactatattttagagtaaaaattctaaattattctccaaccctactctatattaaactttaaaatagagatttatctataattgctctctatatatagagtaactctattctttattctattttagagttgaatttttttatttatactttgatccacaaatttaaactttttatttaatacttattatcatttcacgaacaacaattacaacatatagttttataaaaattaacaagcaaagaaatactaaaattaaaataaacaacataagaaaactaaaacataaaactagtaatttaatattctggtaaattggttgtagatccgccaagataattaaaatattgtccaaatgaagtagatggaggaagagtttcttgatcttgatattgttgttggacacatcatttttgtaaaatctgtgcttgttcagtctcaaaatatgttcgaacatttgggttttgaaagaaattcaaatcataaaatattttttttttcttcttttatttgatcatatgtgggaaaaatactctaatggtgttgtttaaaataaaatttgtaatgttttattattgtcatatgatgtaatgttttttatatataattagtgtttaatttaaataatatcatattgtatgagaattttgcaaaactataatatatatgatcaaattgtaaattatataattaaaaagtactagtatataaaatataaatataatattgttaagaatattcttttttatagtagaaaatagaaaaatacattagaattaccctattttatagtaagatatagagctacaaattggagatggtctaacccaacaaaattagtgttactttagtagttctttatttatttcacatggctaattattttcttatagttcattaaagagtactttattttgttaaactttaattaaagagtactttatttttgtaattaatatatatgaactggaaaataattagccataaagatcatatgatccaatctatgccattaaaatgctctgacaggttccgacttgtttctcttgtcaacgcccaaattcgactttttttttgtttcccttaacaaaccaaatttcactgtttcattcttttacgcgtcgagagtctcctccatgagaagcaaattctcagcttcttccgatgatctagcttcacttagatctcatgtaagtttgtttatctcccgatctgattttctgtctctctaacgttgttgttgattgatcatgagattttgcatttacccaattcgtttcaggaactgatttggcgagtttgatgataaagtttgtatttttctttgtgggttgatttcaaattgtgagaaagattcaagattttttgtcgtctcaatg

SEQ ID NO: 13615 - DNA, 3000 bp, Unknown
  misc_feature (1)..( 3000): cDNA_ID_2713874_gDNA_ID_2214639_Annot_ID_136205 3000 nt of promoter + ATG
actactgaacagaaaacaaatgcattttggagcttttaattggatacgtgaagcttggtcatggagcaaacgttttgaagaagttattttcagttggacgccgagaacgaacaaccaaccggctgatatgcttgcaaaatctcatctgccacaagacacttcctttatttatcattactttgtaccaaattttatcacaaacgccctacactgtaatcactattaatcatatcaattgaaagaaattgttaaaaaaaaaaaacctggggaaataaaccaaaccgaacttacggaaccgaaaccgaagaattaaaccgaatcgaaccgaaccgaaaatttgaaataaccgaatggatagtaaattctataaccgaaagaaccgaaaccgaatcggtaccaaattgaattatttcgggtaatcaaaaatatcggaaatataattatatttttaaaatattagttatttttatactaaataattaaaatacttgaaaatatatataaaataataaaaatacttaaaaataactgaaatatcgaaaaatatacaaagcaaaataatcgaatggatactaaatatttaaaccgaaagaaccggaaccgaaccaacatttcaaaataaccgaatggattaaacattagaaccaaaagaatcgataacctaatagaaaccaaaaccgaatgaataacctaacgcccataactacttatatctctctctcgtctcgccgtttttttcccaaaatcggttatttttgttttcttttatcccaaattcgaaataacggttaaccgaaataaccaatcggttcagtgcgaagaataaatctgagaatgtttggcacaaaagagaagacttttgatctgtggagattgcagtgagaataagtaatgataatggatataaaatttgattagtgtagaacttggatgagatattgtcgatcataatatttgaatatatatttttgaattcatatattgagaatacatatgccatgaaatattatatagtgaggactagaaataggagaactatcttgatgagaactagccaggaggcctagacaacaacactcaactccaccatcccaacttttcagacatttcccttcttcatatccttcatgtaagcatgttgcattgcattctggtgtgctataacatttcatctcacactgtttgattcctctgaattgccctatttgattcatatatcaacagtaaaaaaatagtcaatagaacatttaaagatttttattgcccccacataattttttttcttcttctttgcatctactatttactatttagactcaagtggatttccaccaaaaaaaagactcaagtggcaaaactatcattttcttaagataatctatgaaaaaaatgagataattacttataaacagataaattttttacctgaaatcatgggaatatagatgaaagtcaacatcatcaatgaaagtattataagagatgacatttttgtgatggccattagatgtttcttgagaatacaccaagttttttttatcggaaaatatagttagattcaaaagaaagaaaaacctagaaaaagtaatcaaaatcagtgttaagaatccgtaataagaggacatctcttgtcttctttaaaaaaaatattcaacatttttttatgaagtttaatattatatttaggatttacctttctttttggtcaaaatattgatgatttaccttttggttttataatatttctattattcattttaatggttttgactagaattgaataaattaacatcatatgaaccattcaaactcactttaatagatcttccataacatgaaagaatttatcaataatcttccatgatatatttttttaatatatcttccatattaatatattatatagtaaataatatttagcaaatattttatttaatagttttttacatgataattttagtcatatggtttcatcatctagttgcgttccccctttggtattatgtttttttttttaaagtagaattccgcaaataccgattttatgataccgctgtttttggtctatttaaaaaaaaaatacaaaataagatatcttaaaaatggtgtttgtcaaataaaacattgtttataccgcatttataaacagtcttaaaaagttttttaattaaagtgttaataaagtatcatagatttttgaacaacttttccctttataatatttttgaaatatgatatcaaaaaaatgctgtttgtcaaatataattttgttttgtttcattaagtataatcatatgtcagtttggtacaaaaccaaatcaaattggagacaaaagaccgaaacaatttcggttctaacaaaaaccagatttgaattttggtacacaaccaaatcaaatggaaacaaaatacttggtataaaaccagaattttggtttggtataaaaattggaaacaatagaccgaaacaatttcggttctaataaaaaaccagaatcgagatcactgcaaaccgaaccaatgtaatcctcttcggttccaatttttaaagtcaccgtgctttttcgtcattgtctgagaggaagaactgttccgttgacggagcttgatggcccaaccaccgaatcgtcatttctcaatagaaaaaccctttctttgtgattgcttcgttccacgaaattgtaagccaaaggaacattcatcgatccataatcaatatgcacttgcttctaacctcgttgacttcttcttcttcaacctttttgttactcgattaccaattcattgcctggaaattcttgaatcctatcaaagtcttctcctttgatttgtataataaacctaaagtgtctcacagatacgataactcagtttcctcttaaggtctttcttctctcttactaacatttacttttgggttctgttttgattgattgaagcgacatgggtttgacaaaaaactttgcttttcttgtgttttgttgtcaaagatactgtagc

SEQ ID NO: 13616 - DNA, 3000 bp, Unknown
  misc_feature (1)..( 3000): cDNA_ID_3031023_gDNA_ID_2214639_Annot_ID_136208 3000 nt of promoter + ATG
aaattactccaatatggtacattttgttatgtttatatactcattttggggagcaatacagatatcataaatcaaactaaaaacatgctcaaaagatattttgaaatgaaagacttggatctagcaaatgttattttggttataaaaatcatatgaactgatgaaggccttaccttgtctcaaacccactatgctgagaagatacttgatcgtttcaagcattcctcaaatgggattgcaaaaactcgagtagatcctcaacttcacttgaccaaaaactcgggtgaacctatgcaacaagtagaatatgcaagagtaattggcaatttaatgtacttgacaaacagtacaagaccggatctaggcactctgtaaatgtacttagtcgctacacaagcaatccagaacataagcattggaaggctataactagatttttgaactacctacgttataccaaagatcatggcttacattattgtaaagaacccgcagttttggaaggttacagtgatgccaactggatcgcagatttcaaaaactttaaatccacaagtggatacatctttacacttggaggtgtagcagtatcttggagatcttgcaaacaaactgtgttagccaaatcaactatggaatctgaattcatagcgttcgatacaactatagcggaagacgaatggctcaataatttcttagaagacatcccaatgtgggggaaacctgtgcccacaatacgtgtgcactttgatagccaattagctataggcagggcacaaagtaccctatataatcgtaaatcttgtcacatcagacgacgacataaaactatttgacaacttatctcaacttgagtaatcacgatcgattacatcaagtcagctgacaacctagcggatccatttacaaaaggtttgaatcgagatcaagtttcaagatcatcaagaggaatgggtttaaagcctaccacctaagaggaagtttgatggtaaccccacctacaaagattggagatcccatgacacaagttcaaagagacaactaaatcaaactaaatttgttaaagcactgagagactgttgtctctttctagttcctaaaatgatgtatagtgcttcgtgtatgtgtaaaggaaaaagcattgcttttaaagatttgaacctagctttgtaagatttgtgaagtacttacaagatacttctttaaaatacaagcaattagaaaatcatcttgtgagtgtgaaatggggccgtttctagtagaatatgtgaggctatactctccaagttcactcatgattaaaaaggcatgttcaaggccacagtgaacacaaatagagaacctcgttctaagagaaaatgaagttgtgttatacatgttgtctaagtttgcattaaactctggatggttcaagacatcatgttcaccataaggccgagtaaactcgataggtactaacaatgagtaggttcaaagctgaaaaacaccaccaactcagacacagttagttttcgtgtatactctcgaaggtctatctagtctagctagttggattagtccatatgattagtaaattcgtcatatgtttagacttatttctattcatgtgtgggattgttggaaatttttgacataatatttttccgatgactttccggccaaacggctgaacggaattgttgggtcgttagtgcattggaaagctggtaaagagtactacaaggtggtatactcatacgtcaaaaatgaagttgtattgaatgagaaataaaggtgtaaagtgggaaactttggccaaaccaaaccgaactgaaccgggcatgtgtcgggctgcggattgtagggttgtcacgacgctaacttgaaggctatcgggcttgtggaccgtcatgcgtgtgagttattctgcttgttgagttgaatcttatggaaatattcaatattctcaaaatatgtcatattctcaaaatatgtcatattctcaaaatatagtatattctaaaaatatgcaatatcttgagaatattctcgaaatatgccatattctaaaaatatgccatatcctgagaatattctctaaaaatcctatctccctctactatataaagaaacatagcctctcattatttttcaagatcggaaacacaaaacactctaagttctaaagtctatgctctctcttgcttcttaaaagtaagttcttagtttagtagtttcgagattatatcgtagatcaagtttgcttgagtctaatactcgtgtgctcgggtattagtttgtgatcggatgtatcctgacattcataaatcgtgattatccaaaaagcagttacggtcgatttattgaattaaagaaaaatatatcatatcttttctccgtgttttactttttgtctttatttactgttgttctaatttattattgttatcgttgtttcaaataaatttgtacttgtttctcaattcggtttttgagctcttacaatctcaattcaataaaaagtcagtttttagcttattgctctagacggattgagaattttttgaatttattttaaaaaaaattctaaatcttctaaaaatagttttgctattatctttgggtgcttacgcggaaggtgtatcgaagaacgtttttacttctttctttctcctctttctaactgatttgcaaatgctacgtagcgattgttgtggacagtgtcttatacaaacatctctagtttccacgaacgctcatagttgagtgagtttgtgaaacgtgaaacaagtttctgcaaacgcttcttaagctagtttgcaaaactaattcggtgtaatttagttacctgaattttttggttaatatactaattagatcagtttttccgtgaacaaaaggactgggatcaacaccaacagcgaggtcgttgacacccccacagttcttgagactccagatgagatagctttgcatcttgcgaaagaacttgaaaagacacagatcgacgattctggtatg

SEQ ID NO: 13617 - DNA, 3000 bp, Unknown; identical to SEQ ID NO: 13610
  misc_feature (1)..( 3000): cDNA_ID_2703519_gDNA_ID_2214639_Annot_ID_136214 3000 nt of promoter + ATG

SEQ ID NO: 13618 - DNA, 3000 bp, Unknown; identical to SEQ ID NO: 13608
  misc_feature (1)..( 3000): cDNA_ID_3594295_gDNA_ID_2214639_Annot_ID_136217 3000 nt of promoter + ATG

SEQ ID NO: 13619 - DNA, 3000 bp, Unknown
  misc_feature (1)..( 3000): cDNA_ID_2703558_gDNA_ID_2214640_Annot_ID_136218 3000 nt of promoter + ATG
tgaagacggatgtggtgatactccctgcaaatttaacaatacttttgaaatttttacaaatctatcgacttattaaatcaataaactcaatctaaatccaattcccattaacatttcttctaaatatgattatggatatcattatagaattacctgtcataaatgtggtagaagcattaccaaccttcgaaaagcgtacaggtggaagatatgattaaaccatcatgacaagcgtctggatttttagatctaggagttcttgaagacggatgtggtgatactccctgcaaatttaacaatacttttgaaatttttacaaatctatcgacttattaaatcaataaacttaatctaaatccaattcccattaacatctcttctaaatatgattatggatatcattatagaattacctgtcataaatgtggtagaagcattaccaaccttcgaaaagcgtacaggtggaagatatgattaaaccatcatgacaagcgtctggatttttagatctaggagttcttgaagacggatgtggtgatactccctacaaatttaacaagacttttgaaatttttacaaatctatcgacttattaaatcaatcaactcaatctaaatccaattcccattaagacctctaaatatgattgtagataccattgtagaattacctgtcataaatgtggtagaagcattaccgaacctttgaaaatgtaaaggtggaagatatgactaaaccatcatgacaagcgtctggatttttggaatctaggattttttgaacatatagtgtggtgattttttggggagaagagatcattgttgatgtatgttgcctgagttatggccgcgacgaaaaaatagactgaaatgtgtgaaaagatggtataaatatctttacctaggtttctaggttttgattactgggcatgtgaaatgggttttaataaatgggcttgggcttgtaaaattgtggaattaagctattgtaatcacgcatatgagttatctaattggataacttattagattgtaataatgagggaaaaaaaaagattattataatgagaggtccacatttaaaatgatgtgacactcttagcaaataaatataacatggcaaaatttagaagtgttgtcaaaaaacgataagcgtaaaatggaaattgtgactgaaccaccataagaagcgtctggatttttggagtccgagagatttagaaagtggagtgtggttgttttttttagagggggaatgttgttgtttatgccattagagtcatggtggcgtcgaagaacaataagtatatgtgggaatcagagatgtgtgtaagagaaacaaaaatttatttggttgggttttgaattttcaagaaaatgttaaattatttcatcgagtttctttttttttctctatgttaggaaatggtatggtcaaaatctattgatgatggtgatgcctaacattaacaaaaccaatagaagggagacaagagacataagacatcttcttgaaattcatcaacattacaaacttactaaaactcctcctcccaatcccaaatgaatatgtacttcttaaagccacgtgtctttctctttttcattaatatttatttatttttttaaaatgtgaaattatttctttggtttaatatctctggatcattcttctacaatgatcacaagtatttagatcatgtgtaaatagtcccatcatgaagttttaattaccaatcggtattgcacatcaccgattggtactgatccacctgcacttttgtcgatcttttgggacaacgaaaaagaaactaatttaatatattttgttatccgctcgaagatattaattataagctttaatttggaacttctttatatcaattatatatatatataacttctttgttaatagaaaatgggaacgatccaaaacttaagacatttgatctccacaaggccgtcgacgtacagagaagaagaatggccaaaaataagtaaataaaagagaagaaaccgaggggaagatgattttgcattgccacgacccacgagcatccatcggccatcgcctttttggattcacatggcaaagacaaacttcgatcttccttttttctcgtgaagttattatctctctaatttctagtctggtcgaacctatatttcatcatatatatcattatttaattcatatgctgatgcatgggacattatcatgttaagtcattacaaaaaaataaaaataaaaataacttacgttggactctcagtttaccttctcctatggatttcacttccttgtataagaatatacatcttactcaaatcatgatttatatgcaattttcttttgtgagattttttttacatataaaccagaaatgttgaaagaagaatatccaaacacaacaaaataatagaagaaatctcacgtagaacatggaaatggaaaaagaagtgaactcgtgaaccgatatatttaccaaaagtgcacacatagacaagtctttctcattaaagcccaatttcacactttcacattttcgtgacgtcttttgaagttttgaatacgaattaatgttcatgtacgctataaagacctaaaaggttgtcatatttctccactttcatcttctcttcacaactatcctaaaccttttttccttttcttcttcttcactctctttcttcccggcgtcactatggcggctgccgccgggtaaaggcagcgaactcgaccacatcaagaatgaatccgttgatctggtatatatatttacgtcttcttagttttctattatctatatgttttaaaaaatctttggccctactaattttaaattttctgttacataaaagatacatatatgtatagtacgtaactagtaactactttgatctaatcagttaatatatttgtcccatgcgatttactcatgtttccattagaaatgattagtcaaaattatataaatgatgggtctaggtacgaataccc

SEQ ID NO: 13620 - DNA, 3000 bp, Unknown
  misc_feature (1)..( 3000): cDNA_ID_2703554_gDNA_ID_2214640_Annot_ID_136223 3000 nt of promoter + ATG
tattaaaaaattaatcattatctcatagatattaatacatttaccaataatttatctcgtggaggttacattgacttctacaaactattcaaatcgataactctaattcgctaagtaatccccaaatcttttctcagtatctttggcataaataaagccaaatcttctcgagtgaatagcaataattatacatcatggcttatatattgtatttttctgataacaaatgtgcattatttctatcatccactaactaataattaaaaattcaatattgaccgtactattataaaaaaaaaaaacaatggttggaagtttgaaatacgtaaacaacaaaaaaacaaaaaaaaataaaacttcgttcgttagtaccgtatgaattcatagatacaacatatacaaaataagtattttacccaacatgtgtcttctttcactggtttgatctcattcgttttgcatgggctaacaaaacaattatttcaaatacgcgaagattattatttctatgcgaccattttatagaaaagataatttagataagatataaaggagacatttttagaggagataacattgaaatatatagtataatatatttttagagattcataaattataaatttagaaaaggacattaaaatttgatatagaaaaggaatttaaaagtaagtaaaagtttacaaaatcagaaatgaaaaaataaaatgcttttaaaaaaaatgtagacgtgcacgacaatcatatatattagtcggttaggtcaacgattcccatgtcgctaatttataatgcattccgttgacaaatatttaaaaatgtttcaattatacatcttgaggtctgtttttgcacacataacacgtcatatatcattgacaaagaaaacacgtcgtaattttctttttctttttctttcatgtagtcttcttggcttaaaagaattcagctaagtaagtatggttgatattttcttctacaagtgataaaactttggaatttttgaataagtataattacaagaaaacactgcatataacaactacaagaaaacactgcatataccaaaattatcgaaacatgtatattccgacaaactgaaatcaccggaaaacggtggtgtattgaaacaaagagttgttttaactgaagtttgaaagtaaacaaaagattaaaaagtaatttatagtaatgttaatatttactcatgtttctgctttggtgattagtaataaatcttctaaaatctatatgccattttataaatgcgattaaaaatttaccaattaaaccttatttagaaaaatgtagagaaaacttcaaattatctcctcaagtaggattagatcgagctgcaaattggctctttttattcatttaatttcctccattcctaactgtattggtattgtttactttatttctataagcaacaaaaaaaaaagaatcttgtggacaggtgacaatttatgagtcagccagaattgccacgtgtcggaagatcagttgccgtggtaaaaggtgttttttagattctcaaaaaaaaagtagttaaagagaataatatcaaagagtcaactccacagttcacagatccaccgttggatctaacttttggattatcaacggcccagataatagttaaccggaatcactcggttaccgaggtagtcaatagttctgtgttttaaaaagaaatgcgtccatgtgatcacttttattttatttgtagtcagcttttgttttcctactttgtcgtttttctttatcgctgttctcaactaaagacttgtagactatactaataagatatagtcaacgattgtcgctgttattatagcctttaatctctattaatgattgttaattgttccacaatctgtgtagattaattaggtaaaattaaaagtcaagaaaagattgttttcaatttactagttttccagtcaagacgttttctagaaggctatgaggtaagaaaaaaaaaatatatattaggtgcaaagttaatatgggagtcaaatattattttcaaataattattattgtcaatgcactgcaaaattagtaataattctagaaagaaattgaaataataaaaatatgctgcaaacacgagtttggtatgtgtgcaccatataatattgacaagttgtagtgttggttgaagctaaaaataacacaaaaacataaaaagaacatgaataacgcctaaaacttaacacgaataaaataaaaaaacataaaatatattatcaaaagtcaaaatcacaaaagaaattaataccattttacaattagctgaaaatttattctatcaaaatccagtcctattaaagaaaaatatgtgatttgagatgaaattaatattacatattttgatttggttcaagaataaattatggattttggttaaagaccttctaatattccaaagaaacaaaaaaaaatcagcccaattgttcatacaaataaaaacaattcattacctttaattttaaatttattgacttgaacttgaagacataagatacctaataaaagaaaaaatagatatgagactttaaaaaagctttatgattttctttagacaccatcctttaatgttttttatttgactttttgtttctttgaaattcctttaccaccattttccccaaattcaagtttacgcacaatgattcctttattttaaagacacgattataaattcttgctttgcacaaaagaagaccctacatatctcacaactcaaggagaccaaactttgattactttattccatagaaatcttcaactcaatctcagccgttagatctaaagcaccgatttgactaaactccatcttaaacctactcaaccggtcactcggtcacacccataaccccatatatcacgccaacgccattcttttttcttccagtttcgctctctcattcatcaaaaaaaacttgcacatcttctcagatcttcaagtttctcctctggtttctcatcatg

SEQ ID NO: 13621 - DNA, 3000 bp, Unknown
  misc_feature (1)..( 3000): cDNA_ID_2713894_gDNA_ID_2214640_Annot_ID_136226 3000 nt of promoter + ATG
taaagaaaaacaatcaaactctaataacaattttaagaaaaagatgaatcatgtggcctccgtgtctaggtcccagactaatccgtgggtccaccacggataaggcactggggccgaagtttaagaatccaagtggccacacaggttatgaatcaagatttgaataaatatacctgaggaagaggcaaacaagcgatgaggtcaacgatgaaatctgatctcaagtatcttctagcaatcaacttaggatctttcacaagttctccacgaccaaacactctagaagtacgagaaacataagctgttctgaatttgatcacaatgtgcaaaacatagaacaaatctgctaatgttctgaagaaagtgataacaattccaagcttcaaatctgtagtcatacaagaagatcgtccaatacgtttgactgaagaaagaaagaagaacaaagggtcgacgtaaagtgcaacgagacaccagaagaggaaaactctgttccattgaagcactgcatcaccaccaggatctagaatcttgtctctttcgatctcgaaattctctggaaacactttgaatctaccaaatcttgggattttcaaacgtgttttgctcttctttgggagtacttcttgtttcataaatggagccgttgttgatttgaacaatggtactcgcttctctcctacttctatggtttgtttctcgtctccatagaatctgtcacacccatcaaccaaccaaaaaaaaaaatagagtttgtgtttaaaaaataagatcaagaaacgaatcattccaaaaagaatgtactaatgcaatgtataacgatcataactttattgggatcgtaaatgcaaaaagccaactttattttccatcattgagagaacccaaaaatgaatgttctaaagaagatgaaaaatctagaacctgacagtattgtctctcttgaactccattgtttgtagcaataaaaactttaagctaaaacaagaatagattgttcttcttgtttaggcaatgagaaacgaatcagagcatgagaagatattattcatgttcagaaaatggcagagacagagagagagatgggtttgactttacgtgaaacaacaaaagatgaagagagagagagaataagtagaaacagctaatgtaatgcagctaagagagggtaaaaacgagtgaaagagtaatactaacaaaacttttgttgttgttgttgttgtttttattttaatgttctcttggaaattgtaaagaaagagagacagagaagagaacgtgggttccattaaagccaaatttgtatataaaatttttgttttgaaggagatgatgatgatgatgatgactctttctctctcgagtctcatactatctcccgtgtgttgcgtacaagattctgtattttacatttttatatatgacttgtggaagtatataatatgtctacatttaataccatcacaaacttacaaaaagaaaaactcttatactgtattctatatattgagtaaaaaaagttatcaattagaattgagaaaatactaatgtttaaaatttcgctagacgctaatcggacggttgaatagtatctaatatccaataaattaagcagaagtaatattatttaggtaatgtgggagtttctcactaaaactagatagtcttaattgtttgtaaagttgtgtcttggagcaagggttgtttgcattagtccggtcggtgaagttttcttggctagactgctaggatgaggaatcaagtgctggacgtattgaaacattatccggacatgataaagacaataacaaaattgcaattgaacttcgtaatcatgaataagtttgttacatttgcttaaattaattaacatgtcttttcttttagttacatatgagtatattaatttatgagaaatctgtgaaaaaaaataaaatgacttctcaaatttttacccctaacaattctgatggactgtatctttatagttgatgttttagaagaaaataaaatgtttcaaattagatgatgatttcaattttaatactaaattaattatttttgactatttatatcatagaattattttattattggttgatttgtgtctaaatagattatcaatgtttctttaatttagaaaaaaaaaaaaaaatctaaacatcaactataaaaatacggaggaagtatattggatggtttgctcttgtgttattaattttagagatgttcgtgtaatcatctctcttgtggccttgtgggatcagtttgcggaaaatgtgtacaatttcacacacacacacacaacaaaaccccaaacggtactcctatatataatcgagtgtttcagtgccaaaatcagctgttttatggttgaacaaaataatttcatcgtactttatagatttgtgattaaaagacacatccccacgcccaatttcttgaagtgggccatttcaagtctttttattttgtaagacaaatatgccaccattcaattctactcttattaaaatttattttttgctaaataaaatatgtaataaaagtataatataatacttacaatgtgatgcccactctgttatttcagactcattaggcttgcatgctattcttgagaacgatcaaatagcaagattaaatgacttgaacaggacgaacaccactatcacatcaaagagagtacgatgactgtggaaactaaaaatgttcattattttgaatacgatcatttgctaactaatagtatatcctctcctattaatgagatattctctcatatcaatcatgttgatgtaaattgattctgattgtatcctctcccattaagatgattgatatgagagaatatctcattaataggaggggatacgctattacaaaccatatcgttatcgctaaacttttctaactcgagttttattttaataatgcgtattaatgtacaagttgttccactcaactcccaagtactccttcctagtgtggctcgcaatg

SEQ ID NO: 13622 - DNA, 710 bp, Unknown
  misc_feature (1)..( 710): cDNA_ID_3031070_gDNA_ID_2214640_Annot_ID_188304 3000 nt of promoter + ATG
cgctagagaagtggaagagtttacgatctcacatatcataaagctcataaaagaagagggaggtttggggttaacatcgatatctgaggcgaataaggtgagttttccacatcaataaaatacagagagccagcggcttcactgaataaagtagaagcctatagtggagcatccacatcatttctggtttgatagatggtcactgctgggtaaactacttgacatcacgggatcacggggcagcagagacttagggatacacatccattcaacagtggaaagtgtgttggcaacatataacgctgaaaccatagagtggattatctgaatgatatggaagaggggatcgattcacaacgtcaaagaggttcattgatcgaggaggatgtggtttgtttgagagattaaggagtcaaattcaagcctaaagtcagttcgaaagctagatagcaattaactctgagacagccaatagaggaatagtataaaggtttatggttcacccacacaacaaacaattactcattcatggcaccaaattagttgtttgagcactggtgcttctgtggcttgttccttttgtctggaaaaccagtggaaacacggaatctttcaaattttaatccatttgaattgggatgatttaactaatgaaaaaaaaacacttaaccgaggccaaaccgaataaaccgacaccccaagagcaaatg

SEQ ID NO: 13623 - DNA, 3000 bp, Unknown
  misc_feature (1)..( 3000): cDNA_ID_3031078_gDNA_ID_2214640_Annot_ID_188301 3000 nt of promoter + ATG
tactaaaccggacgattttgctgaaccagaatctgttactaaaccggacgattttgctgaaccagaatctgttactaaaccggacgattttgctgaaccagtatctgttactaaaccggacgatttcgctgaaccagattctgttattaaaccggtcgttgttactgaatcaaattctgctcttcaaaccgactctgttttcgaaccagactctgattccgacgtggcacctgcttctattgcttccgatttacaaaattcacgagttgattcatctgattcatcgacgccggataagaatcttgcttctggtgatactttggctcaaattgatgattctcctgatattgtctcaactcctaatcgtaataatcagccattgttcgttgttgacagtccgtttgttgaagctacgtctcctcgtcaaagaaagcgtcagattagacagtcggttcgtctgcaggattacgttctttacaatgcaacagtctctccaataaacccccacgctcttcccgattcttcttctcagtcctcgtcaatggtccaaggtacatcttctctctatcctttgtccgattatgtttcggatgactgtttttcagcaggacacaaagcttttcttgctgcgatcactgctaatgacgaacctaaacacttcaaagaggctgttcggattaaagtttggaatgatgcaatgtttaaagaggtcgatgctctcgagattaataagacatgggatatcgttgatttgccaccgggaaaggtagctattggcagtcaatgggtgtataagactaagtataatgctgacgggtccattgaacgatacaaagctcgtcttgttgttcaagggaacaaacaagttgaaggggaagactacaatgaaacttttgcgccagttgtgaaaatgactacggttcgtactcttcttcgccttgttgctgctaaccaatgggaggtttatcaaatggatgttaacaatgcctttcttcatggtgatcttgatgaagaggtctacatgaagctacctcctggttttcgtcattctcatcccgacaaagtttgtcgtcttcgcaagtcattgtatggtttgaaacaagcccctcggtgctggtttaagaagttgtctgatgccctcttacgttttggttttgtgcaaggtcatgaagactactctttcttttcttatacacgtaatggtatagaactccgtgtgttggtatatgtcgacgatctcttgatttgtggtaatgatggttatatgcttcagaaattcaaggagtatttaggacggtgtttctccatgaaagatttggggaagttaaaatacttccttggtattgaagtaagtcggggctctgaaggtatttttttatcacaacgcaagtatgcactggacatcatcaccgacagtggcaaccttggatgtcgcccagctttaaccccgttagaacaaaaccatcacttggccactgatgacggtccgcttctcgccgacgccaaaccctatcgaagacttgttggtcgtttgctttatctccttcatactagacctgaattaagttactctgttcatgtcttatctcagttcatgcaaactcctcgtgaggctcatttagctgcggccatgcgtattgttcgttttttgaaagggtcacctggtcaaggaattttgttaaacgcggacacagaattacaacttgatgtttattgcgattcggattttcagacttgtcctaaaacaaggagatctctaagtgcttatgttgtgttacttggtggttcacccatttcttggaaaactaagaaacaggacactgtctctcactcttccgccgaagctgagtatcgagctatgtcagttgctcttcgagaaattaagtggctacgaaagttgttaaaagaattgggtatcgaacaatatgcgcatgctcgctttatattgtgataataaagctgctattcatattgcagctaatccggttttccatgagcgtaccaagcacatagagtctgattgtcattccgttcgtgatgcagttcgtgacggcattataacaacacatcatgttcgcactaatgaacaattggcggacatatttaccaaggcacttggccgttcccagtttctttatctcatgtccaagttgggcattcaggatcttcacactccaacgtgagggggagtattgtgataaggtcgtatattctcttgatatgtttaaatccctatagtttaggagattgagtttatcacatacaatgactcgcttgtataaatacacatgttttgtgcatcaatgaaatcaagttagttcaatacctaattctacaggaatggtcggcatatctgttgtcaagagatggaactcttgctttgggaaatggttggaaaagcttttgtgaggctaatggcgttaggttaggagagtcttttactttggagttcgttaatgtacaagatacaactccggtacttaagttctcttttcgagagactaaacacaaaaatgttaattagaaatagatgacatgtaaaaattaggcctaggcgtataagtttgtagttggcttattgtaagtttgtagtttgtcccttagttccttaatttcttagggtatatattgcttactgagacatccatattgttccattttggtactttgtgcacgccattgtatctggcaaagttgagaatgtcttcagcataccatacccaaatttgtggattttattggcccaaatctagcccatatgttatatatccaggcccaatttatctgtcaagagatggggaatcttttacgatttggtcggaaaatgaaaacggagcaagacagagagataatcggagattccaattttctgtgttaatttcaacaagcatgcatttatttaccaatttgtgctcaaaatagaaaacaaaacaaaatttggtacgtgaaaagaaaattttcaagggattgtttgtttttttctgttcttcttcatcaatg

SEQ ID NO: 13624 - DNA, 3000 bp, Unknown
  misc_feature (1)..( 3000): cDNA_ID_3031082_gDNA_ID_2214640_Annot_ID_188300 3000 nt of promoter + ATG
atcttcgaatcggtgacattgttgttttcagacaagagagagatatgtctttccacgttacaatgttgggacctagttgttgtgagatccaatatggttcgtgttcagacgaggagagaaacctcggtaagttgtgttctgtctctgactcttcaagaaatgtggtctgagtttggaatatggatcagttagtagagagaaccagtttaactatgtaacacttagtatctattctttttcagagaagaagaagaatccaaatggagaagcaaagtcttcttcactagatccttcttgtttttcggctaatgtggcgccttcgagtctacgttatgacttaatggtattctactcttaaatttgaattccaaattaaactatgaattcatgttgttttataatgaatttttcagctttttccaatgggttttgtgagggaaaatggtgtagtcggatctggaaagattgttctgatgaatgaaaagggcagatcatggaattttaacttgagacaaaagccatcatgcggaacagtttatgttagaggagggtgggtgagtttttgtgatgccaatggacttcaagctggagatatctacactttcaaactgatcaaaagaggaggaactcttgttctacgtttgttacccaaaggggcagagtcttgttcactagatccctcttgttttgtggctaatgttgcgccttcgactctacgctatgacacactggtattcgactcttaatttgaatcccaaaagaaactctcatactagtgtctgaaatatattaaacttattttgtattgttccagtatcttccaaagcgttttatgagggaaaatggtgtagacaaaagacgtggagagatgattctgatgaatgaaaagggcaaatcatggactttagatttgaaactaaagaaatcatgcggaacttccctcatcagacgaggatggagaagtttctgtagtgccaatggactaagagctggaagtatcattactttcaaactgattaagaaaagtggaactcttgttctatgtttgctctccaacgagccagaagaagaagtgtgctcagaagctaatgaagtagagtctctttcgacagatcaagaaagccatgaagagagtagccacaacgagaaaatctcaagaagaaaggaaaagaagggtagaatgatatggaaagcttcgtcttcaccatccgaaaaccgatttgtgacattaaatcttacaccttataacatcctacgttctgcactggttagtttcaaaactccaagccattgtctttttacagtccatcaaatttgaatcttttgtgtgaatctttgtttcagcgtcttccgatacccttcacgaggatgaatggtatcaatgaagaaactaaaatgactctgttggataaacatggtatgaagtggttaacgactctgcggttggtggactacaaaagaaaaagactgggaatggtaggaggctggaaaggattcatccaagctaacggtgtgaaggcaaacgaatccatcatgttggaactgatttgggaagaagaaacaagttgcgtccttaagttctgctccaaggtgaagctagcaatcaaatgaaaatgtatatgagtgtaatattgaaatgaatcaatgtttgactcttttatttggtaagatataactcttaaggtctaattgtactattgtagtatgttttctaagtatgttgtaattgtatgatcattggccttacggtgtgggatttgtgaatgtttgtttagcaaagaaaaggagagttcaactttatcagtttaaattagtgactaaaacattttgtgaagatttttaccgcacaaaataaagataccaacaaaagacataatatgatgagatgtacatatgaggagtgtgatagaataacttaactaatattgaagatgaatgtgaatcaaaagaaaaagttgtaaaaatctcaaaatattatagttatattcttgatacagttgggacaagtcactgatatccaaattataactgtaatagaaattcaatttttttaaggatatatgattttctatttaatttaagttattttcagcgttatatctaaaagaattgttagttacttagtttgtttagaaaaacaaaaatctgaaagaattgttaaaccgattcaagtaggttgataacaatttaccaaagtcgtaactaagtttcttggatgtttaatatcaatatgagttttgtgatattagtaattaacaaaaaaattatcacaaatttgttatctaaaatatattttgattgggctaccaatcatgaagttactttttaattaatgtgtaactagcaacccaaaaacaaatgtatttcgatttctcattattcaggttataaaacaaaacaaaagttgaattttaggagtccaaagcctggtagtactcatacaattttaaccattagacaaaaagaatattattattaatggattgaatctctttttttttttttttttttttgaggtttcaaacacaatcagagtgaattcgattataattcaacaatgtattttacatatgattgccaaaaaaaactactaaccttttctagaaagaacacttatctattgaattgtatatcacacaatgtagtagtatctaataatcattaacattaactttttcataatggaaaaaaatccagaaaaatagtagttggcctgtaataactgtaaattaactaaattacaaagaaaaaaagtaaagacaaaaaacaaatgattaataaataaaaaggaaaataattgtccaaaaataattaattacccaaaaggccccatgtgaacaaagattttaattggcccattctctcattctctctttaactctataaaacacagagcaaagaaaaaacagaggaggttgattctctttggcatctccgaatcgaatctgagaagagaagaggaagaaaaacgaagatcgatgttcgagagggaattagatg

SEQ ID NO: 13625 - DNA, 3000 bp, Unknown
  misc_feature (1)..( 3000): cDNA_ID_3031093_gDNA_ID_2214640_Annot_ID_188296 3000 nt of promoter + ATG
tgttattgcgtgcggaatatagttccaatccagtgtctaacatctgcataactatgtttacgtctccaagaagagcagcaagatgcaaaggtgtgtctccgtacgcgttacgggaagagagaagggaaggtcggagctcaataatcttggcgaccagttctcggtgaccgagctttgcagctacgtgcaaaaccgtgttgttggtgttctgttcctcgcttctctcctccagggaagattctctcgcttccaccaaaccaagaaaagctggaaggtcattttgaaggatggcatcgaagatcggatgcatctttttctcaacaaaactagaacaaaagtaagaaaattcttaaatcttgggagtggttagactacaagggttgttagcatcttgacgttttggcttcttggtctttctttttcatttaacactggttgttgttgggtatatatgaagtgtgtagtgtgatgtttttttaatttttttttgttttatacaatgtagtttaattttcttggccagaagactttgaccctatatagtcaacactcaacagcttacagttacagacaaaaaaagacgcgtttataattgaataaaataaaaaacaaaaggcttggccatgccactggttcctctctctttctttgacgcgcaattaaagctaatgtcagtctcaagcacaacccttatgacttggtctttgagtactaaaagattaaaaagttctcatgttctgagttctgacttacctatcttctccaagattgctcctagttacaataagtgagctatggagagaaaggggtaagatgattcaatttaatgtagtacaaacttcatgccattgatgacaccatgaggaacatagcttccgtattccgttgatgggttcaacttgtacattcacattccatagactcatcctatcccccgttgtaagacgattgtgcattgcgagccacactaggaaggagtacttgggagttgagtggaacaacttgtacattaatacgcattattaaaataaaactcgagttagaaaagtttagcgataacgatatggtttgtaatagcgtatcccctcctattaatgagatattctctcatatcaatcatcttaatgggagaggatacaatcagaatcaatttacatcaacatgattgatatgagagaatatctcattaataggagaggatatactattagttagcaaatgatcgtattcaaaataatgaacatttttagtttccacagtcatcgtactctctttgatgtgatagtggtgttcgtcctgttcaagtcatttaatcttgctatttgatcgttctcaagaatagcatgcaagcctaatgagtctgaaataacagagtgggcatcacattgtaagtattatattatacttttattacatattttatttagcaaaaaataaattttaataagagtagaattgaatggtggcatatttgtcttacaaaataaaaagacttgaaatggcccacttcaagaaattgggcgtggggatgtgtcttttaatcacaaatctataaagtacgatgaaattattttgttcaaccataaaacagctgattttggcactgaaacactcgattatatataggagtaccgtttggggttttgttgtgtgtgtgtgtgtgaaattgtacacattttccgcaaactgatcccacaaggccacaagagagatgattacacgaacatctctaaaattaataacacaagagcaaaccatccaatatacttcctccgtatttttatagttgatgtttagatttttttttttttttctaaattaaagaaacattgataatctatttagacacaaatcaaccaataataaaataattctatgatataaatagtcaaaaataattaatttagtattaaaattgaaatcatcatctaatttgaaacattttattttcttctaaaacatcaactataaagatacagtccatcagaattgttaggggtaaaaatttgagaagtcattttattttttttcacagatttctcataaattaatatactcatatgtaactaaaagaaaagacatgttaattaatttaagcaaatgtaacaaacttattcatgattacgaagttcaattgcaattttgttattgtctttatcatgtccggataatgtttcaatacgtccagcacttgattcctcatcctagcagtctagccaagaaaacttcaccgaccggactaatgcaaacaacccttgctccaagacacaactttacaaacaattaagactatctagttttagtgagaaactcccacattacctaaataatattacttctgcttaatttattggatattagatactattcaaccgtccgattagcgtctagcgaaattttaaacattagtattttctcaattctaattgataactttttttactcaatatatagaatacagtataagagtttttctttttgtaagtttgtgatggtattaaatgtagacatattatatacttccacaagtcatatataaaaatgtaaaatacagaatcttgtacgcaacacacgggagatagtatgagactcgagagagaaagagtcatcatcatcatcatcatctccttcaaaacaaaaattttatatacaaatttggctttaatggaacccacgttctcttctctgtctctctttctttacaatttccaagagaacattaaaataaaaacaacaacaacaacaacaaaagttttgttagtattactctttcactcgtttttaccctctcttagctgcattacattagctgtttctacttattctctctctctcttcatcttttgttgtttcacgtaaagtcaaacccatctctctctctgtctctgccattttctgaacatgaataatatcttctcatgctctgattcgtttctcattgcctaaacaagaagaacaatctattcttgttttagcttaaagtttttattgctacaaaca

SEQ ID NO: 13626 - DNA, 3000 bp, Unknown
  misc_feature (1)..( 3000): cDNA_ID_3031100_gDNA_ID_2214640_Annot_ID_188294 3000 nt of promoter + ATG
ttgttgatttgaacaatggtactcgcttctctcctacttctatggtttgtttctcgtctccatagaatctgtcacacccatcaaccaaccaaaaaaaaaaatagagtttgtgtttaaaaaataagatcaagaaacgaatcattccaaaaagaatgtactaatgcaatgtataacgatcataactttattgggatcgtaaatgcaaaaagccaactttattttccatcattgagagaacccaaaaatgaatgttctaaagaagatgaaaaatctagaacctgacagtattgtctctcttgaactccattgtttgtagcaataaaaactttaagctaaaacaagaatagattgttcttcttgtttaggcaatgagaaacgaatcagagcatgagaagatattattcatgttcagaaaatggcagagacagagagagagatgggtttgactttacgtgaaacaacaaaagatgaagagagagagagaataagtagaaacagctaatgtaatgcagctaagagagggtaaaaacgagtgaaagagtaatactaacaaaacttttgttgttgttgttgttgtttttattttaatgttctcttggaaattgtaaagaaagagagacagagaagagaacgtgggttccattaaagccaaatttgtatataaaatttttgttttgaaggagatgatgatgatgatgatgactctttctctctcgagtctcatactatctcccgtgtgttgcgtacaagattctgtattttacatttttatatatgacttgtggaagtatataatatgtctacatttaataccatcacaaacttacaaaaagaaaaactcttatactgtattctatatattgagtaaaaaaagttatcaattagaattgagaaaatactaatgtttaaaatttcgctagacgctaatcggacggttgaatagtatctaatatccaataaattaagcagaagtaatattatttaggtaatgtgggagtttctcactaaaactagatagtcttaattgtttgtaaagttgtgtcttggagcaagggttgtttgcattagtccggtcggtgaagttttcttggctagactgctaggatgaggaatcaagtgctggacgtattgaaacattatccggacatgataaagacaataacaaaattgcaattgaacttcgtaatcatgaataagtttgttacatttgcttaaattaattaacatgtcttttcttttagttacatatgagtatattaatttatgagaaatctgtgaaaaaaaataaaatgacttctcaaatttttacccctaacaattctgatggactgtatctttatagttgatgttttagaagaaaataaaatgtttcaaattagatgatgatttcaattttaatactaaattaattatttttgactatttatatcatagaattattttattattggttgatttgtgtctaaatagattatcaatgtttctttaatttagaaaaaaaaaaaaaaatctaaacatcaactataaaaatacggaggaagtatattggatggtttgctcttgtgttattaattttagagatgttcgtgtaatcatctctcttgtggccttgtgggatcagtttgcggaaaatgtgtacaatttcacacacacacacacaacaaaaccccaaacggtactcctatatataatcgagtgtttcagtgccaaaatcagctgttttatggttgaacaaaataatttcatcgtactttatagatttgtgattaaaagacacatccccacgcccaatttcttgaagtgggccatttcaagtctttttattttgtaagacaaatatgccaccattcaattctactcttattaaaatttattttttgctaaataaaatatgtaataaaagtataatataatacttacaatgtgatgcccactctgttatttcagactcattaggcttgcatgctattcttgagaacgatcaaatagcaagattaaatgacttgaacaggacgaacaccactatcacatcaaagagagtacgatgactgtggaaactaaaaatgttcattattttgaatacgatcatttgctaactaatagtatatcctctcctattaatgagatattctctcatatcaatcatgttgatgtaaattgattctgattgtatcctctcccattaagatgattgatatgagagaatatctcattaataggaggggatacgctattacaaaccatatcgttatcgctaaacttttctaactcgagttttattttaataatgcgtattaatgtacaagttgttccactcaactcccaagtactccttcctagtgtggctcgcaatgcacaatcgtcttacaacgggggataggatgagtctatggaatgtgaatgtacaagttgaacccatcaacggaatacggaagctatgttcctcatggtgtcatcaatggcatgaagtttgtactacattaaattgaatcatcttacccctttctctccatagctcacttattgtaactaggagcaatcttggagaagataggtaagtcagaactcagaacatgagaactttttaatcttttagtactcaaagaccaagtcataagggttgtgcttgagactgacattagctttaattgcgcgtcaaagaaagagagaggaaccagtggcatggccaagccttttgttttttattttattcaattataaacgcgtctttttttgtctgtaactgtaagctgttgagtgttgactatatagggtcaaagtcttctggccaagaaaattaaactacattgtataaaacaaaaaaaaattaaaaaaacatcacactacacacttcatatatacccaacaacaaccagtgttaaatgaaaaagaaagaccaagaagccaaaacgtcaagatgctaacaacccttgtagtctaaccactcccaagatttaagaattttcttacttttgttctagttttgttgagaaaaagatg

SEQ ID NO: 13627 - DNA, 3000 bp, Unknown; identical to SEQ ID NO: 13620
  misc_feature (1)..( 3000): cDNA_ID_3031107_gDNA_ID_2214640_Annot_ID_188291 3000 nt of promoter + ATG

SEQ ID NO: 13628 - DNA, 3000 bp, Unknown; identical to SEQ ID NO: 13619
  misc_feature (1)..( 3000): cDNA_ID_2703558_gDNA_ID_2214640_Annot_ID_188285 3000 nt of promoter + ATG

SEQ ID NO: 13629 - DNA, 3000 bp, Unknown
  misc_feature (1)..( 3000): cDNA_ID_3031093_gDNA_ID_2214640_Annot_ID_136227 3000 nt of promoter + ATG
caacaaaactagaacaaaagtaagaaaattcttaaatcttgggagtggttagactacaagggttgttagcatcttgacgttttggcttcttggtctttctttttcatttaacactggttgttgttgggtatatatgaagtgtgtagtgtgatgtttttttaatttttttttgttttatacaatgtagtttaattttcttggccagaagactttgaccctatatagtcaacactcaacagcttacagttacagacaaaaaaagacgcgtttataattgaataaaataaaaaacaaaaggcttggccatgccactggttcctctctctttctttgacgcgcaattaaagctaatgtcagtctcaagcacaacccttatgacttggtctttgagtactaaaagattaaaaagttctcatgttctgagttctgacttacctatcttctccaagattgctcctagttacaataagtgagctatggagagaaaggggtaagatgattcaatttaatgtagtacaaacttcatgccattgatgacaccatgaggaacatagcttccgtattccgttgatgggttcaacttgtacattcacattccatagactcatcctatcccccgttgtaagacgattgtgcattgcgagccacactaggaaggagtacttgggagttgagtggaacaacttgtacattaatacgcattattaaaataaaactcgagttagaaaagtttagcgataacgatatggtttgtaatagcgtatcccctcctattaatgagatattctctcatatcaatcatcttaatgggagaggatacaatcagaatcaatttacatcaacatgattgatatgagagaatatctcattaataggagaggatatactattagttagcaaatgatcgtattcaaaataatgaacatttttagtttccacagtcatcgtactctctttgatgtgatagtggtgttcgtcctgttcaagtcatttaatcttgctatttgatcgttctcaagaatagcatgcaagcctaatgagtctgaaataacagagtgggcatcacattgtaagtattatattatacttttattacatattttatttagcaaaaaataaattttaataagagtagaattgaatggtggcatatttgtcttacaaaataaaaagacttgaaatggcccacttcaagaaattgggcgtggggatgtgtcttttaatcacaaatctataaagtacgatgaaattattttgttcaaccataaaacagctgattttggcactgaaacactcgattatatataggagtaccgtttggggttttgttgtgtgtgtgtgtgtgaaattgtacacattttccgcaaactgatcccacaaggccacaagagagatgattacacgaacatctctaaaattaataacacaagagcaaaccatccaatatacttcctccgtatttttatagttgatgtttagatttttttttttttttctaaattaaagaaacattgataatctatttagacacaaatcaaccaataataaaataattctatgatataaatagtcaaaaataattaatttagtattaaaattgaaatcatcatctaatttgaaacattttattttcttctaaaacatcaactataaagatacagtccatcagaattgttaggggtaaaaatttgagaagtcattttattttttttcacagatttctcataaattaatatactcatatgtaactaaaagaaaagacatgttaattaatttaagcaaatgtaacaaacttattcatgattacgaagttcaattgcaattttgttattgtctttatcatgtccggataatgtttcaatacgtccagcacttgattcctcatcctagcagtctagccaagaaaacttcaccgaccggactaatgcaaacaacccttgctccaagacacaactttacaaacaattaagactatctagttttagtgagaaactcccacattacctaaataatattacttctgcttaatttattggatattagatactattcaaccgtccgattagcgtctagcgaaattttaaacattagtattttctcaattctaattgataactttttttactcaatatatagaatacagtataagagtttttctttttgtaagtttgtgatggtattaaatgtagacatattatatacttccacaagtcatatataaaaatgtaaaatacagaatcttgtacgcaacacacgggagatagtatgagactcgagagagaaagagtcatcatcatcatcatcatctccttcaaaacaaaaattttatatacaaatttggctttaatggaacccacgttctcttctctgtctctctttctttacaatttccaagagaacattaaaataaaaacaacaacaacaacaacaaaagttttgttagtattactctttcactcgtttttaccctctcttagctgcattacattagctgtttctacttattctctctctctcttcatcttttgttgtttcacgtaaagtcaaacccatctctctctctgtctctgccattttctgaacatgaataatatcttctcatgctctgattcgtttctcattgcctaaacaagaagaacaatctattcttgttttagcttaaagtttttattgctacaaacaatggagttcaagagagacaatactgtcaggttctagatttttcatcttctttagaacattcatttttgggttctctcaatgatggaaaataaagttggctttttgcatttacgatcccaataaagttatgatcgttatacattgcattagtacattctttttggaatgattcgtttcttgatcttattttttaaacacaaactctatttttttttttggttggttgatgggtgtgacagattctatggagacgagaaacaaaccatagaagtaggagagaagcgagtaccattgttcaaatcaacaacggctccattt

SEQ ID NO: 13630 - DNA, 3000 bp, Unknown; identical to SEQ ID NO: 13624
  misc_feature (1)..( 3000): cDNA_ID_2703576_gDNA_ID_2214640_Annot_ID_136230 3000 nt of promoter + ATG

SEQ ID NO: 13631 - DNA, 3000 bp, Unknown; identical to SEQ ID NO: 13623
  misc_feature (1)..( 3000): cDNA_ID_2703588_gDNA_ID_2214640_Annot_ID_136231 3000 nt of promoter + ATG

SEQ ID NO: 13632 - DNA, 3000 bp, Unknown
  misc_feature (1)..( 3000): cDNA_ID_2703592_gDNA_ID_2214640_Annot_ID_136232 3000 nt of promoter + ATG
tttaaaatattttccagcaacttcctttgccatttatgagagaaaatggcttggtcaaacctgggattataaatttgttgggtaaagatggtacaaagtgggaggtaaatcttcgacgggaagccaacggaaccatgtatttgggaaaaggctggaaagatttcactatagctaacggcttaaagaccggcgaatctttcacgttggaggcagttttggagaatggaactcgtatgctcagtttggtcagtacacagtccacaagtgatagaaaccagcaaggagagtgtttaaaagatagcgagaaagagtcaaattctacagaacctagcagtggaaaaaggaaagccatgataaacagaggcgtgagaagaaagtcatttccagcaagccaaaaccggtgtgtgacattaaaacttactcatgacaacctcatcaaaagtagacgggtgagttcatcaatcaacccttgttttagagggtacgttagttttatctcttgcactcatattaggtatgttatccgttcatttatgctccagtatcttccgttgtcattcacaagagataatggcttggacaaacctgggatgatttttctgttgggcaaaactggtagaaagtgggaggcaaatcttctaagggaagcctcaggaagaattgttttgacgggaaagggctggaaagagttcgccatggcaaacggcttaaaaagcggtgaattgttcacgttggaggcaattttggagaagggaactcctatgctcagtttggtcaatacacagtccacaaattatagaagccaacaaggagaatgttcaagagatagcgagaaggagtcgtcgatttgtgctgaacctagtagaggaaacaagaagtggaaagctactaacaacagaaaggagaggagagactcgtcgtcagcaatccaaaatcgatatgtgacattaacactcacaccagaagatgtcagagcctgtacactagtaagttccatcaaactactcttgtttcaaaaaggggtcagtttctgtcttgattttaatttgttacgaagtgtgtttattcaaatcttttgcagattcttccgagtcaattcatgaaagctaatggcatcaacaagcttgggaagaaaactttgttgggtcaaaacagaaagaagtggtttgcatatctactgtcaaaaagtggatttgtggcactgggatctggttggaaaggtttctgtgaagctaatggcgttaagacaggagaatcattcaatttggaatatattgatgaacaagacacaactcctgtgtttaagttctgttccaactccgtagagtatgtaaagttcacaagccttccttaaaaactaaaggcctttttgttagttaagtttaaattattatgattatgaacttgctattttgaatgaaccatctttaaagagtttctcttagaatataatgacaacttattgtggattgaaataaggttaacagagttgattgaaatctaaataagctaatgcaatagattcttgactaaaaatcctaaacgaaaacaccacacattaaaaaaaaaaaaaagggtcctagaaactagcttagaaaagaaaaaaaaaacaaggttacttgtcatcaatagttttgtcatagaacactaacgtcgagcttatcattccagaatcagttggcatagagaggaacgagagcgaaatagagtgtatcatcggcgtggaaagaccataggcgaatatttgtgttttcctctagaaggcaatctgtaaccacttgattccaccctgcaaccaaattgtatagaagaatgcccctcatgtccctcaacctcaaattcaccggaaattcccttagatgagaatccacgagtatcgcgtctactccttctttgcgaaccctattggcatcttcttctatggcccttttttcctcgtggttcaagaattccaactccacgatctggctgacaggtattgagagacgactttggtgtggatcgacatcggtttggaataattctttatctatgatcttcttcgaattgtcttcaacgtctccaccgttcttgcttctcatcaagctgataagccaccctggcgtcggctctcttgtcttggaagaagaagcatccgtactgcgttttgccttcttagattttcgttgttccatgggaggagacataggagggagatcatgtctgtttctactgcgtcttgttggagattctcttaatgagtggtcgtgaatatgggatttagactccatgacggtagaaggagtagtaatcgtcgagcttttgtttcttcgaagtatacataactgaagtttgttatactcctcccgcgttggctttgagttactcatcatcagtaatgtttccacacactcgacatcttctttagacacctcttttttgaagatcattgtttatgaactctctcttctgtttttttctctctattgtatatatatagtgagagatttactcctcgtaatagagagatttactccacgtgatagagaaagcattattactaacaatttttcttttttctttttggaatctgtttttgagaattatcttccaatttttatatatatattttttgttattcttatggctagatagttataactaaagtcaaacataaccacaaaaattcaaactaaatcgaaccaaaattttaaaatacacgagtatatccttaaattttttacgaaactatattataccgaatgaatatctgaaatatccaaaaatcgaatggatatccaaatccgaaacactctaaataataacaaatgaatccaaaattataataattaacccaccaatattagttatgtttatactcgaaataatcaaaatacttaaaaaaaaccaacatatctaaatgttgttggttatatttgtcaaaaataaaacatattttgcaaaataaaaccaaattcattaaaattgttttggtatttcggatagtttggataaaaaatg

SEQ ID NO: 13633 - DNA, 710 bp, Unknown; identical to SEQ ID NO: 13622
  misc_feature (1)..( 710): cDNA_ID_2703596_gDNA_ID_2214640_Annot_ID_136234 3000 nt of promoter + ATG

SEQ ID NO: 13634 - DNA, 3000 bp, Unknown
  misc_feature (1)..( 3000): cDNA_ID_2703670_gDNA_ID_2214641_Annot_ID_136238 3000 nt of promoter + ATG
tctctgtttcaattaaaaagaaaaaaaatccaaacgataatcattgtgataaatcacaagatgatatcatcttgaacactaacattaagagtcttattctggagaacaatgcttcctatgactgctacttcatcttccacagttacagcctcacctgcagaaacaaattaatcagaaaaaatataacgaaaaatttgttgaacaaaaagaaaacaatgaagttaccaagaatggtaatcccaagcctgtcattgtaatctccactagcttgaactcttgaccatctacctatagaagatttccatccgataattgagtttataacaacagcattctcctgcatttaacaagagtagagaacattaaacaacgaatcttttggattcataacaagaagaacattctaaaacactgattccaaattaccttgatttcaacatcgtctaagattatgcagctaataagccttacaccaggtccaacacgaacatttgctgatatcgacacatttggaccgatcttgttccaaagaaatttaagtgtgtcatttcatttgcaaactgaatgagaagtttagctagaattcatgagatgaaacaaataaactcacctttgcggttggatgcagttttacggatgggtgaatataaacatcaccaattatagttggtttcctattagtaccatctcctgaagctaaaatatgaggcgatgtttcgcggaattgggaaagatataaagccgagcatttcaaagatttcctgtttaaagcaatttcttagcataaggagtaatccaagaacgtctgaaacaatgattaccaccaacttaccccggagtcttgatctgttcccagaaatccttgttctcatatgtgtatagttgcttctttccagcaagaggtgacaatatatcttgatctaatctcacaaaatctgcaggaacagaccttgtagcggattggtagttgctagctgccaagtttaaagagattatacaatgaataacttatgaaaagaccaaaagaatcatgaaaatgatgaagcaggtctctaattgataatattgcaagtctctgagagaggccaataatgaatactcacatgtgtctcttatttggctatatacttcttcaattgcattgaagatatctgaagtaaacacatagacaccacagtttatcaagtcactgacctgcattgagtagataatttaagctaaacaaatttcagagcctgtgaaggaattaagaaaacaggattgtttagcagataattacgaaagtctcgggcttctctgtataatgcaggagttctttagtatcaggatcagctatcaattcaccaaattggctagctgcttctgcagaaacctgaagtgaaaaagcgatattcatgtttatgtttgatctttatgtttgtttccttagtgacatctaaaataacatcaggataacgaaccttgattactagcatagttccaataccaccatatcttcgatgtgcgtctacgaaaagtagtgaagtacatcaaagtaagaaaatgaaaacgatgaagcagattagcgatttcaaagggagattaccaagtatgccttgaagagggaaagaacagcaaacatcacagttgaggaggaaaacatgtgactgttcaaagagacaagaaatggaagatcaatcaggaaaacaaatgactgatgaggcaggaactaaagttgggaatttcatcagaaatcaaaccggtttctcttccataattctatcacgaaagtaataaagagcaccagctgaaccatggggtttatcttctttcaagtatctatataacaagaacatcgttcaattctcgatttcacattacacaccaaaaaccaaaaacacaaatgctactacaacttaccgcactggaattttcagctcgttagatattgaagacacatacaaagcaaattctcgttcctcgtaaaatccaatcagaaaaatctgagccagatttgatatctgtccatgccaaatacaaaacaaatataatatgatcaatcatcattacaaagttgagaactttcccatcctttgagcctgaagaaactatgaaaagttcaaaactttgacactacaaatcatacaacaacaagaaaatattccaaagtgtagagtactaaaatggaacaaacccacataaagacaaacgatccatgtcaaatcaaaacaagttatgagcaatccacatttcaaagttgacaactttcacgactcaagcaataccaaacttttctcagggatcaaaagcaagaaatagtaaaaagaagaaacctttttacaagcagagataggatgatgaatcataggttgaccagccaaaggaatcaatggtttcggtgtattgaacgataacgggcgaaatcgagttcctaaaccaatccacattagcaaaaacccaaaaccaaaatcaaaaattcatgttttgaaaatagaatttgagatccaaaagagaatgttatacctttggtcggaccaccaaccatgatcacagcgacgactttctcctccgacatgtcgagattcaataaaacctagattcgttaaagttaaacacacgacgatgatctgattttgtattgaaaggtcgtatctttgtagtcggatattctcaagttttttgaactaaagttgaaaaacagagtaatcagaatggagcctaataaaacgtcttttttaattccgttttgtttttgcgtttgttagcgttttataattgcgtttgtgaatgaccaaactttatgaatcttcttctatagcttctctctctgaacttcatcaatgtaaatttcaatcttttcttcattaatgtgttccgtttgattttgtttcttcagtgaaatgaaattgagattggtttctgattttatcttcttgccagtgaaaccctagtaattgtgattttgctgggcaagaaattagggttttaggaggttttgttacttactcaagagtgaaaaag

SEQ ID NO: 13635 - DNA, 3000 bp, Unknown
  misc_feature (1)..( 3000): cDNA_ID_2703682_gDNA_ID_2214641_Annot_ID_136241 3000 nt of promoter + ATG
gctgcaattttggatacaattgagcacggaagccatcaacatcctttatattactacactacatttgactggaagccttgtagccgatgcagagaggagggcgccgttttatttcgttgtgatgagtgtgactacattttggatggaaactgtgctctttttccaaaaaaggtaatgagaaatagatacgatgatcatcttctcttcttgtctttcggtgacaagaatgtgagtggtgactattggtgtgaagcatgtgaaacgaaagtgaacccaaaggaatggttctatacatgcaacgattgtggaaccatattacatatatcttgtgttgtgggagatttctcatatatcatgccaggttctcatataacaacatggagagctaacgtggtatccaacacctctatttgtagaccagtttgctatatgtgtaactctcgatgcaaacttccttctgttcttaagctttctgacaccaaagttgatgtatacctttgttctttcaaatgtgcctattttattaggaaataaaattatgtatcatttttctagttaatgttaaatctatatacacatttttagcagcactttttgtctttaatgtttgaatttctctcactaatattttagttaagatgagtcaaaatttacccggtttaattatgttcggatattacataactttaatggatcggattatttacctggttttattgtgttccaatcctgagaacattaatttttgaaaaaagttaccatttctatcaaaaaaataattggaaacgaaattaattatttaattatcaaatttaatatatatatatatatataatatctttaaactaatcatattttttatttaccttaactaattttttaaaatctctctatctagaataaacataaatatatgatttaaacgataaaaaaataatatatatgtacaatatttcatattacttaaaaaaatgggtaatagtttagagttatattatagggaaatttgggtgtataaccataaaaaatttaataatttaacaagtaaccattcaaaaagttggatatgatattcagcatatattgtgtagtatatacacatttgcccttgtttatacacgtgcttctctcctctctccaacatgatgcatatatcatcatctctttcttctccaacagtttttttttaaagcaaaattcttttgtaactcttttcacaacagtcattttctctctttgtcatcgccaaaacaaattcatctacgacaatggagatatagcaaaggaggatctcacatcagcctcacacaaaaagttttcaatttcgatgacgatgagtaaatatttacaaaagtgaattttaaaaacatggattagctaattagtttttaaaattgcttataataaataggactataaatctcacaggaaattctagtgagattaagtcaaacaaatcattttttattttaggaaaagtttgcaagatattattctattttgtaaattaaaaataattttttattcatttatttattttaaccaatctgttacctaataaaaacatatttaattataaaatttaatatacaattaaaatgaaaggatatatctatttgggtttacaaaaagaatattagggttttggattttatgattaaacaatgttaaatattggtttgagtttataaacaagtttaaattttacaactaaacgaagtcaaatgtcggtttgggtttagaaagtacaattagggtttagattttataattaaacgagtaaaaatgttggtttgggtttataaacgagaattagggtttagattttgtaattaaacaagattatatatcggtttggatttatacaagaatggttaaagttttgattttataattaaataattttaattatttattagttgaaatattttgattggctagaataaagaatggtgaatatgagaacccaaatattgttctttgtgaatatactgtttacgtttatgttatactaggtgcgtttaaactgaattgtttgttttgattgatattcattgtcatgatagagtgttttcattggccaaaccacagtgtttgaaattgaaatactatttgatattgcatctctactttcttgtctatactatttcagtttttagaacaccaattttttttacttacaaccatttttctattttgtaaatattggttcattttaaaaaattcaaaccactacataatcagaaaaaaatctaatgttttttttaatatagctagaagtctaaatcagtttattttagagagatttttagaaagaaaatgtaatggggtgtgcaaaataatattatccaaaaacataaaattaatcttttctcttgtatgttcaccacgtcagctcgtccaaagccttgcaaatgaggagtttgtcgacatttcatgtcatctacatgttacttacttagttttagattttatagtgctatatccttaaataatttatgaaaagtagttacttttgcaattcaccctatattataagatgaaataaaattattttgaatacgaatgaacaaaaaacttgagtttttaaacttccaaaactaaaaatgttcggtttattatggttctttattttaaaaaatataaattttaaaataaatttaaaatattataaatatttaatttttattatacggatgaaatcttacaatggactaatttaaatcgattataataataaacgacaaaaaaaaaaaaaatcgattataataataaacggtataatacatgtgaattcctagaattaaagaatattttgcccatctcctgcaagttataagttaattacaatatgatgaaagaagaagataagagagatccaaagagataagaataacattaaagttactctctcggtgtgggtatgacgacgaattgacttaaaattttcgttagtcatcttttgtcaatttcgtttcaatcatttttgacacaaaaagt

SEQ ID NO: 13636 - DNA, 3000 bp, Unknown
  misc_feature (1)..( 3000): cDNA_ID_1012546_gDNA_ID_2214641_Annot_ID_136242 3000 nt of promoter + ATG
gcaaaataatattatccaaaaacataaaattaatcttttctcttgtatgttcaccacgtcagctcgtccaaagccttgcaaatgaggagtttgtcgacatttcatgtcatctacatgttacttacttagttttagattttatagtgctatatccttaaataatttatgaaaagtagttacttttgcaattcaccctatattataagatgaaataaaattattttgaatacgaatgaacaaaaaacttgagtttttaaacttccaaaactaaaaatgttcggtttattatggttctttattttaaaaaatataaattttaaaataaatttaaaatattataaatatttaatttttattatacggatgaaatcttacaatggactaatttaaatcgattataataataaacgacaaaaaaaaaaaaaatcgattataataataaacggtataatacatgtgaattcctagaattaaagaatattttgcccatctcctgcaagttataagttaattacaatatgatgaaagaagaagataagagagatccaaagagataagaataacattaaagttactctctcggtgtgggtatgacgacgaattgacttaaaattttcgttagtcatcttttgtcaatttcgtttcaatcatttttgacacaaaaagtatggaacttcaagtccttgttcttcgtccaatcttcttcttcttcttcttcgtcttcttgacaattctacaacaatcctcttctgctcgggttcttacaatcaccaagcctgatagacatgactacgccgcaagtgctcgttggcttgtctctcagaattcttggggtgttcttaggtatctaattctcgtctctttctgcttatcttgcttctcaagtttagatgatagcttttgctccactctcaattattaggagctttattagggctattgaatccaatcagtgataaaagattgaatcttttgaaattgaaattggtaaaggttatatttttacagaagtttgtagcttttttagcagattgaatcctattgttgataaactttgttgggttcttgagacttgctatggatttgcttcatcaagctttaatactattgaaattgatattgactttcaagtactgttgggttcctgagatttggtagttcgtcaagtttgattcttttgaaattgaaaggtttttaggatttcagatttgacactaggagtaacaaatggttcctctatactctgtagttaccactggtcactctatacactatagttacctgagatctttattagtgaaagagattgttgcattgttgttatcagcaaggtaatgtgagtgtaacagttgtgtattactaattctttttgcggtgttgtattcctcttccagcacactatccgttgatcataaaggcgctcccttcgggtaatcttgttttccatgaatcatatcacaatgtgttttcttgctttgacattattgagatctcaatggtctctatttgcaggaatgttgtatcgtttagtgatggtttacccgagaaaggtaacggtataccttacttttacttaacaacacttgatccaactgcaagaaacgcacttaaagaccagagagcttcacttgcaattagtgaatctcctcttggaacttgtacaagagatccaatgaatcctacttgctctaaactaacccttaccgggaaggtaaaagagttttttcttattgacacgacaaagaaacttactgtaaaatgctttggtctttatcttattataatgtttcagttgctgatattggaaggaggatctgaggaagcagaagtagccaaaaaggctttattcacaaagcatccagagatgatgggtgattaattgtttcactcatctcttaagatacagattcatgatagatttgtattatcatgtgatggttttatcatttgcagattggcctaaggatcatgatttccgcttctttaaactcgagatcatcgatatatttctcatcaattggtatggtggagctaaacctatcactgtagatgaataccttcatgccaagtcgtaagtacattgcgtgaacccttttaaaaacatcggtaatctctgagaaaccgaactatgaaaattttcgaatcgtatgcctttttcgcatttgatctcttagttcttttgaactgttttcaggatcaaactcgcttcctttttataataactcacaagaatcaagcaaatggtgaagcaagaaaatgtatattggatgaacaataaaaagtgtgtaactgtttctgtaaataactctttgttttggaccataatagatattaaaatctcttgtaaattacctcaaagcaatttcaaaggtatccaaaatacttttcaatttatgcaattgaaccaaaacaaattcttccacgtgaaccgaaacgaaaatcggttttgatttctcatttaaaccgaataaaccaattttttttattcattagtctaaaatttaaattctattatctaaacataattgaaccggaactttcataagagaattgaatccaatacactaaaacaaaataaaactagaaatttatgtaattgaaccacgttggagtcaaattaaaaccaaatcagaattctattgcaattgaaccaaactaatttcaccaactcgaaccgaaaccaaaactcgattttttcattcataattctactcaaattctttatctaaaccgaattgaaccgaaagttttgaagcaaagtttgaaccgattcgatggtcgaattccggttatttccggtttgaggataagctttatcattctctgagagtctctctctctgtgagtggcgagcattggtttctggaaaatgaacacaaaaaaatatctgaaaatttcgatctaaaaagcataaacgaatccaaatttcaagaggagaagaaaaatcttcaagtccacgacgaaacttttcatcgatcttcaaattccagaaaaaactcg

SEQ ID NO: 13637 - DNA, 3000 bp, Unknown
  misc_feature (1)..( 3000): cDNA_ID_3031152_gDNA_ID_2214641_Annot_ID_188333 3000 nt of promoter + ATG
tagagtcgagactttttatatgtgtagtgaaacttaagaaatatgattgtgattgtaaaagttgatattatgatttttcattgaagtctttgctttgaagctaagtgaaactcaaacactctccacaacacagttggttggttgtgtaatatttggacatctttttaattatgataaaatatgacgtggataaaatatgccagctcggataacagtaaacgacgtcgtttcttatttctgattgattctctgtagagaagaggaagagaagaagaatggtgacaagaatggcgacgaaggtgagtttggaagggaagagagtggttttggtaccgtacatggcggaacatgtaccaaagtaccatcaatggatgcaagattcggctcttcttgaagctacgggatctgagccgttgagtcttgagcaagagtatgagatgcagctttcttggactcaagatcccaatagtatgaaaaaactctaaaccctatttagatatatatcttaaatcttccatcttctttatcttagatttgatcagtttcagttttactcaattagggtttagggttttcttttaaactaccctagaatctcaatgttgattgtttttgtttgatattttagtctttttctgtgaatttgatatcacctaagctccaagttcttggatatttagctatatagtgtcttatgaggttcattgagttcgtctcttaaccaataaacaatgattagagtagattcatgaccttttatatttgattaggtctatcttctttttcaaatgtagtattttctaatgcccatgtttttggtttcagagcggactttcattgtcttggacaaggatttcgttaagggagacctggctcatggccaacctcatgtagaaggtttgtttcctgagtataaaggagattactttagcatgcatcagtatggaatcttctatctagctgctgtgacaatgcagtactctctgcctttagttaataatgtagtggaattgttattagaacaaagtgtgtatagtggccggaaaatgagaacatatctacaagactgcttctttgttagtggtttagatcattggtgactaggttggctttaagagttcttccttatcttatttggttaaaaagaagtccatttagtttagcttgaatgctctgtagtgtttcttctgtgtatgttattttcacatttagtcattgtcaatatgtaactgaagcttttgtgcagcaatgacaggtgatgtgaacatttacatgaatgatgtggatgatccaaaggttgcagaagttgaaataatgatagctgagcccagaaggtaactttagtcttcccaattcgagtcctatacaacgcgaatacactttagctgatgttacttctggcacatgattcttatttttttgttacaaccatttggtagagtagccgtggtaaaggactaggaaaggaatctgtgttgataatgatggcttatggtgtcaagaacttggagattcacaagtttacagccaaaattggggaatcaaacacagcttccctcagcttattccgcaaactagtacaacaactcaatctcttgtctcaaatgtatgtgctccattgcctgtgtttacaaaggaaaatggctaaacacactttgttgtttgttaaaagggtttcgaggagtcttcttacagcggtatcttcaaagaggtaaaaagtagtttactacttcatacactccaacaaaggatgttacttttggcatatactagattgagtttctttaatctgacaggttacactcgagtatccggtgactaatctccgtcgagaagagctcttgaagttattggatgaagtcattaggcacactcattcatcgaacaacccatcagactcactgctatcaggagaagctactgcataaagcattttcttcagtgtttattgttatttttctcttcaacttgggaaagaatttgaaatcattgtagcatgtatgagtttataaattatgattactaatatacatggtccattgtttcaattcaaagttgagtcctactatttgttgagcctaggcctgggaaaaatacccgaatccaaaaaactgaaccgaacccggcccgacccgaacccaaacccaaaattttaaaatatccgaagggattctaaacttcaaaactcgaaaaccccaacccaaacccatccaaacctgaacccaatcaaatacctaacatatctgaaatatataaatataaaaacaatttattagtaataatcatatttacaacaactcaagtgcttaaaatatttggattttaagttttttttttttttttttttgtcatccgattataattagagctcaaacgagccaaaactgaggaatgttgtttacataagtgatatgaagcagttcagtgcgaacttttcgcgccaagctatccgcttttacatttgcatttacatttacatttgtattttaacttattttgtatatttttgaatactttacctacttttagctatattaggatataaatactcaagtttttcaaaaaaattgtgtattttcaagtaatttgaatatatttttatacaaaattttgagttttggatattccgggtaaacctaaattcgaacccgaaccaaacccaaaatcttaaaataccgaatcttagatttccaaatccaaaataaccaaacccaaaaaaaaccaaaaaaaactaatccaaacccgatccgatccaaatccgaaccgaacgtccaggcctacttgagcctatacagggataaatataattagcgaccattctatttttcctatgatacacttccaaactgaacaaaacgcaatttttatcattattgtaaacaaaacgcaaacgcaaacgcaaacgcaaacgtgaataaaacttgaatccactcataggagaaacttccaccactgattcttgcataatccgaaaaatctctgcgaatactcgcagtaatg

SEQ ID NO: 13638 - DNA, 3000 bp, Unknown
  misc_feature (1)..( 3000): cDNA_ID_3031164_gDNA_ID_2214641_Annot_ID_188328 3000 nt of promoter + ATG
aaagaaggttgaagaatgttccaagacaaagatgttggatggttggaccatctaaagggaatgatgctatggaaatggcaatggagtttaataagtcatgggagactgatttgagagttggatttcatgattgccgacattataccaatggtttagtgttatacaagctttaatttaatcaagaagactttggtttttatttgtttctaagtgtttttggtttttaatcttttggaatacagaacttgtccaacatcttaccggagaaatgcaaattgtggagcgacttccaagaagctaatgctatagatgaaacaaatggtcatttatcttatctactaagattttagacccgacaattatgatgtgataattagtagttgaagataaattgaatattagtattgtttattagtaagagtggttagtttttctatatttacaacttttgtcttacattattcaaatttattgttgtaagtaaagtaactaataaaaaggttaagccaaaacaaaagagcaaaatgaaacataattgaaattttcttaccccaaactggaaaataatacaaattggagccgtctgatttaggttcttatttggttttcggtttatcggtttgattaaatgtatgtaatttgtttggtttgctcggttctctttggtgtttattggatttattataaaaataataataataaactatttaaaaaccatatgtgattcggtatgatttggtttggatttgtttccctgtgaattatcaaaattataaatcagcaaaaccaaaatgaatatctttttcaatttgcaccgaccaatcgattgaaaaagagcaatatttaaagactaactcatatagcaccacactatacatatataatcgaaattaacatatatttacagtattaaggatttttaagaaactacaatatttggtgatatataatatatatattaaagtaaatttatatacagtagaaactttataaattaataaatataataagttaataaacacgataaattactaaatttgttataaaattaaaattaataaaataataagataataattttttgaaatccttgtgtaaaaatatgatcctaataatatcagtaattaattatcataattcttaagcatacattttaaaataatctagtataatatgaatctagtgttatttgtcttttcgtacggatctcgttgaagattatctgtaattttctatattgcatcaaaactcctggtgtcgttttctcgatctgcctccaaaagttttgaagagttttatacttaataattacttttttacatgtcactatttccaaaggttccacattatctttgaacattcattctatttcgataatcaagggtgtaaatggatacctagatttgttaagatgaaagagtcgaattgtgggttcaactttattcctcaagaaattcaccatttgcttttaacaaaatttcaacccaattttattggggcccaccataaagctgaaaatttacactttttagctgaaaattgtccaacctcaaattaggagaagaacaaattgaacgtgataaaaatttataatatatttctatctctattacatttaaattaattaatttgtttagagaatctagaaaattcaaatactaaactaattcagttcaatctttgaataatttgtaatcttttgttgtcgaatataagatatacacgaaccaacaactataatatcttcttataaatcagctcaaactttggacaattttgaataattcatatttttattttattaaaaccaacagctaaaatctgttcctataaatatactaatcccatcaagatttatctttacacaaaatattatgaactaaacacattttcttctttcaaaaacaatagttgttagtcaatcatgagtgaaagataatatttctctctacttatatgaagatgggaattatatgaagatcgtccgtgatcaaattgctgagcaaatgtggtccgcaagtcgaaatagttctcatcgacattgttagattttattttaaataatatttttttatatttaactattcagctaaatggttactatttaacatacattttatttctctgcagctaatttatctcattcagctcaatcaccatctagaccccaagattatcaatcacaacttcatcgtagatataaggacatactatcttgcaggaaaagaaattaataaaataaaaaaataaaatttaacataattgaatatacaaacgacaaagcataaattttataaaaataaaaataaaaggattataatattatattttgtgtaaatatttctaatttattaatttatggtatatgataaattaatatcattacaaattaataaaatttcaaggtcccaacattattaatttatagagttttcactatatcctaacttataattcataaaagaaattccggatttctatttctcggatggattatagatatggtagaattcaaaccatcagataaatcatcaccactcgaacatgggaccgctatacgagcactctttagttctatcattctatgtgtaaaatcacctttcaaaacctaaactacatatcccactcagttttgtttcttgtcaatttttttttgttttcagataaataatacccaagtaaaataagaccccaccatctctgttaatcatggggccagttcctaaagcgaagcctcacgtttctatctccactatttccctttttttttgttgaaacttagaaccaaaaatatatccatgacaaactcaagcactactacgactagataacaaataaacaaaaaggaatttttttcccaattggccacttgcactttttagttttcacccaataaatacctctaagtaacctctctttcttcctcctcaaaaaaaaaactcatttgctctctccaaacaccaaaacccaaaataagtttcaaaggagaaaacactaaag

SEQ ID NO: 13639 - DNA, 3000 bp, Unknown
  misc_feature (1)..( 3000): cDNA_ID_3031168_gDNA_ID_2214641_Annot_ID_188327 3000 nt of promoter + ATG
ccaaattttatgtggacttgtagattagaaaaaaataaatttgaaagtcattgaaaattgttgaaaaatgtatttataaatttaaacaaataataatgcaacaataaatgataaacaaagaaaataataaaacaacaattaatgattgagaaagacactaaaacccccactaatcatatacatataggtaaaagaaacaaaatcaagaagagtgtttatggttaaacaaagcaaaaatgatcaaataaaaacaagattatgatgttgttgttgtaaaacggcatagtcaagtcacaagcgcaccaccagacggtgccgcaacaacaacaacaacaacacctacaccgcataagttacattacaacacaccctgtctttaaaaactctttcctttttaataataaatctttctttaaataccatctctcttcttcctcctctgcttctcttcatcttctaagaaagaaacaaagaaagacttcacattttaccattatttgctctgagctcaggtcagcttttctctcttcccctctctcctctctcttctactttatggtacagttgaattaacaatgccattgaactactacttccatgaatgtatcttctttacacttgttgtcttaagtttctatttttgtctgatccagatctagtttcttctcttgtgtcttgtgaacactttagcttcttactgtctttatgtttgttgttgttgtgtcggtttgtttttcatttttccagtaatgttgaagaaacaagttcaagatctgacttaactaacttacactagttttagtttgctagtagctatataattctttgatcctgttaaagaactcaaagatcattcgttcttgaaaacagatccggatctgagatagggttcttgataaagattcgatatttgaatcctgatttggtttcttgtaatgcagtaggagagttcaagaaacaatggcaaagatgcaattatcaatctttatcgctgtcgttgcgcttatcgtctgctctgcatctgctaaaaccgcaagccctccagctccagtgctgccaccgacaccagctccagcaccagccccggaaaatgtgaatctcaccgagcttttaagtgtagctggtccgttccacacattcctcgactaccttctctcgactggagtcattgagactttccaaaaccaagctaacaacactgaggaaggcatcacaatctttgtccctaaagatgatgctttcaaagctcagaagaatcctcctttgtcaaatctcacaaaggatcagcttaagcagcttgttctcttccatgctctgcctcattactattcgctttcggaattcaagaacttgagccaatctggtccagtgagcacctttgctggtggtcaatactccttgaaattcactgatgtttctggcacggttaggattgattctttatggaccaggactaaagtcagcagcagtgttttctccactgaccctgttgcggtttaccaagtgaaccgcgtgcttctacccgaagcaatctttggtactgatgtccctccaatgcctgctccagctcctgctcctatcgttagtgctccttcggattctccttcagttgctgattctgaaggagcttcttcaccaaagtcctcacacaagaactccggacaaaagctgctacttgcaccaatctccatggttatttccggtttggtggcattgttcttgtgatcagatggttttgcagattgagttatgtttttaagttacaatgtgaaagattgtattacatcatttgaattgtctttttgatttttgaaacccattttttattatacatttttatcattattattgtttgtcattacgattgttgtgaattgaaattgttcctccattttgcttttctttagttaattttgcttcatttgcaagttaagatgataccaagaggtttaaagttcattctctttgatataatctgaagataagtcaataaatggcttgggatttgttcaatctggataaataatatgcagaatttgtttcactagtctgattacggcagtaactaggcctcggcataatacccgaaccctaaattttcaaatacccaaatgggtttaaatttcaaaatccgaaaaacccgaataggtaaccaaacatatctcaagtataagtatatattagttatatttatactaatatatataaaatattagaatttttcagatattttagttatttttgtgtatttttagatatattcaagcaaaactactcgtgttgttttgggaatttttgaaaatttcaagtaatttaataaatttgcacagaaaattttgatatttgaatatataaataagtctgaacctgaactcaaaccgaacccgatccaaaatcttaaattacccgaacgggtcttaaacttctaaatccaaaaaatccgaacccgaaatatttgacctaaatacccaaacgcccaggactagcagtaacgagccttaacccgttttgagtaaagctttttttttttatctctatggttacaacgccattacgagacgcccttggattcataattatgggagtagaaccatcaactatccacaaaacaatgaaatttcctactccatggagaataaaagagatcaaaagagagtaggagtataaacattcatgtaaccaaattgtgttgaaaggcaaatggcaaccattataacatttctaaagtcaatagatatttaaagagatgttattattatgtagattatcattctcactcttgtgaattgagatagttcctccattttgcttttctttaattgatattggttcacatccaagctaatgtaacccatctcataacagatttataatttcgtgtataatataatctccaaatcactaattatgacctcacattttaggataatgttttttttttaaatgcttatggtcaagaaagaagataacgattcaagccacacgaaacagaagaagaca

SEQ ID NO: 13640 - DNA, 3000 bp, Unknown
  misc_feature (1)..( 3000): cDNA_ID_3031184_gDNA_ID_2214641_Annot_ID_188322 3000 nt of promoter + ATG
gcggtataggcctgcaactcttctgcgataatttgctgcgtcgggttaactagtgtgttactttgcttttcacagagcaattcatgagcctcacgagtgcgctttggcaagtcccctaatttctctttccccataattctcaagctcggctttaaggtctttagcttctttaagaatctatgcaaagctgaagtagaaataaacaaaggagcagaagcattctagtggctctctaccgcaggcaaaaactgaggtaatgtcgtgaggacattaacaaatttaaacggcttgcgaccccctatcgcttcagcctcaagcattatccttccccttgtatgatcaaaacaacctccagactcaaaaacactataagagtgcgggaaagtagtacaccatgaatcattaacaagaactcgatcaagttttttgcatatcaaaccatcctcccgcttgttacaccaggtaaagcgaggaccatggtatccatcgagaatctcgttaaaatcaccacaaagcatccacggtttgttgcgaaacatgggtgaatcgtggtgatgtctaatgtcttcccacaatattttcctctcctccacataatttgaagcataaataaaggagcaaaagaactcttcctcttttccctccaataaaactgaacaagtaatacaggagttaagcgaacacttgcactccacactacccaaatgcggcctaaacgatgtgatttgtagtaattagtcagtgaagaccaatcctgaaaagtagacgaaattatatctgatgatttgccctcattaactcgcgtttcgagaagaccaccaaactgcatagaactttgagataaccacttgcggacgatggaatgttttgaagatttatttagaccacggacattccaaaaaaaaaccgacatatgattacttctttttggtgacccggcgatctgaaacactctggttaccctttgtgttttgattgacggatcctttaacaaccttgtgcatagttttagaagctcgaggaaaagagggacgagtctcctgcgtacctaccacctctgaagagaccactagctcagctgattgcttagtaacaatctcacctttttcttggctctctaaatcgtcggtgtagtcttccaaagctaaaatcttattacattttaggccttgttaatacttgaaactaaatagtttgagtttggatcttgattaattttattatataaaatatgagttttaaaattagttactcgcataaccatgacacgtgttaagtttatcatttagatgttaatatgtgttagaaagttttactttcttcttaacaaaaaggaaaactacaaaaaagaaacatattcacatatactaattaaatgtctatatttacaaaatttaactttaatttttcttactaaacatgaaaactaacaataagagtttatataattaaattgtatttgtattgcaaaatagaattgtatttgaattttaataaaatcaaattaaatagtattttattatgataaataaataaatatatatatatatatatagtattagaaaatcaaatttgtaagactgaatatttttcaagaaaatattaaattaaatattgaaaaagtatatgagttgctatttaaaattcaaatattcaataaattagagtgtagaaaattaaaatacagtttattacgatgaaatggatacttaagatgtatagtaaaatttaatgtgtatgattggaatttttattaattcaagtttactaaattaaatattagaaaaagtgtgtaaatcactatttactattctaaaatttaaatattatctataaatctttgaatttatatcttacactcgcataccttatccagtactatataaatgatagttcttatggttatgttctaaatttctcttagaaatggacttgtacataagatctttttttggaaatcatgatgggcctctaggacagccactctaccgtcgtatccacttgggccagacatgcttatgcttaatgctgattccgagagattttaaattgataaatgtggaaaaagggtattcgaaaaaccttatcatagtttaggttcacatttcgtgtggtgattgaagaatgcctaataaatactttatatcattttaaaaaaatattaggagattctgtaccaaaacccgtaatcttcccagattagtacactacaacatttactaattttttcctaagcgacactcgaaccgacgatctctaagcttttcctaagattaccagttgatctaacgacacttggaagataaatactatgtctctaaaattttaaaccaaattattcattgcatatgataaccaatattttcttgataatgtgtaggattaaagattgagaaattattattattattattcttattttttattttattttagtttttgttaaagattgagtaattttttttttttgtatgattaaaaattgagtaatttagattgagaaattatctaaattaccattataagaaaattatgtttgaagagtttttgggtggtttaagaagggttcataattaggaagggtatcaaacgcaattctgtggcaatgttggatttttgctgtaatttttgaggaaagaaaaaacataacaaaaggtactattgaaaatcacttttaatatttgtcaagttctaataaaatctacataaattgatagaaatatccattatttagataaaaatataataaatcattaaatatttagatatttacaatcttacagaaataatcttctataaaaagcctctggaatcactaatgtaataacctattattcttaaaaatgtcagagaacaaacatttaaataaagaaaataaaaatactaatcaaaaacatctctcccgcctctgttttatttcaatctaagtaggaagaaatataaattaagcgatctttctctaaacaagatttgagcaagaatcatcatattcaagagatg

SEQ ID NO: 13641 - DNA, 3000 bp, Unknown; identical to SEQ ID NO: 13636
  misc_feature (1)..( 3000): cDNA_ID_1012546_gDNA_ID_2214641_Annot_ID_188317 3000 nt of promoter + ATG

SEQ ID NO: 13642 - DNA, 3000 bp, Unknown; identical to SEQ ID NO: 13635
  misc_feature (1)..( 3000): cDNA_ID_3031196_gDNA_ID_2214641_Annot_ID_188316 3000 nt of promoter + ATG

SEQ ID NO: 13643 - DNA, 3000 bp, Unknown
  misc_feature (1)..( 3000): cDNA_ID_2703629_gDNA_ID_2214641_Annot_ID_136248 3000 nt of promoter + ATG
tgtttagagaaagatcgcttaatttatatttcttcctacttagattgaaataaaacagaggcgggagagatgtttttgattagtatttttattttctttatttaaatgtttgttctctgacatttttaagaataataggttattacattagtgattccagaggctttttatagaagattatttctgtaagattgtaaatatctaaatatttaatgatttattatatttttatctaaataatggatatttctatcaatttatgtagattttattagaacttgacaaatattaaaagtgattttcaatagtaccttttgttatgttttttctttcctcaaaaattacagcaaaaatccaacattgccacagaattgcgtttgatacccttcctaattatgaacccttcttaaaccacccaaaaactcttcaaacataattttcttataatggtaatttagataatttctcaatctaaattactcaatttttaatcatacaaaaaaaaaaaattactcaatctttaacaaaaactaaaataaaataaaaaataagaataataataataataatttctcaatctttaatcctacacattatcaagaaaatattggttatcatatgcaatgaataatttggtttaaaattttagagacatagtatttatcttccaagtgtcgttagatcaactggtaatcttaggaaaagcttagagatcgtcggttcgagtgtcgcttaggaaaaaattagtaaatgttgtagtgtactaatctgggaagattacgggttttggtacagaatctcctaatatttttttaaaatgatataaagtatttattaggcattcttcaatcaccacacgaaatgtgaacctaaactatgataaggtttttcgaataccctttttccacatttatcaatttaaaatctctcggaatcagcattaagcataagcatgtctggcccaagtggatacgacggtagagtggctgtcctagaggcccatcatgatttccaaaaaaagatcttatgtacaagtccatttctaagagaaatttagaacataaccataagaactatcatttatatagtactggataaggtatgcgagtgtaagatataaattcaaagatttatagataatatttaaattttagaatagtaaatagtgatttacacactttttctaatatttaatttagtaaacttgaattaataaaaattccaatcatacacattaaattttactatacatcttaagtatccatttcatcgtaataaactgtattttaattttctacactctaatttattgaatatttgaattttaaatagcaactcatatactttttcaatatttaatttaatattttcttgaaaaatattcagtcttacaaatttgattttctaatactatatatatatatatatatttatttatttatcataataaaatactatttaatttgattttattaaaattcaaatacaattctattttgcaatacaaatacaatttaattatataaactcttattgttagttttcatgtttagtaagaaaaattaaagttaaattttgtaaatatagacatttaattagtatatgtgaatatgtttcttttttgtagttttcctttttgttaagaagaaagtaaaactttctaacacatattaacatctaaatgataaacttaacacgtgtcatggttatgcgagtaactaattttaaaactcatattttatataataaaattaatcaagatccaaactcaaactatttagtttcaagtattaacaaggcctaaaatgtaataagattttagctttggaagactacaccgacgatttagagagccaagaaaaaggtgagattgttactaagcaatcagctgagctagtggtctcttcagaggtggtaggtacgcaggagactcgtccctcttttcctcgagcttctaaaactatgcacaaggttgttaaaggatccgtcaatcaaaacacaaagggtaaccagagtgtttcagatcgccgggtcaccaaaaagaagtaatcatatgtcggtttttttttggaatgtccgtggtctaaataaatcttcaaaacattccatcgtccgcaagtggttatctcaaagttctatgcagtttggtggtcttctcgaaacgcgagttaatgagggcaaatcatcagatataatttcgtctacttttcaggattggtcttcactgactaattactacaaatcacatcgtttaggccgcatttgggtagtgtggagtgcaagtgttcgcttaactcctgtattacttgttcagttttattggagggaaaagaggaagagttcttttgctcctttatttatgcttcaaattatgtggaggagaggaaaatattgtgggaagacattagacatcaccacgattcacccatgtttcgcaacaaaccgtggatgctttgtggtgattttaacgagattctcgatggataccatggtcctcgctttacctggtgtaacaagcgggaggatggtttgatatgcaaaaaacttgatcgagttcttgttaatgattcatggtgtactactttcccgcactcttatagtgtttttgagtctggaggttgttttgatcatacaaggggaaggataatgcttgaggctgaagcgatagggggtcgcaagccgtttaaatttgttaatgtcctcacgacattacctcagtttttgcctgcggtagagagccactagaatgcttctgctcctttgtttatttctacttcagctttgcatagattcttaaagaagctaaagaccttaaagccgagcttgagaattatggggaaagagaaattaggggacttgccaaagcgcactcgtgaggctcatgaattgctctgtgaaaagcaaagtaacacactagttaacccgacgcagcaaattatcgcagaagagttgcaggcctataccgcttggcagcattgagcagatctggaagaaggctac

SEQ ID NO: 13644 - DNA, 3000 bp, Unknown; identical to SEQ ID NO: 13639
  misc_feature (1)..( 3000): cDNA_ID_2703637_gDNA_ID_2214641_Annot_ID_136251 3000 nt of promoter + ATG

SEQ ID NO: 13645 - DNA, 3000 bp, Unknown
  misc_feature (1)..( 3000): cDNA_ID_1012699_gDNA_ID_2214642_Annot_ID_136261 3000 nt of promoter + ATG
accaaattgatcattgaggattgagaaactactaaacacaagagaaagagagagtatgtgtgtgtgtttccttcacctgacgccaagaatgagagcagcttcccttttcgtcatcgtaggctggaaaccgccctcataaaatttcttaattttgggccttggtggccttgccttgaatgcttgccatgcttggattccatatctaccagcaagtgctgttgcagctactgcaacccccgctataaatggtgtcgcctggtgtaccaaaaacgcataacacaaaattaagcatttgtatatgctttattcttcttaccatcatcattctccaatgaatcaagctcacttgtcacagttttcaaaatctattgattaaaacttgcaaagaggactcatttctgctacagtaaatgacaaatacattgcaaacaagaatccaaagggacttaagacacactacattcatgaaagaagtattttgcagtcagttttaaatcttatcttaactaaacacaagactcttcaagatgagaaaagccaaggcagtgactcttcaaagattcatttccttatcaacaaaatgagccaagagagattcatatccaagaaagatcgatttagcttaagaaaatcattgaccagtattaaacacgattaacagagcactgattcatgatattataaaacttagaatccaaaagattcacagaacaagactcacaactaacggatgaaccctaatttctggaagagactattagtgttccgaattacgtaccattcagaaatctaggattcttcgtttcatccacagcttatttggatttgcgaagccgcagaggtggctgatgccgtcagagctctccgatcgctgcaaccaaaatgggaactcaatcaaaacctttgaggctgagctaaaccggttttaacgccaaccggttcaaaaccggttttataatttctcaatagaattagcaattggatcaaaccggtcttttcttatttgcatttttttgggtattagtgatgagaaggggaggaggtatccaagtatcttaaagagcttacaaacccaacaaaaatccacacccaaaaaaagagtataacaaaagaaacgaatttggattacaagttcttgaaagcagagtcatgagcatcctttggaggagtgagcctagccaacaatgccttgttagggcaatgatctgcatccacaaagtagaaattcccatcagccttgaagctcacatacggtctttgcgtgtctggataacgtatgtctgagaatttcagtgtctttgcgctaaatgtgccgagccaagtcatcatctcgacctcaaaagtgtctgaaccaggctgccacctcagcttgtgcacgtagggactaacaaaccagtggagagcagcggttgtggatgcgctaaggaagatcacagtagaggcaacagcacctttcatgatcacattcagtcccggggaagtcatgaaagtgatgaccgggccaagagagactgatagacagcaagtggagagtgagaggagtttcactttctttatggttgatgagattggtccatagtaaaccacacctccatccttctcttctttcttctcttggggtccgatgctgatcttgtgctcatcatcgtcctctctagtctttgctccaaatgatgcccagcttctctggctaagggatggaacctggaatctgaccttcgggttcactgatgatgaccatgatcctgctattgaccggtgatgatatcctgaaaagaaatgaccataggcttgatgaatctgtggtatctcgtgaccacatactactgcttcaaacaacagctaaggctcacaatgcttcaatgaagtggaaaaaccctaacttgccatttctcatccaaatgaagcacaaccccagtttcaaatccgtttgagaccaagactacatattgcctaaccaattgctaaaactcaaaatgctacaagtgaacgggaaaaaccctagcctgccatttctgatccagattaagctatggtatataatgctcaagtcaatttcaaatctatttcagcttatcggatgcaaagtactttcaccaatcaaatcgaaaagggaaaccaaaatcacgagagtggtttgagaaaatggatatacaaaacccataaagacaatatatagcagccatttctactctaaagccgtaaggattgagcttttcccgtaaattgtataaacaccatgatcggacttgtttcccggaaaatgaaaggtgtatagtggagaaaaaaagaacctgaagtgaaggtggaggaagagagacgtcgggattgggagcgaagcaagtgaatcagagctgatcttcccatcgccgtttctgttgcgagattgcaaagattcaggtctcctcctccaaatgaatgttgtagggttttagagattttattttcctttatatattaataaaacttgtagctttataaatttcttttagtggtctagtggttactgtttctctcttcaagcatgaagtctcgtgttcgaactttttttctttgaccttgataacacttgcacacctttttttttttttttttttttatcttcaacacctaatggacaaaattttatttttgtgtattgttttatgtctctctacaaaatcacatgactgattgaggaatttggatccgaaacgatgactagagtctagatatgacatgtattaagggataaccattagttactcgagttgtttagctaagtaagagtccgtgtacgtttttcggtttcttattggctcttcgaatcaaaaatagatgatgatacaatgtaacataggcaaggacaaagtcatcgttgtaaataaagtcaatgatgtaagaaatacaaatataaccgccatttattaatctcacttactctgtccccaccatcactcactgattttattatcatcaaaaacattgagatcttcacccttatcatttgatccaaccatg

SEQ ID NO: 13646 - DNA, 3000 bp, Unknown
  misc_feature (1)..( 3000): cDNA_ID_2713944_gDNA_ID_2214642_Annot_ID_136262 3000 nt of promoter + ATG
acattggcaatggcttgttgtcgagaaacgactgaaaaagaagaaaagctcgacgagggcggaaaagaggtacctcatgtcctgctccatgtattgtcaccagagtcagccctttgtaaacttggctccatccaccaacctgttctttcagtactcatgcattagtttccacagaagaaagaaatgagactgaggaaactgagtattgagttgtttttttctacctgtccatcatcgttccaagggtaccatttggagagtggttgtaacttgagggctctaatggagtatcgtgttccagtaatgggaaccactgaatcagtgtctccgctgcatccaaatttacagaacaagatatcaatcatgataccaaaccgggatgtacaagatgatgatcaaaaggagaagtagatatacctgaaaacccatatcctgagacctgcggcgatgagttctttgtagattggaagcatagacagaggagaatctgcccatttctctccaacgatgtcactaaacaagaaaactatgtcactgaaaatgaaccacaagagaacattttcttaaatttgttgacccactataatgtgttttttacctgcaccctttccatggataagctagtcctgttatattagcatgcatagccttttgaacctccggagaattgaaatacatgccggagtatttctctgtgcaagggtcataggctctccacatccatggcttagataaacaaaaaacgtagcaagtttagagatttgtcaaatcttgttacctatggactatgtcttggtagaataacttgaatctatagaagcagccataaagcaaatcaagtaatcaactcagacaatgaattggaatcaagtagcagagagaatccgaaagatttttttgcagtccagaatccagatatcatgtaatccccactctactttcttggactaaccaaagtacatctacttgttgaaataggctcatatattggtcattttgaatctggtagcacaaagagagggtctaatacactagatacgtagccaattctgcatataaaggtttgactttcatgttctgtctctagtaaagttggaacctcctaatgaccaaaactaccttactcgagctggtaatagtagttaaaggaatatgatgggcagtgatggaaaactcacatgacgaactctcgagaagcgagacctaagagctgcagcctcctttttacaagtgacagtgtaaatgctataaggatcaatattgccttgctccaagtctgcagcttccatggccttggtgcatttagaggacgggtgctcggatgatccaaattcacacgtgatccgtaagttgtggtaagtgagatcagatatcaacccatgagcccaccaatattcaaataaacccacgtaatcatggtagtcatcaatcacagcattcccaacctagaaacaaactcacgtttataccaacacaaaaagaacatgttaatagatttgtgcttctttttttcttgcttacaatgaagcctttaaagttgatagctggattgcgtttctcataaacaatctgtgacaactgaggaacataatgacctaaagaagaaaagtgaaaatgcttagctaagacaaagtttccaattgaatagaatcagtaataacaataacctgcatagctttctccagcaatgtagaactctctgtgtttgtattgaggaaacctctcaaaccatttcacaagaaacacataagcatcttccgctagaaaaaatcaaaccaaaatcatcaaatgattgataaatctagagaaagagaagtcaaaggtcaagactttaccagttctctgatctccggcagtatacaaatcggaggtagtattcgaatacgagaaaccaacaccagcaggagattcaaggaagagcaaattcgccactgacccaatataaagagtgttaatttaaggattgtgaaatcaaaatttggagagaaatggagaaacagagagagatgtacatttgttccaagagtaaggattgtggtaaagagttttgccatcaggattgattctaaaaggtccgatttcttcagcggcaccgtaagctacggaggaacaaccaggtccaccgttgagccagaggacaagaggcttagactcagggttttcactcggtggtgactcagtgagccagtagaatagtgctcttcctgctgactcgttgacggtaatgtaaccagagaagtgagagaaggagacatcgtttggttcaccgggaaggtgaaagattcggtctttttcttgttcgtgtctggaacaagaagcgtaatggagtagaataaggaagaagaagaagaggagaaggagtcgagccatggttggatcaaatgataagggtgaagatctcaatgtttttgatgataataaaatcagtgagtgatggtggggacagagtaagtgagattaataaatggcggttatatttgtatttcttacatcattgactttatttacaacgatgactttgtccttgcctatgttacattgtatcatcatctatttttgattcgaagagccaataagaaaccgaaaaacgtacacggactcttacttagctaaacaactcgagtaactaatggttatcccttaatacatgtcatatctagactctagtcatcgtttcggatccaaattcctcaatcagtcatgtgattttgtagagagacataaaacaatacacaaaaataaaattttgtccattaggtgttgaagataaaaaaaaaaaaaaaaaaaaaggtgtgcaagtgttatcaaggtcaaagaaaaaaagttcgaacacgagacttcatgcttgaagagagaaacagtaaccactagaccactaaaagaaatttataaagctacaagttttattaatatataaaggaaaataaaatctctaaaaccctacaacattcatttggaggaggagacctgaatctttgcaatctcgcaacagaaacggcg

SEQ ID NO: 13647 - DNA, 3000 bp, Unknown
  misc_feature (1)..( 3000): cDNA_ID_2703684_gDNA_ID_2214642_Annot_ID_136263 3000 nt of promoter + ATG
gcaaagactagagaggacgatgatgagcacaagatcagcatcggaccccaagagaagaaagaagagaaggatggaggtgtggtttactatggaccaatctcatcaaccataaagaaagtgaaactcctctcactctccacttgctgtctatcagtctctcttggcccggtcatcactttcatgacttccccgggactgaatgtgatcatgaaaggtgctgttgcctctactgtgatcttccttagcgcatccacaaccgctgctctccactggtttgttagtccctacgtgcacaagctgaggtggcagcctggttcagacacttttgaggtcgagatgatgacttggctcggcacatttagcgcaaagacactgaaattctcagacatacgttatccagacacgcaaagaccgtatgtgagcttcaaggctgatgggaatttctactttgtggatgcagatcattgccctaacaaggcattgttggctaggctcactcctccaaaggatgctcatgactctgctttcaagaacttgtaatccaaattcgtttcttttgttatactctttttttgggtgtggatttttgttgggtttgtaagctctttaagatacttggatacctcctccccttctcatcactaatacccaaaaaaatgcaaataagaaaagaccggtttgatccaattgctaattctattgagaaattataaaaccggttttgaaccggttggcgttaaaaccggtttagctcagcctcaaaggttttgattgagttcccattttggttgcagcgatcggagagctctgacggcatcagccacctctgcggcttcgcaaatccaaataagctgtggatgaaacgaagaatcctagatttctgaatggtacgtaattcggaacactaatagtctcttccagaaattagggttcatccgttagttgtgagtcttgttctgtgaatcttttggattctaagttttataatatcatgaatcagtgctctgttaatcgtgtttaatactggtcaatgattttcttaagctaaatcgatctttcttggatatgaatctctcttggctcattttgttgataaggaaatgaatctttgaagagtcactgccttggcttttctcatcttgaagagtcttgtgtttagttaagataagatttaaaactgactgcaaaatacttctttcatgaatgtagtgtgtcttaagtccctttggattcttgtttgcaatgtatttgtcatttactgtagcagaaatgagtcctctttgcaagttttaatcaatagattttgaaaactgtgacaagtgagcttgattcattggagaatgatgatggtaagaagaataaagcatatacaaatgcttaattttgtgttatgcgtttttggtacaccaggcgacaccatttatagcgggggttgcagtagctgcaacagcacttgctggtagatatggaatccaagcatggcaagcattcaaggcaaggccaccaaggcccaaaattaagaaattttatgagggcggtttccagcctacgatgacgaaaagggaagctgctctcattcttggcgtcaggtgaaggaaacacacacacatactctctctttctcttgtgtttagtagtttctcaatcctcaatgatcaatttggttatagcattagcatagtttccattgaagaaagtgtaacgttgtttgaaatgtggggttttgtgattgaaaacacagggagagtgtagcggcggaaaaggtgaaggaagcacacaggaaggtaatggtagcaaaccatccagatgcaggtggtagccatttcctagcctctaagatcaatgaagctaaagacgtgatgctaggcaaaactaaaaacagcggatccgctttttgatgcaaatttcaatcaaaagacttccttatgaatcatcttatgttataggactgtaatgtcaaaatgcagattttatgctaatttataagcttgtggtctgtttgtgacacataaagactcgaatcttttctttcacttgttgtcgctgaaaagaacacaaaaataaaaacgcaaagcagaagggcgttctagtcttttcggttttaaaaaaatccagtaatagaaactctagtacacgtgtcatgtggctccagcgacgtcttacgtcaacctctatccattcattcccctattagcaactccctccacaaaactatttttaattttattttttattggcaaaacaaatctattatttaatccttgtttttttttttaattattcgacaatcgaccgtctaattatcttttaattatcattagctcttgctaaaggcaaaatcgactcatttttcttgttttaatgtgaagttttaatcgcttataaaagcctaaaactggattatgattaatgagacccggtcatgatttatccactacatgaaagaaaatacgtaaatatagtactagtattaatttattaattattattattatctgttataatatccatgtctttatcttcttctaattttcattttcattttacgtttttttaaaaaggcaaaaaaaaaaaaaaaaaaaggagaaagaaagaagaagaagggaactaaagagggtcatcatcatttcatggttacctcctcttcctctcttcttactctcaccatatctgctctctctctctctctgtttcaagcttttgctcccatttttcatttccttcgtattctcgctcgagcttagcggttgatgtaccaatgaccaaatcgatatttgaatcgccgtggctacctttctttttcttctgatttctctatctctcgcttgattctaccacttttagggtttctattattcccagggactttgggtttctttaagaagttcgattcgtctccgttttctttttagggttaacgaagtctgtggtgttggatttcgatctttttttttttggtatcttccccattgactgttgcggtgataagagagtgacgca

SEQ ID NO: 13648 - DNA, 3000 bp, Unknown
  misc_feature (1)..( 3000): cDNA_ID_2713942_gDNA_ID_2214642_Annot_ID_136264 3000 nt of promoter + ATG
ctggtactcttaagaaaagtgagatattggcatcactaaataacgcaggacttcctgctaatgaagaaaatgctatagccatgatgagatttttgaaggctgataccgaggagtctatctcatacggacatttccgtaatttcatggttttgctgccatatgagcgcttacaagatgatcctcggtaagtatagtactttgttttgaaataaaattgatgttttattttgtagcggcttgtctttgcactaatgagtaaaatgccaatttgaccactagaactgtttggattgaaccggaccagtttccccttagtttctcccattcatgttgatttcctcaaacacttcaaacttataatttttgttgtcataccaatggtgattgatgctatttttacttgtatagtaacatctggtttgaagctgcgactgttgttgctgttgcaccccctgtggccttacctgctggagatgttctaaaatctgcattagcgggagggcttgcctctgctctctccacttccttaatgcatccgattgacacaatcaaggtgagtcctcttggtgcttttgcaagctgaatataagtaaatgctctgtttagacaagtttaggtgagaacttggctactacaaaagtctgcgtaattgacatctgcttctacaatatttgaatatttaaatagatgagtatgccaattattcctcctggcttcttgtggcatactgttgacggattcgttatcactttcatgccagacacgtgtgcaagcatcaaccttgtcatttcctgaagtaatagccaagcttccagagattggtgtccggggagtgtataggggttctattccagcaattcttggacaattttcaaggtcttttcagttgtttcaaatcaaagatattttcacttctacctattaaatttgatttccatgtggcttaatctctttcatcattgtagccatggcctgcggacaggaatattcgaagcaagcaaacttgtgttgatcaattttgctcccaatctcccagaaattcaggtgattatcactctctactcactgtttggctggtttcgtcaagattctaattttgtgcttcaagtatatgtattattatgtgttcttatagttcatggcatctagtaagtaaaccatatgttagaggaaaaatccaatatcaaggctatttcattgcagtacttagcttccttgatgcaatggttgacatggtagttggtagatcattgtatactactatttgttgcatctccttggttctaaagttctagtagttatgtaaagtttatggctagaataatatacacttgatgctgctggggctaaatggtctcttaattgcttggtttgataaagttgtgtatggtttctgaagtagaacccatccgcttttggttaacagttacatcgtttgcatttgtgctttctgatctgtgttttgtactcggtaaccaatgtgatcatttaatgcaggttcaatcgattgcatcattctgcagcacactattaggcacagctgtgcggattccatgtgaggtgctgaagcaacggttgcaggctggcatgtttaacaatgtaggggaagccattgtcgggacgtggaagcaagatggtccaagtggctttttccgtgggacaggcgcaactctttgccgcgaagttccactatacgttgttggcatgggactgtatgcagagtccaaaaaggtaagaaaaccgaaatgattggattatcataagggtcactactgtaattgttatattgattggggtttatgtgtgtattgtagatggtggcgcaagctctgggaagagaactggaggcatgggagacaatagcggttggggcggtgtcaggaggtattgcagcagttgtaacaaccccatttgatgtgatgaagacgagaatgatgactgcaacgccagggagaccgatctcaatgtctatggttgttgtatcgattctgcgtaatgagggaccgctaggtttgttcaaaggagcagtcccgaggttcttctgggtggctcctctaggtgctatgaactttgctgggtacgaactagccaagaaagctatgcagaagaacgaagatgcagtgctagcggatcagcttggtcagaagaagctttgctaatgggattttactttgctttgctgctacgaagttttttgggggcagcttaagccggagactcacctcttttgttaaaagctactttgcaaaattttgacaaaaaaaaaagggttcattgttttgttgtgcattgaggacagtttcatttactctttataaaaactctgcttcaaaaatgtgattttttgccctctctacaattggttgttgctttgacagttgcaattacttcaatggtatacagtagccttaaatcgccatattacgaatcttaaggtaaattcgttgcttctttttgtcaccaaacataagagacattggcaaatgttggtaaaaagaaataacgttgtgaatgtaatacactcaaaccaaatgattctgtcaatacaaaagcaactctgtaaacgtaacatgagaaactcaacaattcacatatgttttacaaaatctactttctgtggtattcctgaccaaagcatcaaacttgggctcgtattcaggagttattttgtccacgtacttggggatctaaatgcctgcagtaataagagattccaactttggtacttcaacacgtttcttctctcaatcctcctcacaacttcagtagtaaaaaagacaatcactttgaagggaaacacaaatgaaatgactgtcgaattcagtcaccggtaaacacccttatatgttctgttattttctttttagtcccatactttttttaaattcacaacaaaacccattattggagttttctgattatttttaaaaacagtttcgagtgaataaaaaagctcagatgcaatcatcactttcattttcttgtggtgtcaagtcaacg

SEQ ID NO: 13649 - DNA, 3000 bp, Unknown
  misc_feature (1)..( 3000): cDNA_ID_2703702_gDNA_ID_2214642_Annot_ID_136266 3000 nt of promoter + ATG
ggtcccaacgacgctcaattggatctctctaaaggaatcccacggtactctttcccgattctctaaaactcagattctttgttaatctgcgtttaaattccacatctttgacgctaatttatcattctatgtgatatgtgttggtgttggttccaaaaatagttgtattgattagttccaagttgtgagatttataacaaagtcctagcttttaggttaataggtttcagattggtttgttctcaatgtgtgatataatttcgtggcaggctctatatacttaggctgaaagaaacacccttagggtttttcaagatcacgcatcacgcaaaggtgacacagtgtctaggatcaataggaggtgatatttggtatatgggagtggctaagccatctcttattgaagatgatgatgatggaaggagagtagatacagtaaaagcaaagtctggtcacttgtacattccacctgaggtggaagagattcgcgtcttcaggttctcgggaccaaagtttgtgaaactgcaccgtggtacatggcatgctggacccttgtttagtggcagctccatcatggatttctacaacttagaactcagcaacacaaatgtgagtcagtgagtgatggttttaaattgttaatacaatgtagtgtgatgaatgacttgacaacattgttgctgttgatgatgttgttcaggtggtggatcacacgtcacatgatttcacgaagaataatggagtcagcttccgctttgacacctaagaagaataatggagtcaatcctatcatgagtgtgcttctgtttttccttgtgtgtaatgtaattgactaattgccaataccaatactgtgtattgtgtactgtgcacacaaattggttatatgcaataaaataccggtttaagttaaccaaccctggttcataaaatcctaataattcttgaattggttttctaaaaaaagaaagcaaatcatgaatactaaagaaatttgattacatcatttggtgtttctagtaatctgctctgttgccagttataaagtagtatatttaattattaagcattattaaaacgaataatacgtataatataatcgtagccgttggatataattacacgtgcgactatctttcgatcgcactaaaagcaaaggaaaggctaaaaagaagctcgagggtcgagatcgatcaaaattgtaaatcaatcataacacattttaactagctctaacacaaactctaaaattttagattaattcagacttggtaacaattttgacttaactacgagcgtcattaccattctatgcatcgttttacacgaattacactcacatctcaaagatacatgtccacatgctacgtaccgagtatcgaccacacccgataaacaacgggacaagccctagaatcccgaaaaggcaaaaaggtcccttgttttctctcttttttcatgttaaacacatactttttaaattaacaagaaagcccagatatttttggtgttttcttactgaatctagacttgaagagaattttaggaaaactccaaaaagctcgtacgctaattcttatcttcacttccatttttcctgtggtgatggtgagagttcaagtgttccaacgatggcgaaatccccggtagaggtgaaactgatcccgatcgaagctactcctgagaatttcgcagactatggtcaagtcatcgaagcctctcgtgacggtgcaggtttcggtcccaacgacgctcaactggatctctccagaggaatcccacggtactctttatccagtttactaaaatttcgttaatacctaagattattgattaaaacacatgcttcttctaatcatattcgttgttgattaatgtctaaattcctcatctttgatgctaatttatcaatcaagctatgtgatttgtattggttcctagatagtcgtgttgatcagttcctaataacaaaagacttatagattttgtaggaacgtacttatttactacaaaattcaacaaaacgaaagaccaattcaaactagactcttcttactacttcaagtaattaactgacttcatttacaagtcctagcattaggtttcagatttgtttgttcttttttttttttacaattagctaatcatcatattctcattatgtttaatacttgggacaggttctatataatgcggatcagagatacaccctttgacttttccgtactcactcaccacgcgagcgtgacacagtgtctaggatcaataggaggtcatgtttggtaccttggagtggctaaaccgacacttattgaagatggtgatgatggaaagatggtagataaattgaaatcaaggtctggtcacttgtacgctcctcctgcggttgaagagattcgcgtcttcagggtctcgggaccaaagtttattaaactgaaccacggtacgtggcatgttggaccactcttcagtgacagctacatggacttctacaaccttgagctcagcaacacaaatgtgagtgagaatggttttattgttaataatgtatggaatggtgatgaatgacttgtttttattgacgacattgttgttgttgatgatgatgttcaggcggtggatcgcacgacatatgatttcatcaaaaataaaggagtcaccatccgagttgaccccaacgatgttgacacatcgtcctcctaactcaatcttatcatcagtgtgtgcttctgttttcatgaataaattgagcaatcgtgaataaaatttgtatgcaactgtgtacaaattgttttttttttttttttttttttttcaataaatatcgaaaatacttgttttctcatattttcatgttaatcccatacttttaaaattgacaagaaaacctaaatatactttggtgtcttctgattgattttaaaaacattttgagtggatacaaaaagagctcaagatacaatcctctttatttttattttcttgtggtgcgtttcaacg

SEQ ID NO: 13650 - DNA, 3000 bp, Unknown
  misc_feature (1)..( 3000): cDNA_ID_3031275_gDNA_ID_2214642_Annot_ID_188361 3000 nt of promoter + ATG
ttctgttattaaagacattgacagaatatttatatgaagactgcgtgagagtgtgagactaatttcggagaggtttgtaagaaaaaagtttacaaaaacatatgcgaatatttaatatatattttactcattttcggcccataactttttttgggcccaaatacctttctatagatattaataaataatgaaatttagtgaaacacatgaaatatgttgcgactatcggagccaaattcatgagtcaaaagttgaaaaacacaacaaatttgaattcattatttaaaactgaggcccagaatctaataaaatttccgattttgttacccaaattactcattttaagcttcccttcaacatcactttgtttaggcccaacgcaacaacccttttttaaattataaaaaataaaattctattgtccaaaaagaaaaacaataataagaaaaaagttctttacagagaggttttttcatgggtaaactattgattgaatgttaaggtcatgtaaaaacaaaaaggtttggtaggaatataatcaactattaagtcctcgaaatatatgttcagaagttgtccacttcaacaacttccacactgtatttaacgactaccttatttgaatgtgtaacgtttaagcccttcttcttacttacagcaacagtctgtacaagaacaaaccagctctaaccggactggtttgctttttcatacctgaaccagattagttatggtgcttatcagatagataaacggaatactagttagtatacatcatgttgcattctacaatcattttaattgactatattatcgatatgcagaaacggcatgaaatgctttaatttgtgacatttccttgaaatattgaaacacttatgtaatgaaaataaaaaggaagttcttaaactattttaaaattgctagaagagctttagatgcattgtacctagcaattacaattgttagtcgtaaagtaagatcacattgtttaatatatctaaaaagagtgtggtcaaatgaattagtgaattactttgtatgagtatagaataatatattagtttcatacacgcatgctccattcatgcatatatggtggtaatatcttttaaaccgtgttatattttgcgtcggtggcattagttgttgaagctccacactgctgatcacttgcagttttgcacccatgcatatccctgatgtgatacgttttgccattgatcgatctctactaaactaattcctttatcaaaatttcatcccaatgtatgtaacatcatcatacctcattaagtacctcctaaggaaatgactgctcctaagagaaatccgtttcttgtcgattttttcataagtttttttatatgttgatggtatacttctacaaattttctattgatagataattctgaagtagatgttattgacatgttacgttgagaattggaaatttttgagtgggagtcgagtaatatgtatgatttgattaattaatcatacaatttttactaaagcatgagtaaattcctgtcagaaactcaataatacgagacgcgatttaacaatgatcgatacacaaattatatttttacgtcaaatttatatatgaagaagatgtttctcataataatcaaatatattccagtttttaagactttgacttttagatagagagccattgacaattatatcatgcatgattcacgtcgtcaaagtaagtatgaaaaaccacgaaaaacgatttaacgaaatgtcaatattcaaacaattgtagaagagcctagaaaaaagttgaacataattatatagttcgtttgggtccaagaggaccgttaatggcatttaattaggttttgtcggtaacaaaagaagaaataatcaaaagagaacaacgttttttaatttaattagaagtaagaggctacccataacttataactgcgatcgtggaaaatgtaaacgaagtataggatgatgaaattgaaaatttgggtcacccacccatatcgcaggggcaaagaagaagaactttaaaaagatgcttcgtcatcaagtcaaactaataagtttaaccgagaaaaatgtgaagaatcaaatcctgatagccggttgttccgtcgtcggtcgaatgatctaaataatgtaattgtctaacagagattgattttatcgtgtcggcatgctcagttctgcctaaaacacaagagcattaatgcattttattatacgaaacaaaggcaagcaaaataatgtcaaaacaaatattaaagactgttgattataagaatatatccgaataacgacttattttgaagcgttggttccagataactcttactctactctttatatcaattgtcaatacaaagcaatgaaaaaactatttaggcaacgaagcagacgactaaaaacaaaagagttctaatcaaacaaaaaataaactccaaagccaaccagagagagcagtatagcaatgtaaaacataaataaaacaaatatgttactgaaaaatcatgttttctgatacttgaaaaaaagaaagatcaaatcatataaaaatcatttttaactttttattatttatatatagagctgtctccacataattactattattccaaaaataattgttcaaattttatgtaaacaaacgtcatcaaactattccatgaataaaattgttcaaattatgtctattcgcttacgttaaatatgtaacaatatgttacatgtatgatacatcagaaacgaaacgacgacaacaatctcgtggtaacaatgtaaatgatagtgaattagtgatgaggagccaactataaagatttatcatatcgtggaaaatactttaataagaaattgtatgctaatgtttatgtataatttctgaaaataattaacaaaaataaaaggagatatttttttaaataacaaagtgattttgaaaaataaagagaggataataccattttggcaaaattgtatattgtgatattcatg

SEQ ID NO: 13651 - DNA, 3000 bp, Unknown
  misc_feature (1)..( 3000): cDNA_ID_3031279_gDNA_ID_2214642_Annot_ID_188360 3000 nt of promoter + ATG
gagacaaaaacaatcgttttcaagtgttttttttcttcttgatttatatctcttaatcaacgttttatatcttttcttaaggtcctcataaaagtctttttctcatatcatcatatgtattggctaacggtttacccaataagacaaatacgctgttaaatatctggttttgtttaacaaaaaaaaaattgctaataaataaaccatatgattgagaaagattgtcagactgactatcaaaaacgcctaattgattcgatcccattatcttaagttccaacttgtcctcaaactcttttttttttctttgacgtctcaatatttaaaatgatctctcaaagttcaatacaagccaagaaacatatttgccaatattcaaaacgactttaattactctttcttggtacgtatgtatagataaactcgttcacattgcttaaagaaaaactaatccaacaaaattgtgaaaaattcatccttaacctcctttctcttacaaatcttcggcttcgaagagtgtatatacagtgatcagttagtgaccaaaaataacaaatttacaaggaattaaaagaagaattaataacgagtttaagccggagattagtcaagatttcgatttcttcggttataaaataaacaaatcactaggacattcttgtggcggccacggaggaggctaaagggacaacctcggcgaggggagtagacagaggagttggaagcggcgaagtccgacacacaggacacgtaggattgagtctaagccacgtgtcgatacatttaaggtggaagagatggttgcaatctggtagctgccgcagcagatgttttcccttgtagtctcctaaacaaatggcacaacacgacgccgttgttggtccctttgcttccgagtagagaatctttggatagctttgaatggtgtcctcgtcaagaccggggacaacgtcgatgatgacatggtggtgatggtgatggatacgtgttgaatcttggttggtttgtgaaggtgaagaagagagctggttacgtgtgcaatagtatgaggtgagggtgatggtggtgatgaggaggaggaccccgatggagacaccgattccgtatcgaaatcctcctatgtcgtccgtgccgaggaggccgttgtagtccggcatctcggacggtggcggtggttggaaattgttcatggcgggtttggtttgatggttttgtttaatgggtttgggaggaggaagaggagaaataatggagaggtttttggtcagcgatttgatataagacaatgtaaattgaagcatcttggggttatcaaaagtcaacgctaagagagagagagagacaaagggaggaaatgcatgtgaatgaggataagaaagcttgtcaaagcaaagcaagaattgtgtgacttgtggatggttaaaaaaatattcaatgtataaattttctaatattgtattggtaatactgtaatagtataacgcatatataaatatattgacccattaattcgttgtttatttcaaacataaaacacttagttgcacaattgaattggatacagggctaatgaatttaacgtgtgacatgtattaagatttgatttaggaatgtagggaggggccagtggctaagattagagaaggtttacgctgaattagtttgaagtcaacgttgtacttatatactaatcttgttgtttatgtacgtttagttatctcctttattcaggcttatttaagtccaatcatgtcacctaagcaacgtttagtttccttcacttgcttttaaagtcgcagtgttatcttattttagtattagaatatttaaaactttgaaatctctccatattagaagattaatataaagttttgtttttctcctaaaagtggcaagacaataaaataaaatataattgtaggtaaataatttgtatatactaggaaatccaaatttaaccaattgagtcgtgggcattaacatttgtattacataaaattatattttggcaaactaccataggataaaaatcattcacttaacggccaagttactaacacaaggcatctttgataatggaaaacaatctgttggacagttgttattaatgaagaaaatgcgtcattgcatgctcgcatgatgtatattttaatatacactagctatgatagtatataaacagatatacatgtaattaagaatggagataaatgaacgtatattatccaggggcggattcatttggtgaagaatgaatgtattcagtgaattttaattgatattcgaatacaccattgttattgaacacttaattattgccgccgctcttccaatttttcaattctttttttccccaatcagtagagtaactatgggcttttaaaacccatagctccggattcccaatcatatattctatagtctatgtcatctaaaacaatatgaatttagataaacaatttatgaccttcaagccatatatttgggccggatactcaaaacatatgaaattacactcaaacactaattgagctacttaggccaaatatataaaggaaacacttactactaggcataaaaagtttggaagaaataataagagagaaaaaaatgttataatcctgacattgtttttttattgttaactcactcttggaataagttgtccaagtctcatagttgactcagtttggtggtgtcacaaattagttccatcattactaatttgctatcagtttggtgatgtatcaaatactgttgatctagtaatttcacaaaaagcgcatatcttccggctaatgatattagatttactcatatgtgtaatgtgtatgtatggttgaaagttgaagctaaattaggtttaagtcactcatatcatatgtgtgtgttatcttgtatagtgtaatacaaaattcaatacaaaattttccaataagcaaaaatagtcgtcagtgcgagttcaactttaaactgtttcaaactttatattcattacga

SEQ ID NO: 13652 - DNA, 3000 bp, Unknown
  misc_feature (1)..( 3000): cDNA_ID_3031294_gDNA_ID_2214642_Annot_ID_188354 3000 nt of promoter + ATG
tcgaacctcctactaaggaaagaaagaaaaagaaaaagaaagtgagctttgcagaagatatggtggagccgtcagggaacaacgaagagtatcgccggagttttcgcaaatcatcaaagttggaggatgaaagatgaagtcaacattcaacacatgaatttttctgtgtatttgttttccttatttggtaaatattaagtgtacaccgctcttcacaaaattaggagctagaccggaccacataccccattccatgtctttttttttttattatgccaagttgtcaatggacgtagatgtagatgtgttgttgatgttctcattcgtatctcgagtagcgtataattagtaccagccaaaattggtacactagcgtattaattagaaccagccaaaagaaagattcaagatgacgtagtacttgggcttttggtataaagcccaggcagatttggagtttacatttttggggagaacatatatttagcttcttttttgtttttttctccaacaacatgcattggttaaaatatggattatgacttacaacgatagtaatacaaatcctggtcgattaacaatctaatagtcgatcaatcatcactgctagaaacagtgccgcctaacagtacccctgaaaccataaatgggtttctagttaggtaaacaatataaattagtaactacaacataccaatgtaaggacgtgaatttatatttgtcctatcaatctttaattttataagaatgaattagtatgaatcaatggtaaattaattgcagggatactttgattaataatgtcatattacaagatcttcataatatctcgaatggccatgcatctcgcatctaccctaaaagtttatatacaatgcatgctttttctcaattattgtcaaatttatattctttctctaatagaaaaaaaccttttaaatcaccaattgacttttcttttcgaaataatggaatcatatatattgacacctaataaattaaaatgattaagaaaaacttaatagtgaagaattccgtttctgttacgagtgaggaggagctctatggccaaatttaatatcaagaaattgaaaatattaaaatgaataccaataaatgtttttcttctctatataatgttggtgggactgactgggaacggagcttcgaatcaaagaagaaagccaactaccaaagacagtgtcggttcgacggcgatggcaaatctaacggcaggagaaacgtcgccgtttcagatcatttattaacgtcgaaaacgagttttattaaaaaaattattttatttgatccaaaacgagatttatttttatattatcaaatcatacgttacgactttttacgcgctttttcaccacacgtaccattagcaaatcatacgttatgacttttgcgtaaaaggtaaaaacttgttttacatctgtctcacaaaacttgtaacttgtatattcattttattgatcaagtagatgtagatccccatcacaagatgtgtgttttattcattatgacgacatatttatgtgtgatatataggataaaaagataaaattagatttatgttggatgtatttgtcttaagtcttttaaacaaagattcttgaaaaatgacacaatgttagatcaaaagttttaatcgatacatttagactaaagacatcttaccttccttcactggttttcttacaatgatttcaatatgtagtaaaataaaatgtgttgtttattgctatatgagactcatgggtctagaaagtataaactataagtcatttggataggggtttctctataatttcacccacgaaaatggattacaatgtaacttcatttcataaacacttttaacaatgctataacattcgactatgtttatcaccgaagattcacttattaggctttcttctagtacatccagagaaaacttcgcatgtgttcgactggagcaatttaaaaatgaatgattttaagctaagtaaatgatttttagtatcttgagaatatggacaaacaaacaaaaagtttgtaaagaatgacaaagaggaaacccatgaaaaaaagatacaatatatggaagctcacagacgatgacggcatgagagttattatgacatacaaaccaatcgataaatctttaacaatttactgaaatatttgactaataatcttttggttttggaataatgaaccgatcgaccgtcatataaaatataaatgattggatccacgtacgttggtggccgagcctctgaaaacgaatttgatttatctattttgctaactaatcacctaacgtagtttttgtgtctcaatggttgtacaaaagataaagtctcaagaatttattaacaaaagaagtggccacgaagaatggaattttgttgtatcaatgaagcataagtagtaccatagtattttaaaattcgaaatgcaaatcaaatttcaacgtgacaacatatgttgtataatagttaatcatagtaaatagcacacattgcagctaataattggatttacaattgtttgagtcgtacgttttgatctgttgtttacaagaaaaaatacaaagatggaaagttctaacttcaagtgaagttcagatatcgaccgagtcagaacacgacacgaggctcgaagacagaggcatagtgctgagttgttcaacagaagcaagtaaaaaccttttgtctgagagagaggctccgagttaggcataagccaaacaacttgacacgacacataacctttgcttctcgtgtagacccaactttttacccttaccaaaaatataaaataaaatatgcaaaaaacacacccactcaaaaattaaaattttaatgaaagaaagaagaaacttcacatcagcatcagaatctctctttctctctctctccttcttcacaagcaaaaaaacaccaaaccatttttctttcttcattgtgccgacacttctttcccctctctctctctctctccaccgcc

SEQ ID NO: 13653 - DNA, 3000 bp, Unknown; identical to SEQ ID NO: 13649
  misc_feature (1)..( 3000): cDNA_ID_3031298_gDNA_ID_2214642_Annot_ID_188352 3000 nt of promoter + ATG

SEQ ID NO: 13654 - DNA, 3000 bp, Unknown; identical to SEQ ID NO: 13648
  misc_feature (1)..( 3000): cDNA_ID_3031222_gDNA_ID_2214642_Annot_ID_188350 3000 nt of promoter + ATG

SEQ ID NO: 13655 - DNA, 3000 bp, Unknown; identical to SEQ ID NO: 13647
  misc_feature (1)..( 3000): cDNA_ID_3031302_gDNA_ID_2214642_Annot_ID_188349 3000 nt of promoter + ATG

SEQ ID NO: 13656 - DNA, 3000 bp, Unknown; identical to SEQ ID NO: 13646
  misc_feature (1)..( 3000): cDNA_ID_3031306_gDNA_ID_2214642_Annot_ID_188347 3000 nt of promoter + ATG

SEQ ID NO: 13657 - DNA, 3000 bp, Unknown; identical to SEQ ID NO: 13645
  misc_feature (1)..( 3000): cDNA_ID_1012699_gDNA_ID_2214642_Annot_ID_188346 3000 nt of promoter + ATG

SEQ ID NO: 13658 - DNA, 714 bp, Unknown
  misc_feature (1)..( 714): cDNA_ID_2713919_gDNA_ID_2214642_Annot_ID_188377 3000 nt of promoter + ATG
ttgaggaacaaacatctccttggtctagtagaatagtttgagaatccttttcctcgaccaccatgccttccattactatacactgatatgacgacccaccattgtaatcatatgaacatcaaagtgtctctctgtaacacagtgggttcacagacacactcatttggtctacactttttaacgttcaagtgcttggagttgagatacaatgtacattaatgaggacgatactttgtagtatgaaccaaatcatagccttcaccaagtccctctaagaggaagaaaaccttcatatatctccttaagctcacacaagtgttgtgatcaaacactctgccatgttttgccagaggacatggggttcttccataaaccagactcctcttggcccatcaacatatccatggcccatacagagccttatcatgtgaatgataaaataggtttggggttattcttgaaaatatcttaaattcatggaaatatatgagagaaaacaaaaatatgggtagcggaaaataaatagtagcccactccaattctcgtcgcaccaatagagtaattcaactgccccaaattgctctcgactttttattctcggattagcgtttgtgctttcgcatcagagaatctctcagttcttctcaatttaggtcatcagatctcacaatcaatcgactcgaactcaaatctcacttcatcaatcaaatcatg

SEQ ID NO: 13659 - DNA, 3000 bp, Unknown
  misc_feature (1)..( 3000): cDNA_ID_3031258_gDNA_ID_2214642_Annot_ID_188370 3000 nt of promoter + ATG
tctctttatttccacatttagtccttatttaaataactaactaattaaaattagtgcactattatgttagcagatttcggtttactagtatttagtattatatgctaagtcttttctatgttttttgcaatgcatttcaccattagctaaaaaagggctatacaaggtttttgtgtgatatgtatagaagtaggaactatatatacagctcatatatacataaaacgtatgtccatagtaataacgagcatatatgtataattaagtatcatatcatatcatatctattaaggttgaaatttagtaatttactttctcaatgtaacagaagcccaccatgcttaatgttgtgataaataatatgaataaatcaatgaactcctctaattaacaatttaacatgtatataataaaagtctatagaataaattgtacttgttatttagcagaaataaaaataaactgtacttgtttggtcactagtaacacacataaatgtgaaaggtggagagaaacatcgatttggtgtatggaggaggaagcgtggggctaatgggtctcatttctcaagctgttcatgatggtggtcgtcatgttcttgggtatctatctatctctatacattttttattattaaaaattattaaacaataaacaaactagaggtgttaatttatctatacattcaaagcgacaatgcatcattctttttttgttcttcccatgttcttgtcctgtctttcaaatgagtaacattatcataaatagcaattggactgcttcaaaatatatacttgtaaatgaataagataaaatacttttatcaaatatttcttggaaaatcaatatttgaaacaatgctctggactcgcttttcaatttgttagtttctttgccaaaatctaaggcctaaggggaacaaggcagctgtctttagttctacttaaacatagactttagtttcgaaagaaaggataagaatctttgaccattacaaattaagatgactcgaaattattgattccatatactatttataagtgataattatttacattagatgttgatattatgcgcaggatcattccgaagtctctagcaccaagagaggtatttacaaatctaccatacattctaactagcagtgtgaagagcttaacaaatgtatagtttattctgtatcgtccaaatatatattcagtaaaatatatgtgaattgaaacattttaattatgatgaatgtggggtttagataaccggtgaatcaataggagaagttataacagtatcgactatgcaccaaaggaaggctgaaatgggtcgccaagcggatgccttcatcgcacttcctggtttgtttgtttttattattctttttcaatctatgtattttgtaaagaataaaaaagatgtctatatatgatcatgaaggttaataaaattaatttgtttggtgttattggacaaacaaaataggtggatatgggacatttgaagagttgttggaagtcatcacctggtctcagcttgggattcacactaaaccggtaattaattaaattcgttggtgaaccccaaaaaaaaaaatatcgtttagatatgacttatgagtacacatacgttgagactcgagtcagtaaaaatacggttatctcggcaaaccattaaaaaaaataaaaaatagagatgttgtcatatactatgtattttatggagaaatagagattttcctgatgaacttacacaaataagaagaagcaaatttctttgttggctatatatgtgggcatgtggcatgggttgaagtctatattcacatggaataatgtcttaactcttacctcttgacaacaacaacaacaaaaaaatgtcttaactcttacctaagattttgtcccaaaaaaaaacactcctacctaagatcaaaaaaataaagagaatcatagttaaggttgtgaaaactactctaaaatcatatcgtacactaattaatgcatataaaaaagattagattaaaacatgtaatatacacacacgaagactttgtatacataatacatggtcaaaaaaatgcgaaacctgagaatatgaattaagtatataacataatgcgaagttaaaaaatgcaggtgggactattgaacgtggatggattctacgattcactattgacgtttatagataaggcagtggacgaaggcttcgtctcctccaccgctcgccgtatcattgtctcggctccaaacgctcctcaattacttcaacttcttgaggtttttttatttgcctttcattactttttgattattctatttaatactatagactaaatgaacgaatcccaaaataggataattaaattaatttgtaatcgcaggagtatgttccaaaacacgacgattttgtatccaaaatggtgtgggacaataccacggatgctttcactttggaaggcgactcgttttagatatagttcatttgtatcttagtctacttttattttattattaaaaatctcgttttttattggccatttcaaatttttgatttttgtataccatgtattgagcttatataacaatggaacttgccaaaatcaaattacttacaagccacatgattacataatggataaaaaaataacacaaaaccaagtccgtaaagtatcgacaactaattataagctaagaaaaaaccaatcattttccaagcattgagacttccattcttaaaataagaatatgaggcccaatgggcttggcaagaaagttaaacaaaaaaaagaagaagacaattttacaattttgtcaagttttcaattgaaataaaccggttaaatcccaatttaaaccggatcaatcaagatatggtaatccccttctccttctccaaaaatcacaactctgttccaagtcttatcctttcatcatcatcatcacttaccttcttcacagagagagagcttcatcatcatatgtaatgtgagatgtctcttgaaca

SEQ ID NO: 13660 - DNA, 3000 bp, Unknown
  misc_feature (1)..( 3000): cDNA_ID_2703718_gDNA_ID_2214642_Annot_ID_188362 3000 nt of promoter + ATG
aggaaattttccataaaaaatcaatactgataggaatttggtaatcaccacatgtatatttactcacgcaacaaataaaattataataaatactatttacatcttattagaatttaaaaaaacacgcatcaataaatgtattacaattttttctgagtgttgttgtttgaaatttagtgagactattaaacatgaggccaaccctacaattgttttgatcaacaataagatatgtataaatatgaacatactagtttcaaaaatgcttttgaaaaataacaagataccagtttttatgcgctatggatgatttattttacataactggtagtttgtttatgtggacggtaaacgattcaaaaagataagcaaatttgtccacatatgtttttgttgttctacatacaaattataattatctatatcgtataaataaaataaatacaagttactaaaaaagactttctcatgaacttaaacactctttgcaattaatcaactaaaattatctactatatttctaattatattttaaataaaatacttttagtcaaataccctttaaaaatagacatacgtggtaaactaaaagaatatatgaaataaagaaataaaagtaaatatacatttaacgggacccactctttccccatcatgcttcattatcattatcgttatcatcttctttcttcctctctcctctctttctcaataatttagatttttgtgtgattaaatattttaggtttctgcagaaggagacgtttcctcgtttttgtgctgtttggatcttctgacacaattcacttttccgtataagttttcaatttctctaatcccattatgtatatttaaaatattatactcttaacctatttgagtgtttggaagaaaaatataaactaacggtaggactttcaaaaatgaaatctattcattttctagaataaagtgttgatgcgttttaagtttttatgtgtatgtggtaatataaaactttgtaaataaagtatcttagttaatctgctgaggaaaataatgaaatgaaattaaagaaaaaaacagttgaaaaaagaaaaaatgaaaagaacttggtaacgtaaacattactaattttattacttataaatcataatcagttcaaagttcgttgccatcctcagtgtacactctgaacttgctagatgataaaagtctgcaagaatagtaatccgaagaatactttatgttcaggattgtagttatatcaataaagaaagatttggattgagatgcgtgtgggatttctttttattaaataaatacaaatataatgttttaaaagaaaatgatatgattctaaattggacacgacatacatatcactatgtcttgatgtgataacatttacttcatctatgaaattatatcgtctataaataactaaataaagggtgtttggttgttatgatatgtgggttcattacctggtcaatacatgaaaaggccaaagtcatatcatacaagttcctctgtttttcaagtataccaattctaaatttataataagatacgtatcacatatatattaccaaataatgtatacatatgtctatgaagttgaaatatttcgaatttaatattatctcttgtactggatgtcaaactagaatttcaacaacaaacaattatatgcacattttctcacttagttttatgaattttagctccctatgatatatatgtactttgtaacttatttatcaccatgctatatagtgataataacatgaagtaaaggttttttgaacatgcagtatgaaagaatgctatgtctttttcttaatttattcattaatctttttctatttaaaaaaactgttgaaccaattgctctagagtacactaatttaaatgattacataaagctatatctaagtgtagagtttaatatcaattttgaaaacaaattccaacatggttggaatgtctatttagcatattaaattaaaaagataagtaatattagctggtggtgaacgtaaacacacacacacacacaaattgttttgcggatacaagtatatatcaatatatgaatgtaaaattaagttacattagtgaatatttcatgtcctaaacattggttattgtcccatttaacaaaaaatccactttggttataagatataccgaccacaacactaaaataaaataaaatagaaagaaagtgatgaaaaatggtggcgtactaaggactgtgggaagattaatgagtgaaggaaaagatgggtatcttttatctctcctttctttatcctctctctctttcaatatatattagtcatttttattttgttatatattatttctcagctttttaaatgtattttatatttcccctttgagcaagaaaagagttgcagagatctttgagtctgacacagagaccaaactcacatagcaatcacacacatctccacaaacacaggtatgcatataaatatatatatataagtgtatattcgtgtgtatgtgtgtgtgtctgtctctctctctttctctttgatagaaattctctaatgtaactttccttttgcagcttgagatgatcatgaaacacgtgcatcctcagatctctatcaatccaggttcttcatcttttataatattcattttttctttcaatttctaactctattattttattattttattttcaatcatgattatgtcttaatttccatatccttcaatctctctttctcataatccataattcatcccttcttcttcgtcttcttgatgtgatcacgattctttttttcttcgcttcaactgtatatatatacagatctatattaaacttatagtggttttgtttttgctcctttttcatacttttgtttgtttttctatgatatcaatcagcttggtgaaagaaggtcaagaattgaaagagaatcaaagaaaacgacgtcgtttcattcgtgtgtaacaactactaattatacatagatg

SEQ ID NO: 13661 - DNA, 3000 bp, Unknown
  misc_feature (1)..( 3000): cDNA_ID_2713934_gDNA_ID_2214642_Annot_ID_136272 3000 nt of promoter + ATG
tcatattgggccctgagaaattgactaagacccaattgttcacagcaatgtcaaaaaatttacccaaaaaatctttctttcccatcttttaacttcaacttttattactttttatataatctattttccttaataagaaaattaaatactgaataaattctaaatatttgatacattctaaacatttttattatgtaatggtgaatgtctaagtatttctcaaaattttagttacaactctgatctactaagaaagtatctatgaaaaaaaagaataagatacaaggtaataaaatgagtggatcttaaacgcgaatacaataaatcaaacaatttgagacgcatcatacgttaaaaatctattaaccagcggtcttccggttcagattgagaaatttgactactttagtttggtttgatttggttcaaacttttttccgacccgtgaagaaaaagaaaatcctcacgcgccggtaagtcggtttcacgaacaaagaggcctgagtataaaaaaacaaatcggacgcttcgagtttttcttgaggaagaatccacacacacacagaagaagaatctcatcacgaattttagctatgggttggatctggattgacgattcatccgcctctaaagccggtgctgatctcaccgataaaccgctcggagattctgccgccgccgccgaaaattgctccacgaccacggtggtaagatctcagtgcaagacggaggaggtcgagcctggaaagttcgtcaggaaatgcgacaaaacagaagaaatcctccgccactgttttgggaagtgagtgtttcggatattttctcgcttttgatcataaccctaattaagcaaaagataagcttttagattttgaattacatgtggaaaacaaatctccagggtttatagatcaaatagatgaagtgtgtttgttttgagctctgagttaaaaaattttgacgtttttgtggttatgtaaaagctaaaagccaatagttaaagattgactctaaatttgtgtttctgatgctaagcttactaatatgaattgcagaaagatagttgtgtttatgcactggaatggttacattgcttacttcttgtggtttgatgttgttttcttcgaaaggactctctatcactgaaccattatggtaaaaatgtttcattataaaagttcttatgattttatcatctttgtagtgttataacttgcatgttttttttggttaagtaagtggagcaactgctggttagtcttttttgggttaagtaagtggagtattctcatataagaagaagatgcatagagtatcacatcacagtttctgtgtattcggcgagcttcatgtttgtttgtttgctacctgtgatatgagttattccatgttaaatgtaatgctttcctttggaagacaactcttgttttctttctcgccctttcatgtgtgattttgagattgagccattaaaatgttcaagcaccttgattgtttgttacctttcgcgcctctagacaatcactaaatcgatttacccttggttctgtatctgctttaggccctctgaagtcgttcaatccaacacagagcacacagaagaggatgtgacagaccagatggtgggaagatccgctcttccgaatcagtttgaggataaaaacccgctaaacttcccgggactccgcagagatgtagacgccatcgaacgccatttcttgagcggaatgaagagtttctttgatgcggctgaagagatgacaagcagcttatttgatatcatgggagaccatcacccaagcaccaggagaggagggatacccattgaaaaccatcccaaggtagaggagcaccgcaatgacgaaactgcccctacacgaccacactcctctggcgagattgatctctcgggcttggccaaggacgtttgagaaaggtcgtctgcttcttcttcttcttctttttttttttcacaaaggtcgtcttgttctagcttttggcatatataatcttaaaaatgtaatgtgactttctaagaagcgtggggattgtagtctaatgttagcggcttgcacgtttttccgagtgggtgctactactatctatcaatatcatcatactactatattactatgtgttatgcttgtgtcttttattatcactttgtcttaaaagttattttacatttttaaacatgttaccttatacaattcgtacctttcattaaatggtaataaaataataatggtcaaagtagagtgatatgcttgagtggaattaaagatttgaaatctaaccttacgttttttgaaagattggttaccattttgtggcatggagtaatttagaaaataacaagaaatatacttttttggtcttcaattgagtttgaagatttttcttaacaattaattaattacggagtttaaagggaccaaattgttaatcaatgtattcacacagacactaaataatctctaacacaacctcacagagtcatatgttagaggagagaatcaaacaagtttatttaattgagaaaggccaaaaaccctaataaatccccccaaaaaattcagtcacgacgtgagacccaattccttttcgtcaaatcatcttccttctcaattcccattttcttattcttcgtttttcattttgtgcattgtgtgtgtttcttaccaaaggagatgattcgtagcattttgtgagaattgattaaattattcagccgacctcgagatctttctcccttagatcagaattcatttgtgggagatttatctgtctttcttcatggaagtggttatgttgttagataggagagatctttgtctctatgagatcatgttaagggttttttctcttgcgtgaaaaggaaggaaaaaaaggaagaaaagggacttttcctctctatctttttacgattctctgtatacgtttctcgtgtagattattgtatagcatatagttgattgggagatttagattgtagaaatg

SEQ ID NO: 13662 - DNA, 3000 bp, Unknown
  misc_feature (1)..( 3000): cDNA_ID_2703714_gDNA_ID_2214642_Annot_ID_136275 3000 nt of promoter + ATG
tttttctcatatcatcatatgtattggctaacggtttacccaataagacaaatacgctgttaaatatctggttttgtttaacaaaaaaaaaattgctaataaataaaccatatgattgagaaagattgtcagactgactatcaaaaacgcctaattgattcgatcccattatcttaagttccaacttgtcctcaaactcttttttttttctttgacgtctcaatatttaaaatgatctctcaaagttcaatacaagccaagaaacatatttgccaatattcaaaacgactttaattactctttcttggtacgtatgtatagataaactcgttcacattgcttaaagaaaaactaatccaacaaaattgtgaaaaattcatccttaacctcctttctcttacaaatcttcggcttcgaagagtgtatatacagtgatcagttagtgaccaaaaataacaaatttacaaggaattaaaagaagaattaataacgagtttaagccggagattagtcaagatttcgatttcttcggttataaaataaacaaatcactaggacattcttgtggcggccacggaggaggctaaagggacaacctcggcgaggggagtagacagaggagttggaagcggcgaagtccgacacacaggacacgtaggattgagtctaagccacgtgtcgatacatttaaggtggaagagatggttgcaatctggtagctgccgcagcagatgttttcccttgtagtctcctaaacaaatggcacaacacgacgccgttgttggtccctttgcttccgagtagagaatctttggatagctttgaatggtgtcctcgtcaagaccggggacaacgtcgatgatgacatggtggtgatggtgatggatacgtgttgaatcttggttggtttgtgaaggtgaagaagagagctggttacgtgtgcaatagtatgaggtgagggtgatggtggtgatgaggaggaggaccccgatggagacaccgattccgtatcgaaatcctcctatgtcgtccgtgccgaggaggccgttgtagtccggcatctcggacggtggcggtggttggaaattgttcatggcgggtttggtttgatggttttgtttaatgggtttgggaggaggaagaggagaaataatggagaggtttttggtcagcgatttgatataagacaatgtaaattgaagcatcttggggttatcaaaagtcaacgctaagagagagagagagacaaagggaggaaatgcatgtgaatgaggataagaaagcttgtcaaagcaaagcaagaattgtgtgacttgtggatggttaaaaaaatattcaatgtataaattttctaatattgtattggtaatactgtaatagtataacgcatatataaatatattgacccattaattcgttgtttatttcaaacataaaacacttagttgcacaattgaattggatacagggctaatgaatttaacgtgtgacatgtattaagatttgatttaggaatgtagggaggggccagtggctaagattagagaaggtttacgctgaattagtttgaagtcaacgttgtacttatatactaatcttgttgtttatgtacgtttagttatctcctttattcaggcttatttaagtccaatcatgtcacctaagcaacgtttagtttccttcacttgcttttaaagtcgcagtgttatcttattttagtattagaatatttaaaactttgaaatctctccatattagaagattaatataaagttttgtttttctcctaaaagtggcaagacaataaaataaaatataattgtaggtaaataatttgtatatactaggaaatccaaatttaaccaattgagtcgtgggcattaacatttgtattacataaaattatattttggcaaactaccataggataaaaatcattcacttaacggccaagttactaacacaaggcatctttgataatggaaaacaatctgttggacagttgttattaatgaagaaaatgcgtcattgcatgctcgcatgatgtatattttaatatacactagctatgatagtatataaacagatatacatgtaattaagaatggagataaatgaacgtatattatccaggggcggattcatttggtgaagaatgaatgtattcagtgaattttaattgatattcgaatacaccattgttattgaacacttaattattgccgccgctcttccaatttttcaattctttttttccccaatcagtagagtaactatgggcttttaaaacccatagctccggattcccaatcatatattctatagtctatgtcatctaaaacaatatgaatttagataaacaatttatgaccttcaagccatatatttgggccggatactcaaaacatatgaaattacactcaaacactaattgagctacttaggccaaatatataaaggaaacacttactactaggcataaaaagtttggaagaaataataagagagaaaaaaatgttataatcctgacattgtttttttattgttaactcactcttggaataagttgtccaagtctcatagttgactcagtttggtggtgtcacaaattagttccatcattactaatttgctatcagtttggtgatgtatcaaatactgttgatctagtaatttcacaaaaagcgcatatcttccggctaatgatattagatttactcatatgtgtaatgtgtatgtatggttgaaagttgaagctaaattaggtttaagtcactcatatcatatgtgtgtgttatcttgtatagtgtaatacaaaattcaatacaaaattttccaataagcaaaaatagtcgtcagtgcgagttcaactttaaactgtttcaaactttatattcattacgaatgcaacagtccctctcttgtttctccacgcttcgctttctccttccattttcttccaaactctctccgcttcgtcctctctttcacaccgccgct

SEQ ID NO: 13663 - DNA, 3000 bp, Unknown; identical to SEQ ID NO: 13660
  misc_feature (1)..( 3000): cDNA_ID_2703718_gDNA_ID_2214642_Annot_ID_136277 3000 nt of promoter + ATG

SEQ ID NO: 13664 - DNA, 3000 bp, Unknown
  misc_feature (1)..( 3000): cDNA_ID_2713923_gDNA_ID_2214642_Annot_ID_136285 3000 nt of promoter + ATG
ctcttagcaacaatatttaatttgatgttcaatgacagtttataatttcttttaaatttttgtgagcttttaaaaatatgttagtaaatgtctacattcatgagcattaatgtgacatatacttactccactgatctatgaaaattatgagatgtgaatataggattattatttaagttgactataatgaactataatggtatttcatatataattaagccttcccattacgatttaggttctagttggacgatctatatttttctttttgtcaaatctaaccttttttttcttcaaaaagtcagatgatctttagtatgtcatttgcattcaatagttatactatacggtcgttaattcatttcatacacaattattttaaactacgttttaaattttaattcgaatatattatttttttaggatttacacatggtgttaacaaatattacaagagaagttgtagaagtactcaataagagtttgttttacatggatttgtgttgggccttcatgagctttgtacagcgcctttacaacactcaaataaattgtcactcaagggatataaacccaaaggccgtagctcctccaacacaaatccagaccactctttgtttccagtattactattattcctctaagtacattagaaaggtgtataaactttgttttacaacatataatagaaaaataaacattactgttaaacaatacaaaactttacagaaaacgtacagtatgtttaattattgatagattaatatttagaggccgatgaaaggtggaagtttttttatgggaacctggtagacatagaatgttgtaataatattgtccatcaatctgattttcgatttgagattacctagtgtaaaatataagtaacataagtaacaactcacttatgatcactgcactattaagtacttcttcctcaattccttattactccaaattctacaaaaaaaagtttgttgcaaaaagatacaaattttaatttttctatacaaattttaagtgtggaaattgttaatcacaaaaaataatacatttaggatcaatttttttcatgtgtgaaaaacttagaatttggattaataaggaacggaattattttgagtttatgtttgtttggaaaaaaaaaagactaggtttgcttcaaattatccattgaataaaggatgtttagatgagattttaatggatttcaaaagatattctagtagtttatagaatttcgtatttagtattttttttgaaggacagcagaagaatatatatttattagtgtaaaatcagtcaaacttaattaatttgattcttcaaggactttttttgtaaattcatatgaagcgtcgaacaatgttaaataacgaggataatgagacaacggtcaaacggtcaaacggtaaacccgttcctcttacccccaaattcaagtagcttttgtggcaagaaaccgtttactttttgtaatttttttgtttgtttattgacgtttatatatttctaaaaaaactaaaccctgatgtattccaattttagaacttacgcgtcttcataatcttcctctttttttctttgtctttgatattcaaagtttttgtttattttttctttgcttaacccggagagacaccctctccataaatttaggtttgtttataacaacttatacatatttttttctcttctaataataaaactctgtaaccattaaacatggttttgatctcatttgcagttttgatccctctgggttccttgaagaaaaaaacaccaattccattcatattcttcttcatacgttcaataattcttacgaggacgagatcttcctaacgtctttgatcttcttcattaggttcatttgcatttgttaaacgcttaaaaatggatctattcgtctgatatatatatgattgttgaatcggttttgttatgattgtaacaggagataagtctaaactggtcgaagatgttgggagatttcatcatcagactccttgtgtatgtcctaaccatatctctttttttcttttgattaattaatcatgtatattgatgtatatatataattgaaatggtgagaatggcagattgatattagggtacacatacccagcattcgaatgctttaaaacggtggagaagaacaaagttgatatcgaggaactcagattttggtgccaatactggtattgaattatttatatatgatccccttttttctatcctcgatacttttaaacattcatatataatgtgtagtgtatgtagtagatttgtagtgataggcaaatcgattttagttcgatcatagtgatatacttttctctgttatgggtttttgtttgattttaaaagagaaaaaaaatcaaaattccgttaagttgatgtcttctgctagaaaaaccatttatgaatacacctcatcttttgtacaagtctttggtttcgaacgttgattatatacctagtctggggattactgggacaattgtattaggtttattttaaagatatctcaatatatgtgatgcacgtaattctaatatgatagtttattgtcaatatgtactcgaaaatattaatttgttaaacatttgtatttgaataattaggatacttttggcgctaatttcatcattcgagagggttggcgatttttttatctcatggtaagtaagttttattattagttaattcatgccttaatccatctctgtcttaaaaaatattaacaatcatcaaataattaattgatatatgcaattattatttgcaggttaccgttatacggagagatgaaagtagtcttcttcgtatatctctggtaccctaaaacaaaggtaatataatttttccttttaaaaagtgattagttggatcataattaattagtggtttatggtgatgtacaaataataataacgaaataaataatgaatgaagggaacgagacatgtgtatgaaacattgttgaagccatacatg

SEQ ID NO: 13665 - DNA, 714 bp, Unknown; identical to SEQ ID NO: 13658
  misc_feature (1)..( 714): cDNA_ID_2713919_gDNA_ID_2214642_Annot_ID_136289 3000 nt of promoter + ATG

SEQ ID NO: 13666 - DNA, 3000 bp, Unknown
  misc_feature (1)..( 3000): cDNA_ID_2703785_gDNA_ID_2214643_Annot_ID_136290 3000 nt of promoter + ATG
atccaggttcaacggttattttaggtacaaaagatagtttttttgagaaattctaacttgcttcgaagctcaaaaacaggctggaagacagcatgtcgacgtgtaattcatttggatggaacatttctaaagggacgcatgaaaggacaattgttgactgctgtgggaagggatcctaatgatgcaatgtttatcatcgcatgggctattgtaccagtggagaacaaggtctactggcagtggtttatggagttattaggagaagacttacgtttgaagcttggtaatggttttgcattatcttcagatcagcaaaagggactgctataataaacgtcctaccttacgcagagcatagaatgtgtgctagacacatttttgctaacttacagaaaagacacaagcagatgggacctttgcataaggttttttggaagtgtgcacgcgcatataatgaaacagtcttttggaaacagctcgagaagatgaagaccataacatttgaagcttatgatgaagtgaagcgaagtgtcggttctaactggtctaggtatgaaaaaaaattgtctcttatttatctctggttttgtcttagtatttgtctctagttttggttggtttgactcttgttttgttctttgcaattgtcactctagttttagttgatctaatcggtttattattttctccttttgtagagcattttttaatgatatcacaaagtcggctgcggtagaaaataatatcggtgaatcatacaatgctgttttgaaagatactctagaaaaactagtggttgcattgctagaggatataatatcggtgaatcatacaatgctgttttgaaagacggcatattatggctagtaacctagttaagatcaaagagatgcaaaatgttacaggccttatcatacccaaggacgaggcatttatgaagtggatcatggaaaaaataagtatgtggttcatgttcgtgatcatggaaaaaatcattgatttagtatacagtaaaccgattaaacctagtgctatggggttttaaatcttgaacttacgattcatggacatgctctcgaatttttaattggtggggaaataaacatataacttctgtttcatgggcatttgggcagaggtcaaagatcgggctctatctagcaagatacgatagttctttctcggggggggggggggaggggggaatagaccctttttccttaaaaaccatatgaacaaaaaaaatttaccgatggtgacgtgatttttttaaatacacacgtcttcttcattccttataaaacttgagtttcgtgttacttttttttactgttttctccaaaactaaacaacaacgcacaaagcagagcaagatgttggattaagcttaaaggaagcttgagaaagaagtaaaccgagaaatggttaaagctcaaaccgagttatggtttagagtttgagataggttctaaagatctagagaatatttaggagatatctaaatatatattcctaataggattaggactagatcatctcttatataaggagttatcgaggtgtgataacacttgtgagttttgtgagagagatttgagagaaccaaagagagctttagtttttgagttggttttctaaagctaataaagagagtagttctttaacttgtttgtgttcttaacaaatctagcaaaacaagacaagaaacagaggaaaagaaaagctccggtaagaagcaagaaaatggcaattcgcgttgtgggacacgacttggtttgcactttctattgctttattgattcactcactacaacggaagagtcgatccggcttggtattataaatttctcggaaccgggcattgcttgctcgaagagacgacatcactttgttcgcaagcgtctactgtgaattttcgaatacaatttctgtgttcacaagaaaccatggagatcaacgtgttctaacaatcaggtattctggctttaatcttcctgaagaaatgtgttcaagattttacccgacgagcagtcgccttctctgtcatctcgcgagctctgctgctgaggttgggtatttcaaacgcaaattaacgatttgtaagtttttaggattataatatttgagataaaatttgtaaagacttgtatgttgttagtaaatagtataaggattttttggccaaaagtgtaccaaaaatgtatatgtagagttttaagcaataaaagaccttgtacatttatttgttttcattgattgagtattatatgtctgtttttaaaagtttgaatcacattatatgcagaaaaatataatattttattaactatttttattttatatataaaatcaaaataaattagatataaaaacaaatataatgataaaaaattatatatttatatttaatgtcgatatagagattttagaaaattaacttttatcgaatatagttcaataaaaaaagatttaattaaagataaaaatttaaaaaatagttaattctagtatttaatgcaaattaaagatttataagtttataggaataaaacatttggttgaaataaaattaataaaaatttatatattattaataaataatataagaatttttggctaaaaaatctatcaaaaatatatatgtaaatatttaatttggaaatatttacaaattactacatcgcatgttaaacaatcaattcttcattaatatgatattcacattcctatcaaaaaaaaaaaacaatcaattcttctgactgcactatttacgtgggccgacgacaacagagcccaaatgaaaaaataaatctattacccaaaatcgtaaaccgaaccgatcgtcaaatctcgaaccggattttagataaaccaaattggacatcaacgccgaatcattcaccttctccgattcaaaatatttctcttacttacactttcttcatcttcttcacataaaccctaaacccctttttctcgctctcttcctggtttaaaatg

SEQ ID NO: 13667 - DNA, 3000 bp, Unknown
  misc_feature (1)..( 3000): cDNA_ID_2703753_gDNA_ID_2214643_Annot_ID_136291 3000 nt of promoter + ATG
gtaggagagaaggagagttgagtttctcggaggagaaactttgagaaactattctcatccaatttggacaggtgtcatcatactattagttcaactattaaataataattaatatatttgttttgattaaattattaatatatttttttttgagaaactttctttatttttactgatggagatggtctaaacatcttgtctcaccgccatggtatgaaccatctgctgcccaatctcctccgacatgcaatcgaaagaaaagcgtcctaacaaatacaattatcaaaaactctctaaaaatctgataaatttatgcgtctgaaaacaatttaaaaaattgagagaacaatcttataatagttaccttaaaaagctgagagaaattttcctttaataatcttttcctattcgtttaaattttattttttcagacttttggaaattttatgttctgttgtttaatataataataaaatttacatataaaatgctaataataaattttttgcctttttgttttttgaaattttattttattgaaaactattattttgtatattctaataattatattatacatttttactatttccatatcttgttgaattgaagagatcacttaagactttcatcaccttctaattattattataactatttgtataataataattactatattgagtttataataattgacacgtcataatgtactggatcacgtgcatcgcatgttttagacgagagtatcatatggcaactcgtaagaagaaaagctgaaaccagatcttccttcgttaactgttttcagctccagcttctgaaacaaaatatcatcagggttttatctcaaacaacaacagattatatagtttgtagatacgaggaagatcttggactaacctgctgtttggatcataatagaaaccgcgcgctgatggatccgtcgctgcaggagaagcatacgtagtaaaatctagctattgttagtccacaatctgtgccaacatttacaaagtattgctctttccatctcttgcaccaccacaaaaattatccggagtgaattatataggatatgtaagagtaaaggatcatcgatattgatacgaaagcgagagttataccataaatatataagggtaaatgttatgacctgacactcacagaatcaagaatcgtttcccgtattagaaattcaaagggaaacaacatgaagaaaaataagtaagagtttaaggtcttacaggagtgtctgccatgggaacgtttagagcttccatggtgccacaaagacagccatgttcaaggtcaattccctgtatctggacattaactctccaagcttcctccttgtgttaattagagacattttgcgtaccagaaaatgcatgcagcataaaaacatgtgtgttcctcatctttaggttcaatatgaacaaacaatctcttggagccaatgaatgttatacaatcccaactagatataaatgcacttgaattaagcatagatgtcaacatgaaaaagatatcaagccaatcaaagcagacaaggccaacttctactattagctattcttgtgatttcaagtattcataagtcagaacttgtcaagtctgagagaaatttcaccttttacatataaaaatccctaagacaatgtctttatagatatactcagattctgcttacacataaggttatgttcataaaaagagtgtgcatacataaccacagatgcacaagcataactaataaagttctctctagtcctaaccaatattcccaagacctctatggtcagacacttataaaattcaatttgttaaaccaaataaacagaatcgaaaaccacatctcatcatacccggttcggttttcttaaccgaatcaaattatatataaaacggattaggcttctccggttttctactgcgttttgtataaaaccctcacaaaaaccctttctccaaatccttcaacctctattatcgaacttgctatataacctttggacctgactttcctacttctctctaactccaggtttgtcttcctctcaagttgaagctgcggctttattagtttcctgttgacttatgttccttgaatccattcacatgagcttcttacgccgttttcattggtttacctattgacgttgacttgggtctaccatactttttcatgttacttgattgcatatttataaaacggtgctcctttttgtatagcattctagatgttgcttctgaaacaaagctcatctgctgttcttgtcgttgggaatacaaaaactccagtccttcacacttgtcgctccacctacagagttggaaccagaacgcactcgttcaagagtttgactatggcaaatttgcacaagcacttcttcgtctgggaaactgaatacggcttcatctgtgccttgtagctctcacgaggcttctcctatcaggtacctatgccccctgtattgagtataatggtgtcaaccattcttcttaagtattttctcgattcttgttattttcttggctattgtcagtttcatggacatgagaagttgcatagctgttgtagttaagattgcatcacaccaatataataaagaaactagctgtgtgcttccctgctcgtttctctgttactagacacgaagatttgaaaatagtaagactggttaaggtatttctaatgttcattttctttcctctttgcaagtgagaataacgagaataaacatgtccatggagtttctgagacaattgtgggagttcttggggtggacaattgggtcagtttccatagcatcatttggtatctatattccattggcttttaatttctgaatgctttgaaacttatatcaccaaaatctgttgtatataacctttttatgaaacacttgaacccttcatgaatcttcaaagtatctgactgaatttgtggtgcttgttgtttaccacattgcagagacacctcgtgttggtatcatc

SEQ ID NO: 13668 - DNA, 3000 bp, Unknown
  misc_feature (1)..( 3000): cDNA_ID_2713947_gDNA_ID_2214643_Annot_ID_136293 3000 nt of promoter + ATG
tgtggaattgtcagttaatgttttcatatacataatcaatagcctagttaaaatattatcaaacaataagagaagttaatggatggctactcactaatttaggtaactcaattaaaatgactgccaaaaaaataattctacaacagttttacaaaatctaaatttataacaacagatatctaaactaacattaatcaacgtctcagagtagttttcatttcactaacctttaacattatataaggatgtgttaagttctcctaagacgaaatcaatagaagcctcctccatgggaatgttacgctgagattatgcttggcttgtatacattttacatttccaaactcaaattttgtaaaatcagttaatatacaataaaagacgtcaagcctatacctttctctcaaaataaaatgggtaaacagtagctaacatgttcttatcaaataaacaaagtgttattattaacatatcaataactattagaattgccctaggattctaaatagcttagaagatgacactgaaatcccattctttaaaagaatttaactcttaaatgaagcactactgtaaagataatctgctcattaacctgtgacatttatatttctggatagctctattgataagatttctcttccctcttcatagtatagatgttatttgcaaaggttcatcaccttaaacagagacttactactttgcttttaacatactagggcacaactatatggtacattacatatgatatgccttaacttaaacttcctaccagtaagtaaatctgatacacaatagtgttgttttctataaattgatgtctcactaatctgttaaatcgagatttcagaatagctatgatgacgaaatctcagcagctcttccaaagtctcatgttacttccaaacctcattcatctgaataaatatacattgattttcactataacataaaaggacaaatcaatgtgccatatatatgaaacaacttttttgttatatatatatatataaatatgtatatatgaagtatcttaactttaactcaataacaatatcaaaatctacaaatctataaaactaaaattcaaaaatagagataaaaaaaactaaccttaacatatatatttcggaatacctacaatgacaaaaactataaaagaataaatatgattcagtatgaagcttacctcttcatacggttcacgaattataaaaatagaagtataaagcgagttgcagtaacaatttttctatgataatcgcgcaagtgattttttcttcttctagagatattcttcattttgttcggtgaattttttctcttttttgctaataagacaacaaatttctacagatggattatggattgattctaatagcaaggcgggaatcagatggggactttttaacgctcaaggtcgttgccttctcaaaggctccacgtcaatagagccaacaaactcagctttggatatggaggccattgcactacgggaagctctactgcagatgagacgggtcagctatcagaaagtcatattttgagggaactcgcgcatgctatatggtcatttagagtaggtaattcaataacgtcaacctattggggacccttagaaaatccaagaatacattaaggatatagtcgttatgtccaaaaactcttatgcctttctacatgtaaatcgacaagagaaaacagtaacggacacactagctaaaacagttagacatcagaacttggtttgtgttgtctcttggattttttaaatgtatgtcaatgttatatctagtgaacacttcttatactgtgtttccttgattaatggaatatttggccgacaaaaaaacgaaaaacacaaacgaatttcaagacaacatatatttgtccacaaataaacactaacatcaaatggcatatgactaaatggcttcaaaatctgttactattggatctattaaaatatggaacaattcttgggttcaccctttagggggtgaatccattcattcaccgccttttagttgactaatgagaatttgacatgtcatctatttaaaaaataaataatttaatcacaaaatttaaatcttaatcactattttatcaacccaaaccaaaatataatttcgtttaatcacaaaatctaaaccctaacagctattttatcaacccaaaccgaaatataattttgttttaatcacaaaatctaaaccctaaccactattttaacaacccaaaccaaaatataatttcgttttaatcacaaaatataaactgctggaatctgtaagtttaatcacaaatataatgtgaatttaacaagatgttagtttacaattattaaattgtttagttccgtaaaaaattgaacttttaaattttcacatctacacatttaatttctgaaaattttaaaattctcttttgttaactaaataattttttatttggtatataaaaaattataacgttttaaataaaactataaatatttgtattatattacattctattctaaatactattctaaatacatgtctatattgctactataatataaatatactattataatttcataaaacagaaataaatacataatatttttcataaaacaatatataaaaatactattgtattttcactaaataagtgcggattaggatctaatatgcaataaaacctaatttttcctttatacgattaactttataaaatctcagtttataagttaaattaaattttgtaaatttaaaaattgtttataaattcctatgaattgccaaattttattttaaactaaaatttcacatgttaatatagaaaaaaacattaatttttgtatttgttttcatcaaatgcaaatacaagatttctccattgagaccttttcgaccgtaaaccgattgcgatcaaattagctgatctgatcggaaaatcacaagaaaaccctagaaaactcctccggattcgaattctcgactcgattca

SEQ ID NO: 13669 - DNA, 3000 bp, Unknown
  misc_feature (1)..( 3000): cDNA_ID_1812229_gDNA_ID_2214643_Annot_ID_188421 3000 nt of promoter + ATG
aatttatattaattcagaccaaaaacgaaaaacaggagatgtgtgggggcaaatggaaaacaatgagataacaaagcttaatggctatctctatatatgaattagattatttactatttaaattgctttttatttatttcctttgaactaattagggacatcttaaaatcttagggaaataaatctatctatatatactaatatatctctctaattagagaaaaaaaaatgacaatcaattgaagatcttcaaccaaaactacaagaattacaacaacctttcttatataaatattaataaggagaacttgcaagatcaagtctagtctcgctttcaaaagcccatgaaaacaatttcaacatagcccattttcgtaattcatttggccaactgtactaacatgttctcatcaggccgtgcaagacggcttggcgagtgcaggtgaaaaatacatcattcgtggcgccacaataccaacacaactggtgaaacactatagttagtattgggaagttgttgcacatgtaattatctgacactctgttttagtataaatcgttttcctttttgatttatcttattgtgtttaacttattgtaatcatgatgttaatatagatttctctgatttattttattcatacggtggcatgattcatcatcagactcataagtatttgaaccatctgcctaaaaagatttacattataactaacctttgattggtgtaaggagatgatacagaagtgactttaagatggagacgatacataagtgactttgagatatgttctttagcattaaacctgttattcagctatgaaataaaacaattgttagttataatatctatattaaggtgaatatatatttttgtattaaattagataatgaactcttatcttcttcttttttaaaaaaaataataatattaaattagattaaaaaaaaatagcgtttttacaacgagtgcaacgtataacagtagattgaaatcagaatgtagaatgaataagctttgtgattactttgaagccagcattggaagcaggcctcatatcaactgtccttctgtcgttgaacggtccttcttatcttctttttgttgataacagtacttcagggaatgaattcccaaagcttgaatatattcatctatgtacaatcatctaaagattagacaaattgttttgcaaaacaatcatctttgttctataaagaacaacctactacaattaaaattataagtttcttttctgtattaaaaatactggaaataaattagttttagaatcggaatggtcaatcggtttaaatatatccatggggttacgattcatatttaaaatgaaactatatttacaaacatcaacaaagaatcaaaatcacttacacatcgattgacccaaaagtatattcaacttggaccattagcggaagctattgacatgtagaaccgattataatcagatcatgttcttcaaactgaaggagaattttggtttccaatttggataggagagaattagtttccaattcatcagttagataactttttcgagtatttgttattaattaataaataaaatgatgcaaagaaatttaagaaataataatgttaatataaaacaaatctaattcaagaaaaccatataaaatacaaaataacattagaatacataatcacggaaactttacgactaattaacattagattgaaaattttaaactaactcagaatattttaaataaaaatattattaaaaataaaagaaaaaaagaaataagttttagttaccatgggacgagtttatatgtgagacagatttatatggtgagatgagtttggatgagagagattttttgtttgtcttttaaaaaacaacactatagtatatcaaaataagagttaatcttctttcacacctctaaatgttaatcttctttcacacctctaaatgttaatcttctttaacacatctaaatatataattgtaataaaaaattattaaattacctatgttctaagggtaaaattaaaaaatatagaaattttaaattatataatttaaaatacaaaaatttgtgaataaaacatagggtatacgggacatatactagaagataaaataatattagacttactaatatcataaacttatgacttaataaaaaccgtacacaactttatcaaaaattattaatcaacacaaacaacaatagacattgtacacaacaaattcttcattttgtaaaaatttaaaataaacaaaaaacttaacccttggtgtaccacgggtcacattctagatacgtataaaattaggagatacacactttgtatatagatgcgtataatatatatgcttccggaactatacaaaaccatatagaaacatactaatataatcactaagtgtaaatagatataaacaatgagttttgataaattgaatatctaagatcattatttaaatatagatgatattgaattgaaacattaaattaattcaaaacgaaaataatcaagcagcagtgtaccgcaggtcaatatctagtttgttacattagcagtaaatagtcatactttatttcattatctataaaaattgtacccaaaaacaaatttagttagagaaagcgagataaatggtaattgttggtgtgcatatcaattgaagatttcagaaattttgtgacccaatttcaattttaatccgattcgccaatggtattttggataaatactttgaaagaccaaggttttttgccaaatattccagaaaaaaaaactaatatatatttgataggtcttatccatttccaaatcttgaaaattggacgcagatgggaaatataaaaagtcatttccaaagtcttgaaaattggaagcagataggaaaagtaaaaagttattttgaccgttttcaattgtcattatcttctctatataatccaccatcctttacaacctcaaatatacgttacattattgatatg

SEQ ID NO: 13670 - DNA, 3000 bp, Unknown
  misc_feature (1)..( 3000): cDNA_ID_2703746_gDNA_ID_2214643_Annot_ID_188418 3000 nt of promoter + ATG
tcatttcctctttcttggaggttgttagtgcttcagaagatgatgatggagctgcaacgcttgtagtcttactttgcatattgcaaatgaaaaggtgagtacaattgcattaaccaccagatatatctattaacctttgtagtttatccctaggtggcgtgatttcaccggcgatcagttctctccctgaactagttgagattaacctccaaaacaactttctcacaggcgaaataccgaggcttccaaaacacgtaaaggtcatttacaaacccggaaaaaggttcctcatacacaagtcaagagataacaagtgactataggcatactcattgcaatcacaattggaggagcacttgtcttgatcaacatgggaatcatggtttacgtttatcagctcaagaaatctacaatggttgcaataaaatatataaaaaaataaacagttttcttctaataaaaatatctaaatgtcaaatatgggtttacaagttacaatcatgaaactctttggtaaggaagataatcaaaatatggatttgtacaattcaaacatgggcttctaatatgatataatctatataataataacaattttaattaatgtctttaacaattgtgttttcttttaatcgcattttttttgataaactagaaatatattttgcagttatttttttttagaaagttgcaatctggataaatgtcttctactgttacatctttttttaatcgtaaatcttcataaacggttgcaactatttagttaaagcattacaatatttaatttatttgaaaaatcattgcaatttttggtttatttatgaatcgttataatatttaataaattggattctaatgtaatgccaagttagattatcaaaagctagggtaatgatcatacatctcaagatgtcgcgaaaatgaagctagtaaggtaaaattcggcaatcgccaaaaaatcagagtctagatttgtaattttaattgcatcttcttctttttggtcaatagtaacatctggtcatggaaagtgttctgcaaaagtatgtttatgcagctcctagtagaatgagtacaagaacggaagaaacactacatgcttagacttttgatgatgataataaaagtttaccaaaaaagtgaatccaaaactgaaaaagaaagaattataacacttaatctgagattaataacttgaaaattttaaagcttaactcatattacaacataacaaataacatgcagtattctcaaaatctacatatacatttttggtagactttttggccaaaaatctctcaactatttactaataacatttagatccttacaaaatatatctcaactagatattctaatactaaaaatttacaatttgttagtttgcattaaatacttaaattaactcttttctatattacatatttagtccctacaaaatctatctaaaaaaaatatgtgtctaattaaactacattcaattaattactaatttcttaaaatttctctatctacattaaatataaatatatgctttttctttcacttttagttgttctaatatctaatttatttgattttatataaaatatatatagttaataaaatattagattttttctatatatgatgtaattcaaatttttaaaaacagacatatattactcaatcgatgaagaaaaaaaagtaagtgtaaaaagtctcacattgcttaagaaattgggcaacggttcagagtcatattataaaaagaaccaaaatgattttgaataagaatgaactggaagttgatttatcaggcatcccaaaataaaaatgttattcggtttaaagaactgaatctttaaaaatttcaaaatattataaatatttaactttcttaaaagtgaaatatcaaaaaatttataacttttaaaaagttatactttattaaaaaattaaatgcattaatacgggacaatatactacgggtgaaatcctatatataacaatcaaaatagaattataaagtttggatcgatattattattattatttttaatttcaataccataaacatttaaactttagaaaaaatgacaaaatgatgtttaattccacgtgacggggttatatggtgggacgggtttaagttgatattaatacgggatggtatatagtatgggtaaaatcctataattaacaatcaaaatataattatataattttaaaaactaagccaatgtaacaatattaatatatatatatatatatatatatataaaacttaaaattttaatttttttagttctaaaattgtctcagagtattatacgttaaaataaaataacatatgtctatatatcatcttaaagacaaaattcatttttttgataaaaatatacccatgtgatatacctcttaatatgttatatatatatatatatacatatatgtaatataatattaattaaaataaatcgttaactttctgtgtaccgcggaccaatctctagttaaatacattttgggacagttcttattacaaaataaaaaatatataaaaatgttacaagtttacagaaaattacaaaaaaccatggttacgtataaaatgtcgacccatatttagtgggctttgttggcttattgggcttttgtgtataaaaaactcatttatatacactcgtgagaactggaaggttccgtcaagtgattcctcattcccagcaactgtttcaacttccgccggcgacatcacgatctacagttccggcaagttattccattccgttcgatcaaaacaatgtagttcttcttcgtcgtcttcgtcttcttcttctcattttacacagttttgttttaggaattttcttcataagatttttgacaaaccctagcctgatcacttagtctcaataaggttttagttttagtttctcttcctcactggcgatttatgtttgcatgcatgtaccttttcttacagatttttcgtggtgcagaacaagaacacat

SEQ ID NO: 13671 - DNA, 3000 bp, Unknown
  misc_feature (1)..( 3000): cDNA_ID_3031333_gDNA_ID_2214643_Annot_ID_188415 3000 nt of promoter + ATG
ttttggattcacttttttggtaaacttttattatcatcatcaaaagtctaagcatgtagtgtttcttccgttcttgtactcattctactaggagctgcataaacatacttttgcagaacactttccatgaccagatgttactattgaccaaaaagaagaagatgcaattaaaattacaaatctagactctgattttttggcgattgccgaattttaccttactagcttcattttcgcgacatcttgagatgtatgatcattaccctagcttttgataatctaacttggcattacattagaatccaatttattaaatattataacgattcataaataaaccaaaaattgcaatgatttttcaaataaattaaatattgtaatgctttaactaaatagttgcaaccgtttatgaagatttacgattaaaaaaagatgtaacagtagaagacatttatccagattgcaactttctaaaaaaaaataactgcaaaatatatttctagtttatcaaaaaaaatgcgattaaaagaaaacacaattgttaaagacattaattaaaattgttattattatatagattatatcatattagaagcccatgtttgaattgtacaaatccatattttgattatcttccttaccaaagagtttcatgattgtaacttgtaaacccatatttgacatttagatatttttattagaagaaaactgtttatttttttatatattttattgcaaccattgtagatttcttgagctgataaacgtaaaccatgattcccatgttgatcaagacaagtgctcctccaattgtgattgcaatgagtatgcctatagtcacttgttatctcttgacttgtgtatgaggaacctttttccgggtttgtaaatgacctttacgtgttttggaagcctcggtatttcgcctgtgagaaagttgttttggaggttaatctcaactagttcagggagagaactgatcgccggtgaaatcacgccacctagggataaactacaaaggttaatagatatatctggtggttaatgcaattgtactcaccttttcatttgcaatatgcaaagtaagactacaagcgttgcagctccatcatcatcttctgaagcactaacaacctccaagaaagaggaaatgatgaagagaataaacttcattgtacatgtccaaaacaaagttcaaccgtgtcaattatgatcattttgtactatataaaagagatggaaataataaatctcctaattttattatatcatttcgtttagttaaactcttatgtacttcgtattttcattatcatgttcgttgtacatcttatatgctttaacacaagagtaaaaagtttttaaaatgagtcgaaattatccaaacatgattatattttaggtgtgataaaataatgtaataactaatttcataagttgaataatattctccactgtaatattgggattaaagttagatattaaaaaaaaaattgctaacggatttaacatatttttttttcagtttgtgtttcacaaactttgaattcttaaattcaaatttgtggatattgacattacacatgtaaacattaacaaacacacctatattttttatattttatcatattatcttatgttttgctcatatttttcttaatttttgcttaataaaacaatgcattttcttttctctcatgtcactcagtgacggagctagagcattaggaggggggtcacttgaccccataatatttccaaattttttttataacaatattatgctaaaagttaaaatattagtagacactttttaaatatggttagtaataattaatcttaatttgtacattgtgagttgtgatttttttttttgtcggccaaattccattaatatggaagcccaatgggcagtagtacaaagcccaataactaatagtacaatgatgagaatacagaagcccaaccccaacatttacaaccttaattgaaataacaactctttagtcgatttcttttagaaaagactaaggaaagaaggtgccacgtgtaacatacgtgttagcacgcaagaaggagaagatgaaacggacggtgccgaccaaactgcacgagttgacacagctccgccgccggcttcgggaaaccaccaccactccctttctacagattacgtccatgcaaagcaaattgaaacccactggatccgtctgaaaaaggccacaagaagacatcatcaagtcttcaacttcttaacccaatctactcgttggaagctccgcctaagacctaaaaaggtcctcttcaagttaagcggcgaagatattactccgacaaaggagaagagtcaagttgacggggaaacatggagatcaatagatcgcaagaggagatcaatttgaatccctgtagaaagaggataaacaaaaaacagaatccaatcttagccgaagcaaagatggagattattatatccgattaaaccggagaaagatccggtaaaacagaaaaacaaaatccgacccgttgggaccggaatatattacaaaacaaaaagccggtattataccggaatggattccgggtaaccgaaattcgccctctctctctgaaaaataagagtgagttaagagaattgtgagttgcccaagtgttttttattttatctataattgtgaaattttctattccttaaacattgtccaaataagaaaaaaaactagagaaagtgatatcttctgttctctttcatagctgatgcatcacgtgttcttgctttgccgtcaatatcaccgctgtcccaattgctttaggttctctctcaggcagttccttctgagaagagctttcaccggagatatcaccgttttctgtccggaacagagtttcgtattttgttttttttctgtctggttttcatcaagactttcctcaggtttattaaatacttaaattgacatcttaatggagtttcaattggataagtgtctgcaaaagatg

SEQ ID NO: 13672 - DNA, 3000 bp, Unknown
  misc_feature (1)..( 3000): cDNA_ID_1018763_gDNA_ID_2214643_Annot_ID_188413 3000 nt of promoter + ATG
tttcactctgagagcttcctctctgtaagcttccatgtagaaagaaaccaacacaatatatgacagctctacaaaaggaaactaacaccgttcccgcaagcattccatattcaagcaccaaaagatcatcattatctgcaaacaaacattcacaagaacaacattaattctttttgagtcactacaaatgcaaaccaatacctaaccaaccacacatactcaaacaaacccatacttactaacttacaacaaccatcctaagattcgagatctagaatctccaagttcagatttttttttgacaaaatcgctaactttatatcacaaagacatagagaattatacaaaactagatttagatagtcaaaaagtagcttaattttatctccattttgaacaaatttcaccaaaaagtcagattcaagctatcaacttcataagacaaaacccaactcaaaaggattaaactttaaatcccaactcaaagtttactaatttcttcaataaacaacaatgacaaaaaccaaaaacctaaaatttcaataaatgaaataaactgagaatcgaagttagcgatcttactgataaattggggaaaattacaaacacagcttcaaaaatagatctctgaaacttcttcttcctccagagattgagtagatcaaatcggaagtaaacaaaaagcacgaatctttaggcaaagatttggaatcaagaacacagctttaataactacagtaactttagggttttagggtttcagtgaattcaggtaatcggcgattcaggcatcgaaaatgaatcgccggaaaacaccgtcgagaatttcggggaaaaaaaaaatggaagataaaataaaaatttgtttttttttttgttaagtaaaataattttggagtgaaagtaaacggtgctaatttgttaatagtggctatctcgactctgatctatgctatcgtgcaccgtaatgaggagtgcgcatattttttttttaataaaacttttaaaattgttttaatgtgataatttataatttttaatatatgatgcaagttgcatttatcttttttttgtcatcttttgaaaattaaacttttgaaacaacctcaaccagttatttattttgaatgtggaattatcttaaatttcagtttaaagatatgaataataagactatgggttaaaaattaaaataatagtttcataaaggtatagaaaaattcaactttaataattgttaacaatataataatatttataaacagcatctagctaacctatgaaggtatgactcatgaagattcatttaagaattttcacacctattaattttttttattaatacttgttttttctattttctaataattgtacatttctcattttattcacagttccaaatagtttaaactgataactttattatgtcactaattggatgttggaaagtatgtaacaattgcatagatcgtaacaagtaatagttgggaacagatcagaaaaagatggctcgagtaaaattgtatagtatcgtttggtttagccaaaagtgttttcgcttgtcttaactctttaacgatcttgagatgagctttgtacatatttcttggattaaaattttatataccgacactcttcaccatatccttcctaataatttcagtgctttagattttttgctactcaaagtagcatttcgaactataatctattacttatgacgtgaatgcaatggtcgagacactagaaagaccggatatcaacctaaaacatccataatgaaacacaataattttgaaaaacattagtcaatgaagtaaatcaaaggttgctagagtagttgttaaacttgcttctataacattttatttcattgctcagatcacggtctttcatatctggaaacagagaaacaatgtgttttacaattcgcacttgatttgaatgcaatggtcgagacaccataaacaccataaacacaatagtttcaaaattttgaaaaacataagtccatagagtaaatcaaaagttgctagagtagtcgctaaacttgcttctataacatttatttcattatgcaagtacatcaaccatttacatttaacatctctctcatataattttaataagaaaatgtcataaaaatatatgtaatttacctattttgactaaaataactttaaccattccattagataaataaatctccaatttttatgttgattaagttattttactttcgtttttaatcaataataacgagttaaaattattgactaacaacggagataaatagtaagttcaatgtaaaattgaaaactttattcatctgataaaatagtttgaaagctttttcgttaaaaaagtttgagattatttttagaattctttattacatttatcttttttgaacaaaatctttttatttttccaaacaacccaaacaccacataaaaatgttaagcgcttgccgacaaaaaaaaaacaaagaaacgcttttacgaaacgtgtcaaatttaattagtctaaaacgccgtcgtttctgtataaccatccaacagatccttgtgcttctttttcattacaaggaagactttttcattacaaggaagatcgatcacggacaaaatttgcagagacattgtagacaaagatcattcatgtttcttcaactccggtcttaggtattaattctcttacaatatttctaccttttttactcaattccttccttcattctctaatctcgaattttccaatgcatttttctctgaatttgttcttcaatcgagtttagttagctagggtttttgcagcaatgtcttcgtgatacttcgatttcataaacaaataagatctctctataagtttttatttagatgatccaatacgttgacttttcttaaaattatctgctagatttcattgtttcaattcagattcgaaaattgaaagtttctgtgacattacagttagagaaaggagcttattgaagaatca

SEQ ID NO: 13673 - DNA, 3000 bp, Unknown
  misc_feature (1)..( 3000): cDNA_ID_3031337_gDNA_ID_2214643_Annot_ID_188411 3000 nt of promoter + ATG
acttcatatccaaagttcaactagacgttggtctgctgcatcagtattggatacacggaagcccttaattcaaaaggccagaacagatatcaagcaaagattggagatgatgagattggctttagaggcagcagcggctgcagaggatgcaacaccccttgatgaaaaaactgttctctcctgtaagttgggagatgttacagggcgcaaaactaacgggccaataacagttccagactctgatttccatgactttgataaaaacagatcggaggaatcctttgagccaaggcaaatatgggcaatttatgatgaagatgatggtatgccacgcctatattgtgtggtgagggaagtactctcagttcaaccctttaagattgacattgcctacttaagctctaaaaccgacatcgagtttgggtcaatgaaatgggtacaatatgggtttacaaagtcgtgtggacatttcaggatacgaaactctgacatagtagaccatgttaacatcttttcgcatcttttaaaaggcaagaagacagggagaggtggttgtgttcgaatcttccccacagctggggagatttgggccgtctacaagaactggtcactgaactgggacggatcaacaccggacgaagtgaggcaccaatatgaaatggtcgagattcttgatgagtatactgaacagtatggtgtgtgcgttacccctcttgttaaattagagggctacaaaaccgtgtatcacaggagcacaagggaggacagtaagaagtggataccaaggtgtgaaatgttgcggttttcacatcaagtgccgtcttggtttcttaaagatgcaaccagcggctttcccgaaaactgttgggacttagatccagctgcaatccccgaggagctgcttcacatcggagcaggaaccaattgatttcagtgaccctgtaagagaaagatggtttcacttttcagattgagaccaagtgtaagagttgttgtatcagcgaagattgtggagttttatgaaggactattaacacgcaaaaaccatactgtttggttcagtgaagctgttgtattaggcaaatgttcaacgagtaagcaaagcatagtttgacttttgtttactctgtttcttcttttctttttctttttcgattatgtattcgtttctttgttgaccttagtgatgacagaatttttacaagtagagttataaatgtagcaattatctttccatttcttgctgccttttatttagtaattgaatttacaagttagtgaaaccattttaaaactttgaacaaggtatagttgttccacaatgaaaatgtgtatattgcctactgcttctattaactctttaggtctagaggaagatatttttgtgttcagtctttggatttggttaatatcatgaagatgttcttttggttacaaggtcttcatgaactaaaacaacacaactaccatacttaagtaagccacatccaacattcttaacatgagtttcttttggttaattgtttctctgagtttaatcaatttatactttcatggtcttggtttgcttgttgattcggttgttttttatcttctgcttgatggttagatctatttgtatcgtgattatgtgtttgtaaggaagagcactttggggaaactttcttaaatttttgactttgataatctctgagttttttttggtaaggctgataatctctgttatcctttatcttataaatcacaagtcacttggccaattaaaacctgccacatagattttgtttttatattttaatttaaaaaaaaaattaaaaatagttaataacaaaatagtggtacgtaaaagaaaagagaaaaaagctaaaaaaaaaagagaaaaaaaactgcatttctaaaactccaaaaatcttacatccctaaatttgctcaaactaccacaaaccacgttcaatataaaatatgtcacgatctgaaactgtttgatctcttatttaactcccaacaatcaactcctcttatctattttctcacttttaatttccatcgttttatcatattcatctcttttcctgtttctaatctctattgccagtttgtcttctcttagtcgtttcatttccgtgtttatcgtattcactgaatttagcaaagtcactgatctagatttatgactactctgtattcaatttcattttatattgatcacatattactttttctctgattttacatgattcaagttgaacataccaatgccctactggattatactcctacctccctacaaaactcttcaaaacaaaatggaataataagagctttagcccaaagataaaagtccttgcatgcaagttattctcgaggaggaaaaggtacacaaatataaacttaaaagttaatttagggtattaattaaatgccaattagtttctggtttttaatcaatgattttgtttgtgtaaaggtgtgattcaaacttctggtttagcctgatgtcgacttggtttaatcagttagttgttggatcacggttcaatgccggtttggtattggtttaaggagaaaggagaaatcggtttgagttcagcagaagattgaagagactctcttggtattagagggtttgacttggactctgttataaatagtcttcttcttcctttgttcgttgtaacagaaaattcttatctcaattcttctcctttgtaacacgatcttgagctctgggttttgagcttgagtaaatattgattcatagtggattgctggattgaatccagccccagacgtaggatcatcacaccggtgatctgaactaggtaaacaatcgtgtgttcgtttcgttctttatttgattatgttcttgatcgatctattaagtgttccgcgaattgaagcttgatcgagttgtgttgtgattgaatcgagttgtgttgaatcgatctttgagtcatcggattgtaacagattggtatcagagcctaaggttctttaatg

SEQ ID NO: 13674 - DNA, 3000 bp, Unknown
  misc_feature (1)..( 3000): cDNA_ID_3031349_gDNA_ID_2214643_Annot_ID_188407 3000 nt of promoter + ATG
tgttctttaagaatcagatggatgaaactttgtggacaacaatcgtaccaaaagcaccacatatagcttttccaattcttaacatgtaagaccaaaagattcacaactctcatcataacaatctgcacaatccacgatgcgtcatccataatgtgccatccatataaacattccattatcgtcatccacattgttagaactaagatacaaacattccataaacaagcaaaatctaaaatctaaaaagccaacaatcatatgatcagtttaacgtcatcaaattcaagagagtggccaagtgctatgcaatgataagagtatccatatacatgtgaacaaattgtcaaaacaaattggtgattgcagctaatgtaaaaagtcatatggatatagaggtgtggataggtgtgtgatctaaacacatcatttctagatccggaagatgtatctgttgggaaacgatagctccaataaaaccaaatatcacatcttccctagcatttttgagatagaaagagattaacacaaagttattgttagccaaagtttttgaagaccaactacgtatctataggctggaaatagagcaaaaattaaacaaggaattcaaggtgttcccagagaagggtattagaattttaactggaaaactagatgcattttaacaaatcaaatttcaatgtcaattcacaacattcatatcactggatcctaacttgggattgagtcaactacttaatttaaaattcttcaagtaatttgtcaaatcgatcctaacttgggattgaatcctatcttactatttatcaatttaacattcaatcttaagaaacagataaagccaagtaaaaatccaatacgagagaggataaaatttggttaaagatgctcttacctctcccaaacaatgattcagtttttcttcttccccaattcaaacatccttagtgatctgagttgagaccaatattttctgtcttaatcttcggcgaattggatttctaatgttaataatccttcgataagaaacgatggtggtggccataagttttccagcgaatggagaaaaatatacaaaagtaaaaaaaaaaaaaaaaaattagggtaaacatagattttgattgtgaatttaggataacctcataattttcatgattttgtaaaaattatagagaacgacaatgattttgaaagagagattgaaaatgatgaaaaacaaaagaatatggaagagagagatgataaaagggggatagtttcttacccacacgatctcatcaaaaataagtttaataattattgtgtcatcattacttcaggggtaaattagtccaatttctcctcaaaaagatggcaaagtgcctaatccctgaaaagtgcctcaaaaggaataaaattctttaaaagtgtctaaacgtgtcacattcccttatcattttagtcctttaatttttatatattcaaaatatttcaacactttgactcgtaatctacagattaaaaataaagagacttatctatctcttcgtaatgcattgattgatcacatatgagagcattacgaaaataattttattgagtaatttgtaatttataagttaatttatgtatttttaatttttatttatatgtattttatttataaatgtattgttttgttaattaagattatgtgtaatattttaatgtatgttttagtgttattattaaagttatatagttttaaaataattatgaacaatataaagactataatgcaaaacacatattttagaaacttcatatttaaagtatactcttggagaagaaactactcatactttatatttgaagtttacatactctatatataaaatatcttttggatatgctctaaattatattggattatcttttagagaacctaaaactttatatttgagggatagagtatctcttggagatgctcgtggtagttcaatattgtaccttaactgtaacgtaaatgttgttatctttacttagacgtctttgatatgtaaaaattctatctctgtatcctgtttgtactggcctctccaaggttcaccattattggatgatgcactgggttgatatatataacataactttttggcaaaaaaaagaaacaagaaaaaaaaaacagtctctttggcgatagcgatttggtcggagatttctccgattacattgattgggactttagtgaatcttcacagaagcaacttcacggagaacggcgagaagaatgtggaattgagagcgtcgttagaggatcgagaagcgtcggccgtttcactggagagatctagtgttgttcgttgatgaaggggttctaatttcgatacctaacggaattgatcattgataaggtctcattccggtggcaatcgtcgtcgccggaaacaatgtgcacagatacgaccttgaggttagtttattcctttaaaatctaatcacaacaaaatatatcatttgtattcatgggattatgttcattgtaatggatttgaggatttggtagataaaagtagtaaaaattgtggattgaagaattttcttgtgagagatggttgatgtaagggaaggatcatattctggaacatttgttagctttggttacttctcaccattgtgatgaaatttgctatatccaggggatgattcaagtgagagaaagataaagtttttttgccttcagtctgattctgcattgaatacttccagtgggctgcaggttagtgcttagtgttcttttgatatccttgcattgtcattccgttgatggctattctattgcctccaatgtatactcattccacttattggctccaatgtatactcattccacttattgcctccaatgtatactcactccacttattggctatgggctgcaggttggtgcttagtgttctgttgatactcattccacatattaccactctctaattttgtgacgtcaggataatacttaaaaacgttgtagcaaagcgggag

SEQ ID NO: 13675 - DNA, 3000 bp, Unknown; identical to SEQ ID NO: 13668
  misc_feature (1)..( 3000): cDNA_ID_3031367_gDNA_ID_2214643_Annot_ID_188402 3000 nt of promoter + ATG

SEQ ID NO: 13676 - DNA, 3000 bp, Unknown
  misc_feature (1)..( 3000): cDNA_ID_3031374_gDNA_ID_2214643_Annot_ID_188399 3000 nt of promoter + ATG
gtaataatttcggcaacatcactatcaccacacaaatccttacgattttgacctacttttctagatgggaagtaagaaaacttactcatattttctgtataaccaacactcaaaatcatacttgtcaacattgctaaactcggatcttcaaaatcaagctgtaagagcatcttcattagaagtatctcaatgagatacccaacaaaaaaaaaaaaattttaaaaaaaagtatgagagaagggagaaaaagtaggagagaaggagagttgagtttctcggaggagaaactttgagaaactattctcatccaatttggacaggtgtcatcatactattagttcaactattaaataataattaatatatttgttttgattaaattattaatatatttttttttgagaaactttctttatttttactgatggagatggtctaaacatcttgtctcaccgccatggtatgaaccatctgctgcccaatctcctccgacatgcaatcgaaagaaaagcgtcctaacaaatacaattatcaaaaactctctaaaaatctgataaatttatgcgtctgaaaacaatttaaaaaattgagagaacaatcttataatagttaccttaaaaagctgagagaaattttcctttaataatcttttcctattcgtttaaattttattttttcagacttttggaaattttatgttctgttgtttaatataataataaaatttacatataaaatgctaataataaattttttgcctttttgttttttgaaattttattttattgaaaactattattttgtatattctaataattatattatacatttttactatttccatatcttgttgaattgaagagatcacttaagactttcatcaccttctaattattattataactatttgtataataataattactatattgagtttataataattgacacgtcataatgtactggatcacgtgcatcgcatgttttagacgagagtatcatatggcaactcgtaagaagaaaagctgaaaccagatcttccttcgttaactgttttcagctccagcttctgaaacaaaatatcatcagggttttatctcaaacaacaacagattatatagtttgtagatacgaggaagatcttggactaacctgctgtttggatcataatagaaaccgcgcgctgatggatccgtcgctgcaggagaagcatacgtagtaaaatctagctattgttagtccacaatctgtgccaacatttacaaagtattgctctttccatctcttgcaccaccacaaaaattatccggagtgaattatataggatatgtaagagtaaaggatcatcgatattgatacgaaagcgagagttataccataaatatataagggtaaatgttatgacctgacactcacagaatcaagaatcgtttcccgtattagaaattcaaagggaaacaacatgaagaaaaataagtaagagtttaaggtcttacaggagtgtctgccatgggaacgtttagagcttccatggtgccacaaagacagccatgttcaaggtcaattccctgtatctggacattaactctccaagcttcctccttgtgttaattagagacattttgcgtaccagaaaatgcatgcagcataaaaacatgtgtgttcctcatctttaggttcaatatgaacaaacaatctcttggagccaatgaatgttatacaatcccaactagatataaatgcacttgaattaagcatagatgtcaacatgaaaaagatatcaagccaatcaaagcagacaaggccaacttctactattagctattcttgtgatttcaagtattcataagtcagaacttgtcaagtctgagagaaatttcaccttttacatataaaaatccctaagacaatgtctttatagatatactcagattctgcttacacataaggttatgttcataaaaagagtgtgcatacataaccacagatgcacaagcataactaataaagttctctctagtcctaaccaatattcccaagacctctatggtcagacacttataaaattcaatttgttaaaccaaataaacagaatcgaaaaccacatctcatcatacccggttcggttttcttaaccgaatcaaattatatataaaacggattaggcttctccggttttctactgcgttttgtataaaaccctcacaaaaaccctttctccaaatccttcaacctctattatcgaacttgctatataacctttggacctgactttcctacttctctctaactccaggtttgtcttcctctcaagttgaagctgcggctttattagtttcctgttgacttatgttccttgaatccattcacatgagcttcttacgccgttttcattggtttacctattgacgttgacttgggtctaccatactttttcatgttacttgattgcatatttataaaacggtgctcctttttgtatagcattctagatgttgcttctgaaacaaagctcatctgctgttcttgtcgttgggaatacaaaaactccagtccttcacacttgtcgctccacctacagagttggaaccagaacgcactcgttcaagagtttgactatggcaaatttgcacaagcacttcttcgtctgggaaactgaatacggcttcatctgtgccttgtagctctcacgaggcttctcctatcaggtacctatgccccctgtattgagtataatggtgtcaaccattcttcttaagtattttctcgattcttgttattttcttggctattgtcagtttcatggacatgagaagttgcatagctgttgtagttaagattgcatcacaccaatataataaagaaactagctgtgtgcttccctgctcgtttctctgttactagacacgaagatttgaaaatagtaagactggttaaggtatttctaatgttcattttctttcctctttgcaagtgagaataacgagaataaacatgtcc

SEQ ID NO: 13677 - DNA, 3000 bp, Unknown; identical to SEQ ID NO: 13666
  misc_feature (1)..( 3000): cDNA_ID_3031386_gDNA_ID_2214643_Annot_ID_188396 3000 nt of promoter + ATG

SEQ ID NO: 13678 - DNA, 3000 bp, Unknown; identical to SEQ ID NO: 13674
  misc_feature (1)..( 3000): cDNA_ID_2703769_gDNA_ID_2214643_Annot_ID_136296 3000 nt of promoter + ATG

SEQ ID NO: 13679 - DNA, 3000 bp, Unknown
  misc_feature (1)..( 3000): cDNA_ID_2703765_gDNA_ID_2214643_Annot_ID_136297 3000 nt of promoter + ATG
aggtctagaggaagatatttttgtgttcagtctttggatttggttaatatcatgaagttgttcttttggttacaaggtcttcatgaactaaacaacacaactaccatacttaagtaagccacatccaacattcttaacatgagtttcttttggttaattgtttctctgagtttaatcaatttatactttcatggtcttggtttgcttgttgattctgttgtttttggtcttctgcttgatggttagatctatttgtatcgtgattatgtgtttgtaaggaagatcactttggggaagttttcttaaactcttgagtgcgataatctttgagttactatccaaaatttggcaaaacaaatttgttgaggcaatgtgatgacaatggctatgatatctgctttagtttctaaaatatgtgaaagttgcaattaggtttgggcgttcagatattcgggtcgggtttttcggatttagaaatctaagacccgttcgggtattttaagacttcgggttcggatcgggttttttgggttcggattcgggtttatcaggagtatccaaaactcaaaacttttatatcaaaataggttaaaattacttgaaactattcaaaaatttataaaaacttgattattttctatccgaatttatctaaaagtaggtaaaatacctaaaaatatacaaaataacttaaaatccaaatattttaggcatttaagttgttgtagacttgtagatatgattattattgataaattatttgttatatatatattttggatatgttcgggtacttgatcgggttcaggttcggatctggtttttgggttttgaagtttaggatccattcgggtattttaaaattttgggttcggattcgaatcggattttttgggtcgggtttggtttgattcttcaggttcgggtattttgcccaggcctagttgcaattgagaattcaagttctagattagtttgaggttttgtgattgttaaatacaggacatgatgtggagtatagactattgtgggatcataactttttttgaggaatgtctcatgttgtgtgcttgtcatctctcttttattaggtggtttttttttttttttccccttctctttagctctgaatctcaggctttcctgtgataaatgacaatttgaaattgttttgtatgcccttatatgcccaggttatacgtttcgacctctggctttgcaaacaattgatgtctctattataccatcgactcattacgcttgtgtggatgtttcagattataaacttgttgggtttggtttccttgttttaacatatataactggatgttttgcctatactatttatactgttggaaatgtaagtgagttcctttagcaaagaacaagatacacttattaatgtactatacaagaagtaaattagatacttgattcagtgactactctcttcagaaattttgtttactctagaatgtttagttctagatacttgattcaatactacttccttcggatatgtctcgataatgtttttaatggctttaatttcataaaatattttctctctttatatgtcattgctaaataacagaattaaaacaataaatatatgatgttctaatctttcatcaatttatagcatcatctattgagaagtggacaaaaactgaatcaaaaccctgatcgcaaataattgtcaatcgatcagtgatatggtgttgtgaagaagctgggttcagattgaatcggaatgtgattgacaaaaaaaaaaaaactgaatccaaatttgttttttttctcaacgttggtaacagtaaaaactgttaatagtgtttgggctggaaaaaattaagtgggcttcggttttagatttgggcttcaataacagtatgctttaaacaaaagaggtaaatgtaatgggctttgttaattaccaagtttctaacaaaattattaatgttacaaacatatattgtttttagaaatttgtgacaaacacatttactaatttcaatttcaattttatgatacatcattagaatttcataattgttattttaattacctgctgtccaaattaatatacattcttgagatatccacattgcattgcataaataaaataaatacaagtactaaatctaaatatcattatgaaaataaagtgtcacatacttatacccaccacagaagatatagtttttatataagaaaaaaaaacatcaacaaccattcaaaatcatatgcttacagaaatatacatattatatcgcctaattccataaatccgtagaataaccaatgttatcgttaccttaaatacgtgttctttaattatacacacaaccgaatatataattgagcagtaggaaaaaaatacaataaccatactgaacataaactatattgtcaaaacacaaaacatcaacattaaaaaaaaaaattatccagcagtataccgtggatcatatcctagtattgaatacatgagtacaactacagaaaataacttttattttgttcctatatattaattaaattaagcaaacgttttgttaattatgctcaaacgttttgacattcatttattaattatatgtaatcagattaatcaaatatgattaagtttttaataactcttttgcattttattttgttcattgataaaatagtaaaacattaagtttcaaaattaaaccctataccttaaactttcttaaaacatatttatttatttatcatttaataaaataaatcgaaaacaaataatcaaaaattgaaccatataccctaaaaatcatataggcctggatttccggttaaacccgagtaaagcaaaccggaagaaccgaatcattgcgaattgaagtagcagagaagtaaaccgttcggaaaaattaatttgggctatcggtattcggttcgggtcagttcggttatcagagtccgatcgggttaacctaaaccgagtattagaagccctatataaggttaatg

SEQ ID NO: 13680 - DNA, 3000 bp, Unknown; identical to SEQ ID NO: 13672
  misc_feature (1)..( 3000): cDNA_ID_1018763_gDNA_ID_2214643_Annot_ID_136300 3000 nt of promoter + ATG

SEQ ID NO: 13681 - DNA, 3000 bp, Unknown; identical to SEQ ID NO: 13670
  misc_feature (1)..( 3000): cDNA_ID_2703746_gDNA_ID_2214643_Annot_ID_136303 3000 nt of promoter + ATG

SEQ ID NO: 13682 - DNA, 3000 bp, Unknown
  misc_feature (1)..( 3000): cDNA_ID_2703742_gDNA_ID_2214643_Annot_ID_136305 3000 nt of promoter + ATG
tcctcgaaatcccgagatgctctaccgaatgtgaaatcgtcatcctctgatttggtaaaagagcagagagaacattgtgaggtttcgtagttttatgtaaagacgatgtgaacatgcattgtagtttcatggttggtttggctttggatttcatttgcgtcttaggagtaaaatgaatgcaactatttaggtacttggctggagatatcagttgttcttagaagcaatttgtatcttttggtgattttgtgtaaagccaatgtggatcgtcgtagcagtttcattactacttggtctaatgatattatgatagcttaattattttgctcattcgatagtgaattttctatggcacttcatggatctatctatatctgttcaattgttataaaactctaagcaatgtcaagctcttcaagggaaaaccttctagatgattccaagtctctgcttaatgtgccaactagcctctacgtcactactttgtgtcgtctccaattctcatccttcttgacaagaccaaacgtatcactaatgttggagagatgaccaatgtttgttcatacatttgtttgtaatgaagacatatagcacaacaccatataacatatgatccattctattaattttgctatttttacagccgaagaagaagagtataagaaacatgtttaagattcagccttacacaagtgtagcagaagcaaaaaagaaaggctatcaacgaatgggaactttgatccaaccattggcaaaagcaatggctaagatgacgaatggcgttgacataccgaagatgataatgtaaggaagaggcgtcttcatcggattctctccttctctttctccaacgctttgccaatacctataaagttgtaatgcaaatctcatccataaccatttcgtcagtcacaatattgcatgtttatgaaaaatgtgcatgcaagagtttaagattcttttgactaacttacaaaaaccaaatattttcgatcaaatttatggttcgtgtattgatacaatactaacacaaaccactagtctacatgtcattgtcacataccaaacaaaatctaaattctgcaaaggagactaaaattacattaccatccaatgagtttctgtttattttctacaatctcatgatggaaaaaattgagaattaagatgaactaactgttctggttcttcatctttggtaatgaacttcttcttatctttaggcttcacttctccatctcctccaccttaagcaagaaccaaggattaacagattttcatctacaaataaataaaagatctaagagagtacctaacttggcgtgaagcttgaactgtgggaatcctaatggagatggtggacagaagaattgaggcaaagcaagcaatgatgaatatgaagaagatgatgaggttatggaatcattagttctgtggctaaacgaagaagagggaatgcagagttttgctgccatttccaacaactaaacgttttgtttttgtatatgattttttttgtatatattagttggagatatatgtggcatttgtagtgacatttggcaaacttgtagactaaaaccttatcctcttcttacctctctttgtgttctgattttttgtattagacactccatttgcagtggaacatttgaactaaaccgaatcaatttaataaaagagagaatgtgtaaaccaggcctttttaaaataatattgtaattgctgcaaaaacaaaaaaagtttaagaataataattttgcaattaatttaatggactagttatacaaaaattaatcagcttttatatattttgcaattatttgaatccattacattatgtatgtcaattgggctgcttggacccaatctgaattagaatttcaaaacccacaaatctttcagtcttgcccaactcattttactatcttacaaattcttgttggcaagaaattagttttggaatgaaaattatttgtttgagctttaaaagccggtccaaagactctaactcgcttgggttagacccaataaaccttttattctgaacgaggtttgatcctacttgactgtttctgaatcttattttgcgtatatgaagttctccttgatatgcctaaaatcccttcgaggttcatgtttaaaggtaaatatgtgagttataagactcgtacttttgaacttttgatctgatttttaaaccaatgattaaataacaatttattgtaaaatatttcaaattatatgaagtataatttaagtttaaaatctaatttgcaaaggcaattaaacactattagtacaacatgtaattatataataataataataataataaaaacataaattttgattgatttttgtttgagtgattattttggttatgattggtaaaataccctcaaaccacatttaaaaccatgagatgcaaatgttttgtattgttaactaaagaaatcctctaaactgtagatttggaagtctattttaaaatcactagttcataaaacactagatttcttaagatttttttagaattcatgatggtcatttcaacacaaatcattttaaatgtttgattgaatacacttccctcatttttggaagtaatggatatgattattgccaaatagaaactattaatgatccaaaacatgatttgtaagataaggtttttcacattaaatttctgatgatacactttatgctatattatatttgaagtttagactaaatacaaacacctaaagagattgtaagtatgtgtgtaaatgaagtaacgtatgaatgattaaacctttaaatagaagtatcctcttaatcaaataaacgtcatggaggatgatgcaacattctaacgaactattcgcataaagtttgattacaaaatttgtaattaaagcaaataatatcgttttaagaaaaagaaaaaacacagcagtcaacaattggatggcagaatcgtaaattaagtaacaattgatcggtgactaaaaaaaa

SEQ ID NO: 13683 - DNA, 3000 bp, Unknown; identical to SEQ ID NO: 13669
  misc_feature (1)..( 3000): cDNA_ID_1812229_gDNA_ID_2214643_Annot_ID_136306 3000 nt of promoter + ATG

SEQ ID NO: 13684 - DNA, 3000 bp, Unknown
  misc_feature (1)..( 3000): cDNA_ID_2703848_gDNA_ID_2214644_Annot_ID_136309 3000 nt of promoter + ATG
attcagagtccaatgtcctaaccgctagaccatagaaccaattgatacgtatctaacttattatttatttatacttgttttatttcatcttctccgagccgttgctttgctctatctcttttccattttactactttctccgttcactgtaaaaccatctctctcaattctctccgacaacgttgctctaatgcttctccactgcaacgttagctactacacctcaacgttttccttcatctcctcatctctccgccgtcaagacaacgccgacgattcacaagatacagtaatccgtcgccgccacaatgctagatccatttctctatacatccgccataatcgagacctaaagctcaacaaaaaccctaacgaatctcaagaaacctttgttcctcctcctcctcctccgcggcgagatttagacggtgaaaaccgatccaagctacttgagctctctcttgtaactagaagaactccacaatttcctggttcaatctacgctcaatctgcttctgatgctgatattgcttcttctcttccttcgcttcgtaattttctcggctctgatggtgatgatgatggagagagtgagagggagatgatagttaaagcgcttgagattagaaggaaagtgacgaaagagattatcaaagagtctttggttaggaaaggtagatttgggattacgtatgcgactaatgtcactgatcgtttgggtgatttcgttgatcatgttatgattcaagctgcggcgttgaaacggttgccggaattttcagagtctagattcaatcttcgcgctaggacggttattgaagactccaatttcgttcctcttgtaaggtcaagctccatttttttgtgcttctgggtttgtgtatattagtgcacataagttgttcgataatatgtctcttagaaacaagttcaaagaagtagtagaatatttttaactatgtttctgaattgtgcaggtggttgaagcaccatgagttgtcatataatagaatagcgaagatcatatgcatgtcaaaaggaaatctcgactccataaggatcatgatcgagtggctgaagagcattcatgtgaagggtgaattcattgcagttgcgttcttgagatctggggataatatattgcaacgtaaccgtgaggaactaaacgaaattgttgagtatctagagagcaatggtgtgaggagggattggatgggttatgtggttggaagatgtcctgagttgctgtctttcagcatggaagaagtgaaaagccgtgttgatttcttcttgaaaatgggtatgaatcagaatgactttggcactatggtctatgattatccaaagataattggcttcttctcattccaagtgatggagaaaaaggtactgaaagctctttttaatactccagcgttaagattgtcgtttaagttcataattgtgttgcttgtattaaaccagatcaattacctgaaagagtttggccttagcacagaagaagttgggagactattagcctacaagccacacctaatgggatgcagtattgaagaaagatggaagcctctagtcaaatatttctactaccttggaatccccaaagaaggaatgaaaagaatccttgtcgtgaaaccaattctttactgcattgatttggagaagacgatcgccccaaaggtagttgaacttcgttataacgtatgaactccctataccatacacacagcagattccattaactcagcttctctcttgtgtttttaaaggtaagatttttgcaggagatgggtatccctaatgaagccattggaaacatgttagtaaagtttccttctttacttacaaatagcctctacaagaaaatccgacctgtggttagtaattacttcctctatgaaacaaagatgttccatcgaatgttgttatgttagtgttgttactcataacatatgatgatttcagaagctgcatctgatattgtacaagttgtggttgtacaggtgatttttctcttaaccagagccggagtaacccaaaaggatatcggtaaagttatagcaatggatccagctctccttggatgcagcatagggacgaagctagaacccaacatgagatactatatatcattgggaattcgattttatcaactaggcgaaatgattgctgatttcccgatgctgcttcggtataacgttgataatctgcgcccaaaataccgttacttgcgaagaacaatgatccgtccgcttcaagatctcatagagtttcccaggtaccagaaaaagaattgataaaaataatcccttcaaagtgtagcttttgagaaccatggcacttgtaacagattttttagctactcactagagcgtcggataatcccaaggcacaccattatggttgagaacagagttaacttcaagctcagatacatgttggcttgtacggatgaagagtttgagaggagagtgagagataaagtggagagaagagagagattcgaagctggcctcgactctgaggattctcaaccgtcggatgagaacatctccgatcaggagattgctttctcagacgaagcggaagaagaagaggatttgacagaatgaagaggatttagcataatgaatagttctgtacagtttaacacaattataaacgaacgaatgtgtgaatgagtctatatttataaatactaaaatgagaatacttgttctttcatgtcctaagaattcgaaaaagcacttttacagtttgtgaaaccaaacgctcaatcgcctcctccgccatcttttctcttccggtgctcttgattctctcaactccgccgtatatatttcaaataaagagagagtcggtttagggttaaccagaagtgagtgtataattgatagattagagagtattgggacttttttaatctatagcgataacttcgggtccttaagttgaaaataatttttcttcagctattgactgaaatgacatcgttttagt

SEQ ID NO: 13685 - DNA, 3000 bp, Unknown
  misc_feature (1)..( 3000): cDNA_ID_2703844_gDNA_ID_2214644_Annot_ID_136310 3000 nt of promoter + ATG
tgatcgaattactcgtcaacagtttatattattttcgtctcctccgggagaccgggacaaataaaaagtagtacttcatctgtttcttattaatctattttctataagaaaaaaatatttcaaacaaattctttttatcatcaattgtaaagttaaaaacaaaataattgaataataatggtttagagttacagaaaattgtaagtcacaaattaatgtatttataattaagttttaatatgtttcatgcatgaaaattctactaaacataaacatatggaattaacctaaacatatactactagaacagtatctcaacctaaaattattttgataaaagcacatttatttattttgaagtcaacatttatttatccaaaatcaaattgtatggaaacaaatttgtgttttaacttttgttatattaattgttaaatttttgacccgtcatataagacttaatttaaggagcattggagcaagtaagaagtcaagaacatcaaaaaagatttacaaccaaactgggaaaaaatatgtatatatatatattataagagaagaagtttttttaatatataagagaaaaaattagatatctacggaaaatgaaaagcgagaaatctgcagatgcttatggaacatattttcttctaatatcaaccattttcttgcttttcattgcacgtaagtcattacttggttcataaaattcaaatacaaaaactgatctttttgtgatagtgggtgatctttgaatgtattggttatgtttttgttttatatatatatatatatatatatatatatatatatatatatatatatatatatcaattacaggacaagcaagttcgtaccaaatgctcatatgtttagatctaaatatatcatgtgccgactgccaaaaacagtgcgacgagacaagttatggaggaatgtgtttaaatggaggcagaacttgttgttgcaaaaaaagtcctccgccatcatattatgatcctaggcccccttcttcataatcatatggaatgtgttcctatttggtactatcattttggatttgctcaaacatatcaaatttatactttgaaaagaaaagaatcatcaaaataaagttattttattattttttctttgtttactaatctcacaatcataacgtcaattatatagaaattttcttaacatgagtcaaaataagactaacgctaaattttacattctaattctaattttaagtgatgtttctgaaccaaataatatgtattaagtttactaatagtttaacatattaacatttaaccagcatatatgaatagcttatcgattagaaagtgatttctaacaaagccacacaatagtccagatacactcaaacccgatagtgcataattaacagaactactataatcacaaacaaagtgtatgattgagccacatattaacctagatatagaaagataatataccatgggaagttatatattattgttcaaataataaaattcgttatattttttaaccagaaaatggtgaaacaacattaattatcagtagaacacatgttccatatttcattagttttggaaaacttcttagaactaaaacgtttgagttgatacatttcaaaaaataatcccgtccatttcttatggcattcctttccagctttcactatcccccaacaacaaacccttgaaacacttttgttctgaacaatataagctatcacttcgtccgcacattgatatgggccatatggcatgtccatctttttaccgcagttcttaagataatctttttctttttctgaatatttacgtaacatattgtcgttataatcgtctgatgccggtgaccttgccatcattgcatcaaactcgtcgtctgaaatgagtagtggctcgtcattacctctttctttggccaaagttagatgagaaaacgatagcaaaaccatgatcgaagaaaatatcatgaacatggttttattctccattttaaaatattttgatcttttattcttaattagtttttttttgtttctattctaccaatgaggatttctgcatgtatttatagtatcaaatgttcatagcattattatttagtaactttttattagtaaaaataacatttttctatttataacaataatttattagttatcaacataatttacatcttttgacgttttacaacgtttataaatattgttcgtttaatgcatttcagaaagcttcattgtagtatatgcatttaaagcttcattgtagtaaatttattgttcgtattcgaatgaagtttgcaaagaaatttaagaaaaagagtataaaagtaacgaaataagttatttcaaacctgcacaatagttaacaatttgtaaatataaaaatatatgggcgtattaactatttaatactgactaaaaaaataggttaatttggctccagaaaaatataacaaaaacagctaagatgtaccaatctgatattacactaaaaccgaaccaagatttacttataaagcaattaatggtttcatactttcgttaattagaaaatcaaaaatcaaaattgaaccgaactgaaccaattttagtgtatctaaactaaacataatcatattatattttaaaatttttaatactgtatttacaataaatatattcgtgttgtagaaatgtaatataaactatgtaaagtctttatctatatttataaatttatctagtcatggtaatatgtagtgcaaatataaaaagaaatcacccagcatagaaacatttaaaatttcaacaattctttgaactacatccacaaatccttcaattcttatcttcaaatgatgtgacatatttttaccccactaaaattccactaattcatttacacttgggttagacccttcttacatgttccccaccctttcaattcaggcataaagcataaccgaatcgttcacagatagagaaagagagaaagattagaagaaacaaat

SEQ ID NO: 13686 - DNA, 3000 bp, Unknown
  misc_feature (1)..( 3000): cDNA_ID_2703825_gDNA_ID_2214644_Annot_ID_136315 3000 nt of promoter + ATG
cttgttttttcacagattccagaatccttcaacgaatgagattgtaacacgtgtaagtgagacaacttaggtgacaattccatatttggagtcggaatttggcttacgtggaacccaccgaaatcgtgtaatagaagtcaaacgcatctatatctgtgtttaagctaaaagtaaacctcattgaagaagtaacataggaaagctttcgtagccgtcagatcaaccagacaaaacgtcatatcgagacaaaaactttcgacggagcagattctacagatacaatacacacggtttcactggatttcgcccctctctctttaaacaaaattaaataatatcagaagacacgttcttcttcttacgaaaccgactttgtagtttcttctttttttccattacacaaaaacgaaaaaacgacaacacaaaaacaaataacaaaatcttttaaataaaaaataaatcgactctcgtgtttgtttaacttcttgtttatttttcttagaggttaattaatttcttctctacatgaacgatccaatgggagaaacaggattttctagagaatcggcgccggagatcgtgttctcggagacggatatggctgcggctgagcagcttatgcatctaagcgaagaagaaacggttagctgtagcagcagcaccggcggagattgcggtggcggaggcggagacaagataaagcatgaatatgttagctcgagaatcggaaacgagctaaacgacggcgtacgaggaaactctattcttggcgtggagaagaagaggaagaggacggtgatgaaggaaaagaagtttcgatctcttgagagtatttacaaagggacgaaggagattagggattaatggaggaaagggatcggagagatggttaattatatatcgtttgttaattacttttgttaatcgatgttagtaacctcttcaatggtttttttggtgtgtgtgtatatttctagtccttgcttaatttaacgttggagctgaaaatttgtgataatagtttttggagattttcagatgaaatctgtaaatattttggttctcatatatattagacgtgatgctgttttttgtttttccctagtcacttcgttgcaaaaattaacaattttactttggttttggatctgatagtacattcatttttttcgtaagatttaaaagtttatttacgtgcaaatgatttcgttttgaatttttaaattttgagttctatgatgtgccaactgccaactgagatcattttttttttaccttttcaaaaagtatatattctacacaacaaaccagacacatgcaacaccaccaaatatcttaaaattgtggtgatgatttttatacttactgcagtaaagaaaaatcataaattttatcatgttcaactaaaggcatttgaagatgcctcatgtgggtgttgagtgaactcgggtcatgggtctttttcgtgaacttctcgttgagagcttcatcttcttaattatcttggagtcatcttctgattcttgtagcttgtattagggtttttgttataccttgatgagcatgtaaagagaggtcaagagtgagtgagttcctatagtaaacattcagttgatcgattggatgtttgtgacacaaaatgtactgtaggagaactagtgactatgtatggaaattgtttatgcattgatgtttagtcatgctaaaaacagatttcaacaagtggtattagagcacaactattctcaaggatagtcaaatttgtaacagaaaagcatattaaggcatgcaagcaatgcaagttgcacaagaagattctattctagtctcgattcttgtaaaatcgagtcacaaaagatcaaggtttcctagtatatcaaggatttcatcgggatataattcctaatgtatcttttttgcaatcatggcttgaacctctagacggttttggcagtatttgtatccatcatttccataccaaatcgtgtttgcctcaacattctacatgtaaattgcactatctgctcatgccttccacaaaatacctaggcaaaagacattaatttttcaagtttacgagcacggagtttagaggagccatcacactgattttacaataaatgaagaaaaatctttttgttatcttgattgacgtctactcatcccatgttttaacttgaaactttaattggcagctaatatctatagtgttatatccacaataggtggaaataaaaccctcacgttccacatcatgttgaataaataaagctgtcatccgaaatagatttggaggtatatagaagttttgactctttgagataacactgtggaagtcaaaaaaaaaaaaaaaaaaaaaaaaaaagtcaaaacatcctcctcgtctgagatgttccatgcaatatatctcttcataattctttcttgtcttcaacaaagtccagcaaggatctgagaagtttgcgtcgattgattatgccaacttgaagttggaaatagaagaagactaggcggaacatctcatcaaaaccctatacattcaacagggaaattcttttgcacgaatgttagacttcaatattgaataaaattcatagtttcaacaatctcataaaaaaagagctgggctccattcgaagacacattaatttccatgggcctggtccacatacaaccatactaaatttgaagtaatttacccgccatttaaaaaagcccataggctccttctcctagaagctggcgggaaaatcccaaaacttttcccgggaaagtagataaaaaatttcggccattaaaggacaaaatcacaagaaagtagaaaccctagagattttgaaaccgaaaccccaaaaacccctttgacgcctccttcttcttatctctttataaaaaaccatttctttcctgcaacatcgttgcttatcatcagacgcacatcacctgttcgataaaattcctctgagagtgttttttttgttttccttctgacaaagaaat

SEQ ID NO: 13687 - DNA, 3000 bp, Unknown
  misc_feature (1)..( 3000): cDNA_ID_2713990_gDNA_ID_2214644_Annot_ID_136316 3000 nt of
gagggtccagaataatgggcagtggtcactgttttgtcctaacgaagctccaggtttggcagattgctggggagctgaatttgagacactgtacactaagtatgaaagagaggtgagtccctatttcatccatgtatatgctgcttctttagtaactcaaattcctgttatctcaatacagttatgtttgttcatatcttcagggaaaggccaaaaaggttgttcaggcgcagcagctttggtacgaaatattgacatcccaggtagaaacaggaacaccatacatgcttttcaaggtaagtaacagtcatcattctgtagctacacgttatggccttataatcattggttcttactccaaatttgaatgctcttaaactataggattcatgcaaccgaaaaagtaatcagcaaaatctgggtaccataaagtcgtccaacttatgcactgaaatcattgagtacactagtccaacagaaactgctgtgtgcaatcttgcatctattgctttacccagatttgtaagggagaaggtgagagggagactggttttttaaaatttgctttctctttattactcaatgtatagctctaacattcttcatctcacaacagggtgtcccattagactctcatccacctaagctcgctggcagtctggactcaaagaatcgttactttgattttgaaaaattagcagaggtcagatacaagcactcgccttgcttgacctgaaatctgattcttaaggaattatctgtggagatatttccgtgtctgtgatgtgatgtttgactttttaatttttctgtgtggccaggtgactgctactgttactgttaatctcaataagataatagatgtgaattactatcctgtggagactgcaaaaacttcaaacatgcgtcatagacctattggtattggtgtacaaggccttgcagatgcatttatcctccttggaatgccatttgattctccagaggtagacttgttttgaattatgatcaatcttggaaaatataattttgttatctgttcttaagcagtttaatttgttactcaggcccaacaactgaataaggatatattcgaaaccatatactaccatgcactcaaagcatctacagagcttgctgcaagacttggcccctatgaaacctatgctggaagtcccgtgagtaaggtatgcatctcagccatcaattatatcaatttggttttcccaaacttcataagctaccattgtggattgttatgctgactttatcccatgcttctctagggaatccttcaacctgacatgtggaatgtaattccatcagaccgctgggactgggctgttcttagagatatgatatcaaagaatggagtgaggaactctcttttagtagcaccaatgccaactgcttcaaccagtcaaatccttgggaacaatgaatgttttgagccctacacatcaaacatctacagccgcagagtcttgaggtatgtgaatattaaatcatttgacaagtatgtttctggttttccccatttgatgcttactcacttggttgtcttggtttgtacagtggtgaattcgtagtggttaataagcatcttctccatgacctaactgatatgggactttggactccaacgctgaaaaacaaattaattaatgagaatggttctatagttaatgttgctgagatacctgatgacttgaaggcgatttacaggtatagcttccacttattttgtgttttcactctctactgtctagataaagaaatttgacttgtttcttctgtaaaacaacacagaactgtctgggaaatcaaacagagaacagtggtggacatggctgctgatcgtggatgctacatagatcaaagccaaagcttaaacatacacatggacaaacccaacttcgcaaaactcacttcgctacacttctatacttggaaaaaggtacaaaccttaatcatctaaactcttcatatgataattgtgaaataggttagagattctatagagtatctgatccttcactcatctgacaattactcttaatctcacttatgttgttgtgaatctaccttaagggtctgaaaaccgggatgtactacctgcgatcccgtgctgcagctgatgcgataaagttcaccgttgacacagccatgctcaaggtagaaaaaacaatgcaaactctttacgctgattcttcttgtgaactcagacattttacctatgagttgttttcgttggggtgaatgtaggagaagccgagtgtagcagaaggagacaaagaagtagaagaagaggataatgaaactaagttggcgcagatggtatgttccttgacaaaccctgaagagtgtttggcctgcggaagttgaagctctaagttatagtttgggtcttaaaaagttagaaagtaaaagcatgtctcttggacggtcttttttatttacttgcttatctgggtgtattttgttaatagtttcctaatgcttaatgttgcttgagtttttgtgtaatccaatttcgtttttaccttttctcttgaaacaataaggatttgtaacgagaattatgtataaccaccaccaccttacggtagattttactatccatatataaatattttaccatccatttataaatatttgtagtttggtactactaccaatggttgtaagtaatctgtaagaatatattctgatcattgtagattagaaaatgtgttactacaggtttcactagcttatcctagaactagaaacatgaaaattatgtatcgaatggtgaaaatattaatacaaacatatttacgtttaaatgcatgtgtacacaacaaagtttctaaagcaagctctatcatatagagaataaagtaaagcatgtagccaaacactctgaaactctgacgaatcgtttatcactgatttctctatcgatagtcccgccttcattgccaaatttaaactcgaaatctctctctcactcactca

SEQ ID NO: 13688 - DNA, 3000 bp, Unknown
  misc_feature (1)..( 3000): cDNA_ID_2713978_gDNA_ID_2214644_Annot_ID_136320 3000 nt of promoter + ATG
gtagaagcttgaaatatgtaggaaattttgcaaaatctgccatattattggtccaatcttacaatttctaccatattctagttcagcttacaatatctaccacattttacttcacttggtaattcgtggacaaaaatgcccttaaagtgggtcagggactgacttagatggtgacagcttttaactgatgtgatgatacatgacaaaaaatcatggtggaaacataaaagattaggagagagaatagtggagaacagctggcttctactgttattgggtatttaaaattgacttgtttaaaaaaattggttatccaaaattctgcgggggacaacgtaatatataatacattaggagacatgattacctgctagcgggagacaacgtaatatataatgcattaggggacatgattacctgttagcggagaaattctgcgggggacaacgtaatatataatacattaggagatgtgattacctgctagcgggggacaacgtaatatataatgcattaggggacataattacctgttagcggagtacaactggtgacagacttttgttttagtctccagatcttgtccccgaatagaaatctgttgcatctacgttttgttttcgatttcatcatcttgctctattattatgaatcctacacgttatatgcaattgttctcatttaagaattttaaattttatttagatttttcgtcatctattttggtccacagattagttgagcgttattgtcttcacctacacgtttacatattttaataatatattatatcggggacaagttcatatcgaatgagtaatagaattagatcggggacaaattcagatcgaataatagacaagatgatatgtaataactggatgtttttgttattttacaatagaagaaaaaaaaatcgtgtcggtgaaaacaataatgctcaactaatctgtggaccaaaataaatggtgaaaatctaaatcaaattagaaaccttaaatgagaataattggtggataaaatgtgggattcatgataatattgaaagatggtgaaaatcggagacaagatctagacataacggaaaatttatgatgaatagaaattaggggacaaaataaattaaaagttatatgtaaagaatatgtgcacgttgtcaggagaagtgagagagacaaaaacgtttcattttgtcttcggaaagatagtgatgtgtggttaaagcgcacggatctcgagaaaggagaaacaaaatagagaagaaatggtgagggcaatatagatattttaagtggaaatgtggtatgatgtgtaagggaggaaaaattatggtaaattgcataagaaattgagaaaatatggtaaattttataatttttccaaatatttatagtttttagtttgttgggcttcgaagatatactagattttaaccgcggtacactgtgggtacaatttattttttaaagttagtatatataaaaatttacaaattttatgtatctataaaatatttttattttatagtttacagttgttattaagtaacgtcctgccaaacccgtcttgtaaaaaaaaatcatttatgatatgtttatgaatcattgtctaaatattttagtcgatgcgcgacgttgaacccacacattttttcgccaattggttaatatatgttcatttttaaaattttgaatcacaaaatatgacggaaatgttttttgagatttttaaaaactttatatattatataatgatgttaaaaaattgtgatatattaaacgtttagaatatttaaatatgtgaaatctttaaaaattaaataagaaaattttaaattaatttgaattataattgttttataaaagtattattaaaaaaaaatgtttaatttcaccgaacgggattagatggtaggacgggtttataatattattatatatatactttacaacaattaaataatcatttgaagaaagaaaacttttaaattgatttgaattatacatcttttaaactaaaatattattaaaacaaaataacaaaataatgtttaatttttctgaacggggttagatggtatgacgggtttgggtcgatagtaatacaagacggtataccacgggtgaaatccattaaatatgtttaattccactgaacgggattagatggtatgacgggtttggatcgatagtaatacgagacagtatactacagatgaaatcttagatataacaattaaaatataattatattatcttaaacactaaacaaattaaagaatattaattaaataaatataatttaaatttaaattatgtagttataaactagattttgacttaatgaactgtatgtattgtttctatagttttaaaaagtaaaaatcaaacatagtaattgtatactaaaaatctatagatataagagttgtacatttagaaaatacaaaaaaataaattatatatatttttaatctactaaacatattaaatttttattttttaaaaaataattatagtcccgcggtataccatagattataattaatatatatatatatatatatttatttatatagatatttacacaattcttttaaacaataacaaaaagaggttaaggaggaaaactagattaacatagaaaacacttattacctgaaactagtaaaaagaaagaaagtaatatcaattggcttaaaaaaatagtagaggatatggggcacaataaacaaatttatttcatgtttacgacaaattttatgtttgtttttaataaaaaacaaaaattgcggtatattacgggttaaaatctaatttacgtttaaaacgtaagtaaactcgatatccaaacccataattgacccgacccgaactcccaaaagtgaagctcgaatcaaaacatacaaataattggaaaacgtttttaaatctttaaatcaaagcggagaagtaaataaaattctgaacgttttcttggttgactttcttgctctcgatg

SEQ ID NO: 13689 - DNA, 3000 bp, Unknown
  misc_feature (1)..( 3000): cDNA_ID_2713974_gDNA_ID_2214644_Annot_ID_136321 3000 nt of promoter + ATG
atgtaaacgtgtaggtgaagacaataacgctcaactaatctgtggaccaaaatagatgacgaaaaatctaaataaaatttaaaattcttaaatgagaacaattgcatataacgtgtaggattcataataatagagcaagatgatgaaatcgaaaacaaaacgtagatgcaacagatttctattcggggacaagatctggagactaaaacaaaagtctgtcaccagttgtactccgctaacaggtaattatgtcccctaatgcattatatattacgttgtcccccgctagcaggtaatcacatctcctaatgtattatatattacgttgtcccccgcagaatttctccgctaacaggtaatcatgtcccctaatgcattatatattacgttgtctcccgctagcaggtaatcatgtctcctaatgtattatatattacgttgtcccccgcagaattttggataaccaatttttttaaacaagtcaattttaaatacccaataacagtagaagccagctgttctccactattctctctcctaatcttttatgtttccaccatgattttttgtcatgtatcatcacatcagttaaaagctgtcaccatctaagtcagtccctgacccactttaagggcatttttgtccacgaattaccaagtgaagtaaaatgtggtagatattgtaagctgaactagaatatggtagaaattgtaagattggaccaataatatggcagattttgcaaaatttcctacatatttcaagcttctacctctagttcactactttcgttattaaataagcccaattactctcacgttactattctacatgtgttatctatatttggttaggcagttatcaacgctttcacgacattgtaaaatttttagactgaatgcattccataaaatgatgtttaatttgagaccgaatgcattccataaaaattgaaacttttaaatatgtttttaattaaaaatattattaaacaaaaaataacaaaatgctgtttaattttacgggacggagttatatggtggaacaagtttggattgatactaatatgatatggtataccacaagtgaaatcctaaatttaaaacaaaaaataaaatgatataatcttaaacactaaacaacccaaataatactaacaaaacaaatacaacttaaaatttaaggtttttcattttaaaaaatcgatcattaatgtacagtggagtaatattttagatagaaaataatatcaaattattattatagtccatgattataaatatttaccaatattaacactatatcacttctacacctacaaatcttctaagtacatcaatacaattaacacatttatgtaacaaatacaaaaactcaggaaacaatctttttgcatttcaactatattaattctaatataatataattaaatgagaaatatgtttttacattatgaatttaaaaatccaataaattattaattattatctaaaatctataaaataaaaatattgtcatgcggtataccgcgaattaaatcctaatagaatactataatcaatgactaattaacacatcaaatgaatttgcttcatttacatatctttaataaacgttactataatattttatattaaaatttatatattaaatatattgtgtctaatattaaatatgattgaattttatgactacattttttaatgatatattaacgtatttgcaacttacagtatgtgtaccccgaataatagcatacgatattttccattgtagattacgaaattctcatatttaaactcttctcttgtgggtagggttgtcaaaatgggtcaaaattcatcggtcaactcaactcaattcatgaaccctaatgagttgaaaatattgactcaaatgagttgatgggtcaaatgagttcttgaatcaattagtttgatgaataaaatgagttgagttgtaatggttaatagtttcaatggtttatccaattaacccatcaaattttgtaaaattgaattaaaccaactaaaatctctaaaccaataccaatttaagtttaaccaacacatctaaactaatttaataaaatcaatattttccaaatttcttaaatatacaagctatgaaattgaaaagaagtaaactcgtaattttccaccaaaaaacataaacccgtaattttcccgccaaaaaagtaaacccgtgattttcccgccaaaaacgaaaaactcgtgattttcccgccaaaaatgtaaacccgtaattttcccgccaaaaaacgtaaacccctaattttcccgcaaaaaaagtaaacccatgattttcccgccgaaaacgtaaacccctaattttcccgctaaaaacataaacccgtgattttctcgccaaaaacgtaaatccgtaattttcccgccaaaaatgttaacccgtaatttaccggccaaaaaacttaaacccatgattttcctgctaaaaacgtaaacccgtaattttcccgccaaaaaagtaaacccgtgatttttccgacaaaaacgtaaatctgtaatttttctgccaaaaacgtaaatccatgattttcccgccaaaaacgtaaaccccgtaaaaaatggaatccgaaaatatcttaagtttgatgataataaattaataattattaataatgataattatttattattgttttataataataattaattaaattattacgtgggataatctatttaacaactcaactcatcaaatgaaatgagttatgggttgggtcaacccatttaatcatttaactctaaactgatttgataatgagttgagttgagttgggttacccatttcgacactcctacttgtgggcttagtgaaatttcgtagatgtatatgtaagcccgttaaacattgtatacgatttaataaaacagaacgacttgtttcgtgcactcctcccactatcttaaatctaaaaaaaaaaactttggatctcatctctcgttgacttcg

SEQ ID NO: 13690 - DNA, 3000 bp, Unknown
  misc_feature (1)..( 3000): cDNA_ID_2703829_gDNA_ID_2214644_Annot_ID_136323 3000 nt of promoter + ATG
ctccgtttctaagatatgggataccgctggacaagagagatttcaaagtctaggggccgcgttctatagaggtgctgattgttgcgttcttgtctacgacgtgaacaatctcaaatcttttgaaactctcaataactggcacacagagttcctcaaacaggttttgccctaatgttccatttcgtgtgcaagaagttacagttaccatccaagtctaaccgcttcgattccattttctgatatcctctaggcaaatcctatggaaccggagacatttccctttgttttgatcgggaacaagaccgatgtagatggcggaaacagccgagttgtaagccgatatgatcttcataaatctcatcttcaaacccatcaaaaaccctaatttcccgattcaacttatgcaggtttcaaataagagagccatcgagtggtgtggctcaaagggaaacataccgtaccatgaaacctctgcgaaggaagataccaatatcgatgaagcttttttgagtgttgcacacattgctctctctaatgaacgtaaacaaagcaatgacatgtgagtttctatatagatctaactctttccaatttttctctaagattcatgtttgaattgttgtttgtatttgaatttgcagatatcctagaggccagtatcatgactctgttacggatattattgatccagatcagtcaagaggttgtgcttgctgattccatgtttgacatatctgatcaaataatatcgagtcccagctctttcatttgcagtccttgtttttggtaactttttttctatttattggtttaataatatcatttatagaggtttattaacgacaaaaaacagttgatacatactactttctgagtgttttgattcatgtaaagcattaattaatttctatttaatttttgtaaaccttttcgttgagataacttatagtaccatcaccgaatcacttggatttgttctacctatatatgtctattagtagtactccatttgattattctttttgaaagcgtaacgtttaggtgtggcattaaaaaacaaacacattttggtgtagagtctttccgcctctgcgcaactacttctccttaatgctcccttttataggctcaaccaattttgtatttctccttagtgctcttttttattgactctaaccaataatatttgtattggatgtcataaaagagactcttgttatctcttgtgaacattgtttttaaaccaaaaaacaacaaccaactttgctctttcgcttttagttgcaactcattttcaaacgtaaattttgttaagcgttatgtgaatttccgactcaaaaatcaattgacattcactgaacattctcagtatgggatttctatcaagtcttttgaagatgtggtttctctgatccatttagagtaaaatcttacttttttttttttgcaacatgtatatcttatttttatccaccgataatcaattatgtacaagttgattgcataatttttggtgtagcaaaagtaggtttaaacgttggaaaccgaacttaactcatggtattgtcttgatgggcttgattcctcctatcaagttctttatacatggacaaattcttaatgaactagctagcatggtcagttttgtaccaagtccggaagcaattcccaattagacatatgatgagcttggaaagatgagtgaatgtgattcttctagagagagtacttggagatcatcaggaggcatatgtagtgggacaaatgtttatagaaaaatattcaatcgggaaagtaatacatgatttgttaaactgtaaaaatggcgaaagtacatggactgcaatggtggaacgaaatggctagtaatgtatattgcatgatcatgggaataaggagaagataagtgatggaattgggggggggggggggggggttaaaggtcgacgaccaaaatatgcgcaagcatgagtttgagggttgctatgtctgagttgtgagttatgatgactgagatatgtcaaactatgagtttgataataagactatatgtaatgagagtgttgaataaattattcaactgttgaacacatacgatgagagtgttgaaaaagtaaaaaatcatatgtggattaaacactattgaatagattcaacatattgaaaaccaaaaaatgggagaaaagatgtatgctctcaaaggataaacgttaaaagaaccaccttttcagtcgcagaaggagaggctctagtcttaaaggaagcaaccctccaactaaaatggttgcaatttgatcatcaaaaccggtccgtgactaaagtccatgaaacaaaagctttaggtaacagtaataataagagctttagataaatggtctaatggtctgtccgaaccttttcagttttcaatgatcagtcacagttttgattctaattattgttgaatctattacttataattttttttgactatttatgttaatataccaaattatttttgctttaggtatccatatagttttgaccgacctcgatgatcatgttatattctgtggagatttatcaactatttataaataccttgaaaccgctactagacattggagtaatccctcaccttgtctcatttggcaaatatttcctataggttcaacttattagtagaaatgacaatgtcttggctgacacttatcaagaactctccttgtaatcacttagttacttccattatggaaaagttgaccgatcgaaaaaaggtattaaaaaaaaaaaatagaaaaattaagattttcatagtgtaattgtaaaaaataaaatcaaattattttcagatattccgtattgggaataaatctcagccgttgattactatcaacggtgtacaattactgcctttgcctgttacttgttctgctccgtcgctcagataggatctcaacaagacaccacaaaccctaaatttcgtcaactccacagcgactcgattcgatcaaggaaatg

SEQ ID NO: 13691 - DNA, 3000 bp, Unknown
  misc_feature (1)..( 3000): cDNA_ID_2703818_gDNA_ID_2214644_Annot_ID_136325 3000 nt of promoter + ATG
tgaaccaagttaatttatgcggttttccaattgccgtaaaccaaccttcgacaaatctttggtgtacttacaacatcaccaagcttctcgagagtggataacaccagcaaaggagctactaataaagaatataatttatgtggtataccacaacaaaatattatcgaaatagagaaaatccataatattaattcaattccattgggaattcatttttgttccgaatgaaagtatataataataaattcatttccacggagaccactagtatatattactgtgtagaaaaaaaatgatagtgcatgatataacgttggtaatttaattgattgattaggttaagtttaaaatacaaagaaaattactggtaaaaaaattaattttggttggttttcaattctaatatggaaaaaatatggcttaaaagttagaatatattataaggcaattgacacaaatagcattaaaaaatattcaaaactagcaccacatataaaaaactacacaaatatcacttttcattttatttaattattaaatgtaaattattaaaagttgtcaccattaatgaacctctgagccacaagagaaggacgagccaaaggaggaggtggaaaaagagaagaaaccaaagtcacagaagaagggtaagaaggaaagtaaaagaaaggaaccagagccaaaacagaaggtggaaaccaagaagaaaccaacgccacaaaagaaagacgagaacaaaaggaaaaatgggcctaaagagaagggtaggaaagaaacacagaaatccgtaagatgggctaaatcagtaggagagctaatcaaaaagaggtgtttacactagaatgttgacagtgcaacccgctagtttgaaagatcagctaggctaagaataatgtatagaccagaatattcgtgttcaaactagaaagaaaaagcaggaagcctaaattcactatggacctccttctgacttttgatttctattgtattttatgtagccctctgtactgaacttacaccccttttttggaagtactagcttttgtgatcccttgaagaactggcaaaggcaaaagcaaacttcttgtaagcagatttgtagtcgaccaacttgtactatgccgacaaactgcttacaaatcggcataatacaagtttgtggactacaaatctctttacaagaactttgcttctgactacaaaatctacacattattcttagcctaactgatctctcaaattggcgggttgcgctgtcaacattctagtgtaaacgcctcttttttattagctctcctactggttcagcccaccttacgaatttatgtgtttccttcctacccttctctttcggcccatttttccttttgttctcgtccttcttttgtggcgttggtttcttcttcgtttccaccttctgttttggttctggttcctttctttactttccttcttgcccttcttttgtggctttggtttcttctcttttcccacctcctcctttggctcgtccttctcttgtggctcaggggttcattatgaacaaatatcactcttcactcttcaccttctcgtcgtctgatatgagtagtggctcgtcattatctccttctttggccaaagttggatgagaaaacgatagcaaaaccatgatcgaagaaaatattatgaacattgttttattctccattttaaaatattttgatcttttattcttagttagttagtttttttttattttaccaatgaggatttctgcatgtatttatagtctaaaatgttcataacattgttatttagtaactttttattagtaaaagtaacatttttctatttatctttgaccaacaataatttattagttatcaacataatttacatttttgacgttttacaacgtttataactattgttcgtttaatgcatttcggtttatgacaatatgaattaagctgaatgaaaatgcatttcagtttatgacaatatgaaaaatcttaagcgtttcatagatagaaaactgggttttgagtcccactatatatgcatttaaagcttcattgtagtaaatttattgttcgtactcgaatgaagtttgcaaaaaaatttaagaaaaaagagtataaaagtaacaaaataagttatttcaaacttgcaccatagtttacaatttgtgaatatgaaaacatatgggcgtattaactatttaatactgactaaaaaaagcggttaatttggccccaaaaaaaacataacaaaaacagctaagatgtaccaatctgatattacactaaaaccgaaccaaggtttacttatagagcaatggtttcatgctttcattaattagaaaatcaaaaatcaaaattgaaccgaactgaaccaattttagtgtatctaaactaaacataatcatattatattttaaaaacttttaatattgtatttacaataaatatattcgtattgtagaaatgtaatataaactgtggaacccccttgatccaaatgttgaccaagggttcattaatgattctaccccaagaggtctggggttcgagtcccagctattgtgatttattagcaaatttgcagattaatggaggcaagtgtacaggagatctacaacgaagtataattatagccgtttgtcaagattttacgcagagaagatattgaagatgtccattaagcgcatggagaaggataagaagattatgtaaaattttttatctatatttataaatttatctagtcatggtaatatgtagtgcaaatataaaaagaaatcacccagcatagaaacatttaaaatttcaacaattctttaaactacatccacaaatccttcaattcttatcttcaaatgatgtgacatatttttaccccactaaaattccactaattcatttacacttgggttagacccttcttacatgttccccaccctagcataaccgaatcgttcacagatagagagaaagagagagattagaagaaacaaat

SEQ ID NO: 13692 - DNA, 3000 bp, Unknown
  misc_feature (1)..( 3000): cDNA_ID_2713962_gDNA_ID_2214644_Annot_ID_136330 3000 nt of promoter + ATG
ttttgtacgcacaaagtcgggtgccaaaacaatctcccctgcatcattagtacaaaagacacaatgatgaaagtaaggattgcgaattagtgaagtagacgaaacatcataagacatcttggaccattcgtgttttgcagcatcctctataacccacaagttaattctataatcagatccaggaaacaggagtgcaggctttccctcgtagcgtgtcagctttggattcaagtccccgtctggtcctcctttaataagatcaaacttttcagatctaacatcaaagctcatgactgcatgattcgaagctgtgtcgagcatagctacataatacaaaacaccattgatacacaaatcaggagtatcttcatgacagagacagtgaggaggaaaatcttcaaccatcctccaagaattcccttttctcaaagtgaaaacctgaagctccttagctaaataccgtctctgataaacatgcatgcctttcatcatacacaacactttgtaatcaccatcaataggatcataacccatatggtggtatatacattcatgattagcatcaatcttgggcaggataatggatcgtctagtgctagggttagatactattagtctagggctagacactattagtgtagaaggaggtccatggcaaatcaaaccgtgaacagaaggagcaaaggttttaagctgtagatgagggcaattcataaggtaagttggtttagaagacgaagttgattcaccttgatcaatcaaggagaagaagcaatggattccgccgcctgcgattgtaaagatgagactttgtgggcgagtcgaagaattaatcaagtacgatttcatgaagtctctgttgcgaatgatggaagtatattcttttgatacggagaggaacctagctagggttttgacaggtaaccttttgagtatctccgggatgagatcaaacggaatctgaaccgagtttccactgcatgtaattagatcatcggatatcttcgtcttcttcgatctctgtttctccatggcggtgataagaacgaaaggcatcgatttgacttcacagtgagaaaaacttaaggaataagagaagaaatatgaaaggacggtgaaaaaacgtggtgccgttttaaacgggttggaatatgactaaacgtcgtgccgtcttattaataaggaagaaacttttgacgcatgtcacggatttaaacactacacgtttccactaatgaccattattaatccattatacacactaaattcggaatttagatgggccttgtaaaattgtttcgtaaccgaaataaatggaagattttaaatatgaccaaatgtaaggagactgtattgaaagacaaaatattaaaagttatttgagttttaataagttttggtatgattctggtcaacttggttgaattaggaaatttgttattcaaattttttcaaaattcagctaaaattatgagatttgaatttgtttttaacctaaaatttttcttgaattgtcatataaaattatttaaatcacttcaaatccactacttcatttttttacgatttgattgtatattttctaattactaatccaataatatatttagcaaaacttcttaattttgaataaactaaccaaatttggatatgtagcaaagtttgataatatcttctaaattctgttttttgacgattagattataaaagtttttggcaattttagtttttttcaagcaccaatgaggggaagttgttaggaatttgaaaatttcatattcataacatatatttcttttggttcttattaattgattttttagaaaaaaaattgttttaaaaaaattgatttttaggaaatgtaaatcataaaaactaatatatttataattagttttaatatattattttaatctatatgttttttctaaaaaatcaattaaaaaatcagagaaagtagttttttgccaaaaaaattctgatgccgaatttgagctttgtatcctcagttttcttaggtgttagtaagatattttgcttttaataaagaagataattttgtgaagaaaaaaaaagttttgaggagaaaaatagaggataattaagaaatgtttataaaatggtcaaaacaactaatgacatatttaaagggggaaaaatgtcatttaatccctcaactttcaaaaaatgatcattttatataccattttatatatgcgactgtttaatatatgaactaaacgttgactaatttttaaaacattaaattaatcaacgtttagtttatgtattaaacggccgcatatcaaattaatgtataaaatgacaattgaaagttgagagattaaacgacatttttccccgcatcactgtttcagcttcaccaaccccattattctctctattaattatcaaatgaattagttattagtcccttaattattcaaaaaaaaaaaaaaaaaaagtcgactcatcctccggcgggagtagaaaattcttcttggttctgcaggtggtaatcttgttttccttaatgaagtttcttagcgctaattttttatatgttttctcgtttaaaaagtgtcaatttttaaaaatcctttcccttttacggttcaatttgatttggataataattctctttttctctggaaagttcgaatttttttttgtttggaagcttggagaaaatattatactcttctcattgaatgatcaatttacaaatcctcatttgatcgatcttgtcaatttttgaaaaaaaaaatctgaactttgagaaaagttattgagtttcgatatctgtcggtcatggtttgattgtggctgttgggtaagacaacaaattaggtagggttttgtgatattgatgtccgtagtccttaattatggccaaattgttgtcttttaggttttgacagtagcaaagaaaagctgaatctagttagaaattgcttttgcagggtttttgaatagtttgtgtattgaagattgtctgaa

SEQ ID NO: 13693 - DNA, 2584 bp, Unknown
  misc_feature (1)..( 2584): cDNA_ID_3031419_gDNA_ID_2214644_Annot_ID_188465 3000 nt of promoter + ATG
tagtactttacttggacttcaactgtcgttacttatgctttgctttcccatagaaaaatacagcatatatatatagtagaagccaaaacagagcataaagatcaccatttaaacaaagcatattaatgataatatgatgattaaacatataaagtatcaaacatcataacatcatcattagcatcaacgtatctcttttcatctacttaactaacgctacattgaacaccaaatctctttgttttcttcccactaaaacaatgaaaatagtaccaaacattgaaaatcatctactcaaattaagaggcaaatcatatcactagcttttaatcaaaagtaaaagcataatcttaccattatcattatcatcatgattatattccatacatatttttgttaatcactacaccaaaactatgcattttagtatagttagaacagggaaatcgtccatagagctgaggtttggcacatttgaaaatctttatgttttgtagcatttttactaagttttgctacattgaatgacaagttcaaccaaaaatatttaccaaaaaaaaaaaaacaagttgctgttcaaccaaattcccaaaagtaaaagtggcaacggttgcaaaattattccatcacacggaaacgcagcgttttaatatttcccttgaagacaatataatgccgtcttaagtcactatctgaataacagagacatcagccagtgaagtggctgttgatcaacgtggaacacgtgcacgatacttcttttattagtcattagccgacagtggtctcatagctttccacgtggtgtgtttagagatcgagttgatattttcaattatttatactctcaggtcgttgacaaggtcgtgtgtctatcggaagtttgcaaaagctccggtgacttgtcaacaactgctccgtcacgttccgtcgatttcaatcgtctttacatccacttgaatagttttcgtgcatacattatagtaacactcttctttaatttgcataatgtattaagaatatacgaatggcttttgacaattgatttacaaataaagttttctaattaagtcaactccagattattattagttcttgtcaacgaatgataccagtattataattgtttgtgaaacccgttatgattatagaatctacaaataggaaacttacatctaaatttttctttaccaaggaaacctgataactagattcatatttttttttttgtcataagatattattaaggacttaaaaaaaataattccgagagaaattatttacaaaagtgatatataacttaaatttacatttctttttagattaatcataattatatcatattttagatccacttaaataaaatacagtaaatacgctattcgacaactgtaatcacattcgaaaatttcacgggtagtcgaaaccaaatcatctttgataataaacaataatattttttttttttaaactaaaaataataactatttaaaagcgataaacaaaactaattttttttaacaatgtttttagcaaaaattttacacgaaaatctcataatactaacactaaaatgaaaaaaaaaagaatattcaaacaataccatattatttttgtgattttttctttagttagtggtgatactaacattcttttaactttacctttaaattgctaagttttacagcacctttttttttgttatttttgattaatccaaataacaggaaatatcttcagtaaaacaaatctcataatgttaacactaaaaaagaaaacagaaggagaaaaattaaaaagcgttgtttactttttgtaattttgtaatttgatttaagaacacgttaacatctactacgccacgtgtcaaaataaacgtaagaccgtccgcatcgtaaactttcctccttctccttctataaaagttaccagaccagaccgtcgatataatacgtcatcagccacgtcatcgacaccgacacgtgtcggtaaaaaacccacacgccacatgatccattggctcgttcggtgttagccaccggtcttctgattcctctctctctctttcttcaattcttcttctctgttcccccaaaaatattgggcgcaaaatctctctctctctctctcttcgaggaagaagaagaaaaaaaaagaagcgaaaagtcttctcctgtttaatttatttgaaaaaccctagcacaagtccgccgtctttggtttgaagaatctgggtattgattgattttggcttctgggttaatcgcttttcatgtcaatttctccggtgagtttcgaattttccgttctgattttggtgtttttttctttctaattgattgaaattgaatagctttctctttttgttaatccctgttcatcacataaatttgaaagctttttgattcaagtattgatttttggaaacttatgctacttttttttttgttcttcttctcttcacagcttttctgaatcattttcgaattgtctctgatgaggtctcgttgaatagatacagactttggttctcttgtaattggttgtgttgaaagcgcgtttggttcacaatcaatgccatatg

SEQ ID NO: 13694 - DNA, 3000 bp, Unknown; identical to SEQ ID NO: 13692
  misc_feature (1)..( 3000): cDNA_ID_3031429_gDNA_ID_2214644_Annot_ID_188459 3000 nt of promoter + ATG

SEQ ID NO: 13695 - DNA, 3000 bp, Unknown; identical to SEQ ID NO: 13691
  misc_feature (1)..( 3000): cDNA_ID_2703818_gDNA_ID_2214644_Annot_ID_188455 3000 nt of

SEQ ID NO: 13696 - DNA, 3000 bp, Unknown; identical to SEQ ID NO: 13690
  misc_feature (1)..( 3000): cDNA_ID_2703829_gDNA_ID_2214644_Annot_ID_188452 3000 nt of promoter + ATG

SEQ ID NO: 13697 - DNA, 3000 bp, Unknown; identical to SEQ ID NO: 13688
  misc_feature (1)..( 3000): cDNA_ID_3031452_gDNA_ID_2214644_Annot_ID_188449 3000 nt of promoter + ATG

SEQ ID NO: 13698 - DNA, 3000 bp, Unknown; identical to SEQ ID NO: 13687
  misc_feature (1)..( 3000): cDNA_ID_3031460_gDNA_ID_2214644_Annot_ID_188446 3000 nt of promoter + ATG

SEQ ID NO: 13699 - DNA, 3000 bp, Unknown; identical to SEQ ID NO: 13686
  misc_feature (1)..( 3000): cDNA_ID_2703825_gDNA_ID_2214644_Annot_ID_188445 3000 nt of promoter + ATG

SEQ ID NO: 13700 - DNA, 3000 bp, Unknown; identical to SEQ ID NO: 13685
  misc_feature (1)..( 3000): cDNA_ID_2703844_gDNA_ID_2214644_Annot_ID_188440 3000 nt of promoter + ATG

SEQ ID NO: 13701 - DNA, 3000 bp, Unknown
  misc_feature (1)..( 3000): cDNA_ID_1976939_gDNA_ID_2214644_Annot_ID_136332 3000 nt of promoter + ATG
ggttatttttatgatccttcattcaagctcttcttctttgtctactctttgtttagtgtgatccattgttcatatttcaagctaggttcttttttctgtctagaccgatgcgcttaagaagctctcttcgaggtatcaagttgttgtttccacaggtggaggtgcagttataagacccattaactggtgtgttcccttcatcctgttcaaagtataatgatacaaaactcggttccttgtttaacttgtttggtaatctgatgatattatcaggaagtatatgcataaaggaatcagcatttggctagatgtgcctctagaagcattagcccatagaatcgctgctgttggaactgattcacgaccactgctacacgatgaatcaggagatgcatactcagtggtactgattctgactgttgtacaatcataagccttggatacttcaaacaaaacattcatctttttttctgtttgtgcttgtgaatgaattactcgtaggctttcaaacgtctctcggctatttgggacgagcgcggtgaagcatacacaaacgcaaatgccagagtctccttagaaagtatgtcttcttcatccatcttatctgccatagcctttgttcaatctgtgtaacttcttctggaaattttgctctccttccttgtacgcgaatcatcagatattgcagcaaagcgtggctataaaaatgtctcagatctcacaccaactgaaattgctatcgaggtaagccaggtcctttctcagttacttcatcattaatcatttcaaatcaaactcaacaaagcaaatcactcatcaccaggccttcgagcaagttctgagctttctagagaaagaagaaactatggagatcccagacggcgacctctaatttcccagccttcttttctccgtctcttcatttatctgtttaatcaactaaacgaagcaatcactcatcaccaggccattgagcaagttcagagacaaagaagacctctagttactggttccgggtcattggagcttacacgagcctaattttgactggaactatggtttattgaaagaagattcaatacatgtatatataaaatatatacttttttttttgtttcagtatcatccttcttctcttttccttacaataagaattaagaaaaagtagccgtgtttgttaacatgggccaagaacaagcaaagtgatcattcaaatataaaagtagctttctcatggaatacaacaaagaaatgcacatgcagaagaaagtagatttaactctaaaagtacagaagcaaatctatgaattttactacaccggcaagtgtttcatcttggctcagggcattaagccaagctatactctttgtcgattcactagttccggcaaagtagtctaaaccactatgctcataacaatgattgttgctcacggacatacataacacaaccaataacgatgaatcagaagcagacctgtgtggtatatcatggatgatgaagatatgatgacagtatacatgtatgcatcatcatcaaactgtagctgccaagcaattcacaatggcagattcattaggaaccgtaagcacggtaccagaccattcaatttttccccaaatctccctttctccacgccttccaacatcaatctccgcacaccaaatctccattctcctagaaccaccactaccagctttaccttcccacaaaaccgtaagctttccaccacgattagccattgtagccccacaaagaaactttggaagtgactccacacctttcagctctctccaaatcctctcttttggatcataccctctaatcttccccaagtaatcataacaatacaatatgttctcaatcacacaagctcttcctctccatcccaaatcaagcctcttctcaggcatctcccatttcttttccttgggttcgtaaacaacaccgtttcgatcagccattgcgtaaaccttcccttccataaccgcacttgcgtgcatccatttctcacgaacctccatacctggactagccactggctcccaagtttgagtctttatatcaaacatctctgcccagttaatcgatcgagcccaattatcaactacacatcctccaatcacataaatcttcccatcaattacaccagctgctgcaaattcacgacctactctcatattagagactcgtcgccaagtatgaaatctgcaatcgagaacccacacgctcgaagaaggcacgtctctaatagatccaccgatcacgtaaatctctgaatctaccacaacgtaagcggatccgactagagacggtgaaggacaagatgggattggaacaagcattttcgaattcgttgagttcgataaggttcgatggaggagagtgaaccaacacgcaccagattcaggaggtatacggattgctacgtagaggatgttttcagtggctccgacgagagctctcgtggcgtagagaagaggtgatgttgggagagatcggaaagtcttggagacgagtgagaggattggatagtgacatctagggacgcgagcaaggcaactgagagcaacgtcttctgataacaacggaatcaattgcgccggtgattttgtttccggtggttcgtcgccggagctcgttgtagccgccattgatccgttttgatcagtctttatttccttctcaatttaaaagagaaaattaattttgcaattattcggttcggttcgattcgattaagtcagacaaatccgagaagagaaagttattttagaaactaaaccgtatttaaaccgatatgattgtgccgttatctacaagtgctgacgtggcgggaagcatgatctcgtggtttgaaagaagccacgcgcttcctcgtcttcccttcgtcctccgacgtttccaattgggagaagaagaagacgacgatgaagcatttatctgattctgggtctgttgaaaatcaaaattttcttgagaactttttttgaagagtt

SEQ ID NO: 13702 - DNA, 2584 bp, Unknown; identical to SEQ ID NO: 13693
  misc_feature (1)..( 2584): cDNA_ID_2713951_gDNA_ID_2214644_Annot_ID_136338 3000 nt of promoter + ATG

SEQ ID NO: 13703 - DNA, 3000 bp, Unknown; identical to SEQ ID NO: 6141
  misc_feature (1)..( 3000): cDNA_ID_2703889_gDNA_ID_2214645_Annot_ID_136341 3000 nt of

SEQ ID NO: 13704 - DNA, 3000 bp, Unknown; identical to SEQ ID NO: 6150
  misc_feature (1)..( 3000): cDNA_ID_1840930_gDNA_ID_2214645_Annot_ID_136345 3000 nt of promoter + ATG

SEQ ID NO: 13705 - DNA, 3000 bp, Unknown; identical to SEQ ID NO: 6145
  misc_feature (1)..( 3000): cDNA_ID_1812409_gDNA_ID_2214645_Annot_ID_136346 3000 nt of promoter + ATG

SEQ ID NO: 13706 - DNA, 3000 bp, Unknown; identical to SEQ ID NO: 6144
  misc_feature (1)..( 3000): cDNA_ID_2703878_gDNA_ID_2214645_Annot_ID_136347 3000 nt of promoter + ATG

SEQ ID NO: 13707 - DNA, 3000 bp, Unknown
  misc_feature (1)..( 3000): cDNA_ID_2703872_gDNA_ID_2214645_Annot_ID_136351 3000 nt of promoter + ATG
caaaaacttgtcccatatattttaccctgttttctcccaactgtcataactgactttggtatcttttagtcaaaataaaacacatcagcccaaaagactcaaataagtatattaactagacttttttataatcttttggttacagatacgacagtagtaccaataaatgttggtgagactatactactacgagtaataaactcagcattaaaccaaccgttattcttcacggtggctaatcacaaactcacggtggtcggagctgacgcgtcatacctaaaacccttcaccactaacgtgatagttcttggcccgggacaaaccacagatgtcctcataaccggtgaccaaccaccaaatcgctactacatggccgcaagagcttaccaaagcgcccaaaacgcaccgtttggaaacacaaccacaacagcaatccttcaatacaaatccgccccttgttgcggtgtaggcggcggaagtggaaccaagaagggtaattccttcaaaccgatcatgcctatcctccctgcctacaacgacacaaacaccgtcacacgtttcagccaaagcttccggtcacttagacgagctgaggttccgacagaaatcgacgagaatctcttcgtaaccatcggactcggtctcaacaactgtcctaagaacttcagatcaagaagatgtcaaggtcctaacggcacacgtttcactgcatcgatgaacaacgtttcatttgctcttccaagtaactactcactccttcaagctcaccaccatgggatccccggagtcttcacaaccgattttccggcgaagcctccggtgaaatttgattacactggtaacaacataagccgatctctctaccaacctgatagagggactaagctatacaaactcaagtatggatcaagggttcagattgttcttcaagacacaggtatagtaactcccgaaaaccatcccattcatctacacggctacgatttctacattatcgccgagggtttcggtaacttcaatcccaagaaagataccgcgaaattcaatcttgaagacccgcctctcagaaatactgtcggtgtacctgttaatggttgggccgtcatcagattcatcgcagacaaccctggtaagctaaactattagtataaaaatactactagttatcattcattacaagtgttacttatttttatccaaatttcttcgcttttcagtttagctataaaatttacatgattcgttaatttattatatatatatcgagactagtccctaaactaaatacgtgtaaaaatgattgaaaacaggggtctggataatgcattgtcatctagatgcacacatatcgtggggactagccatggcttttttggttgagaatggaaatggagttttgcagacaatagaacagcctcctcatgatttgcccgtttgttaggagttcaagaactttgtaacataaaaccacattatagtttttcatgttcttctattcaattgttttttgttggttatagacgtaaaccgggtcatactcctgagttggcccggacccttcagattaagttttctcgattattgatgtattcttttgacattatagtaccaaatcaagtgctaagagcctaagcatacgtatcatgaaagtttatttttttcgtttttctttatgcttaattgacccattacttcgatttctttttttttgttaaaaggtttcattcactcgatttgtgtatgactaagagcatgaatttgatatgttagaattagaatgaatggttgttgagctaaattcctacttatttccataatcagcttagaacttttgcgatcataataaacaacataatttgttggcgtaatatttgctgagtcaatattgaatgttgaagttataaagaaagaaacttatcctaattccattttgttttaaaacgcattgctatgaattgatgagtattattcttttacgtaacattattgaatttgaacttgagaagatgataacgaaattaattgaaaaagaataagtgaatatgacatcaagaaaaagtggcctgaaattccaaattagttgagcagaaaagtttggggcaaagtgatttccgacgcggattaatcataacatcgacattactagaagaaacaaaagttgtcatgactttgttatatttttgagtactcagagggctaattttataacaaatgtaacaaatgataataataatataattcttacacatgcatgttgccactaatctaccgaaatattagagtagacaagaaattaacgtgtaataatttgtaagaactccgattgtcatatttgatttaatccatacaaaaaggtgaaaatccaaactaaatcttaccgtagaaaataaaacttaggtcgcgagtgtgagcttagctataaacacgcaaaatatataaaagaataattgatcttttacatgatagatattcataaatttttaaggcatttgcaaaccaattaaatactaaaataaatagcaaactaaactcatttgtcatcttaaaacctaacatatatattttaaaattcactaaccagataatatctattatacaaattttaataattgttaatttatattggcgaaaatcatgatatataactattatcagacactttagaattggatcaaccaagaagaataaaaaagttttaatcacaaccaaaaagtctatttgtcgttttcacttttcaccattcatcaaacaccaccacaaaggttttaaattttttcttttatcgtcttcacgaaaggcccattagtatataggtccattatctaaaaccctaaatctcttgttacgcattcccatgccttgttcaataaaaaattattctcaggcccattagagagttacgacttcaacctaaaaccctaaatctcttgttacgcatccccttgccttcttaaaacaaatttcttctcaggccaaaactcgcctctggaagctccgatg

SEQ ID NO: 13708 - DNA, 3000 bp, Unknown
  misc_feature (1)..( 3000): cDNA_ID_3031484_gDNA_ID_2214645_Annot_ID_188492 3000 nt of promoter + ATG
ccgagttcttatttgtcggcacaagctagagttgttgaagaccatacaatgtctcaagttattgtacaagcagttgcagatggaggtggaactggtatgctggtagtggtgacaggggcaaaccatgttgagtatgggtcaaggggaacaggattgccggcaaggatctctaggaagattccgaagaaaagtcaacttgttgtgttacttgatcctgaaagacagtttttgcggaaagagggtgaatctccagttgctgatttcttgtggtattctgcggccagaccctgcagcagaaactgctttgaccgagcagaaatcgctcgggtaatgaatgcggctggtaggagacgagatgcccttccccaagtatgttttctatgatttcgtttatgagactgactctctgtttgattgttacttactgtatctggcgttcttatgcttacagtaaaaatgaactctaaacctgatctccattattagtattagtacagttgtactttattcagcactcagtttattctgccctattttttttgctgtttagagttgactgtggagttgagttttactttcttttgctcactttgcttttatgtcttagtatgctgatagatttttttccattgttccaggacattcaaaaaggattagaccttggtctggtgtcacctgagattctgcagaatttctttgatttggagcaatatcctcttatttcagagcttacacaacggttccaggtatatccattccggaagatattcctctagtgaatctttttcttcgaatatgcttttcactaaataatgtgttatagccttcatatccttccactgtacattaacttttcctgtatttatcttctctagccagagttaatgatagcttcaactagtaagtaaaccatacttatgatgatcttttgtgttacagggattccgagaaaggttgttggcagatcccaaattcttgaatagattagctattgaagaagctatatcaataacaacaacacttgtagctcaatatgagaagcggaaagaaaatttctttgaagaactcgactatgtgatcactgatagcgtaagagcatcagttgttgattttttcacagtttggctccctgcaccaaccttgtcttttatctcatatgctgatgagacaattgggccaaacagcatagatgccttaagaggcctcctagggtccatacctgacaatgcatttcaaaaaagtctaggtggacaagagtggactctgagtcttaggattgcttcagttattatcggtggcttgaagcttgctggtgttggagttgtttccagttttgcagctgtgggatcttcaaatgctttgtatgcaatacgaaaattcattaaaccagagttgggtgttggtgagcaagcaaagaggtctcctatgctgaagacggcccttgtgtatggaggttatctgggaacatcttcgaatatccgttatcaggtatggtgatgcgcggtgctttacatgttgactcaatgaatgagggatattaatgaaaagtagttaaagttgcttaatgaccacagcaatatattatgcttttgcatcttagccaaggaaggccttttgatgaagaacagtatgctttgaatttatgcctctaaaatcatattactttcaattgcagataattgctgggttaatagagcatcgcatttctgacgagctttcttctcaacctctacttgtaaacatgatttcatttgttgttcgagtagctaactcctactttggaactcaggtcagaattaggcctgtactatgatctcttcttgaattctttgtctcctttttccttattattatttttggttaattcttgatataccgtttaacttcattccaacttttttcataaaaacgcagcaatggattgatcttgcgcgctctacgggtctgcaaactcagaaaagtgtcacaacttccaaccaaatccccgaggttgcgagccaatccacagtggaatacagtacaactgaagaggcaagtatggatgatcttaagaatcaatgagatttatgcggctatgtgactaggtaccaattgtatatgtttataaaagcttttgatcgtattggagggaaagatatattcatttgagttgtatttttgtatcttagcttacgggaaacaatgattcgtgaataaaatttcttcaattagtcatgttggtttgccatatttgcacatggtggtggatgcacgagttttttttttctcttattgcccttcccaaatatgacatcatttatcatgtactgtacagtcatgaattgcttatagttgtagcttatcaattcgaaaattgttgagaataatgggaaatggtttcagatggcatacataagggtttttttgtttttgttttaacaagatcgtttttaatgacaactaacgatattttgtcttcatcgtatcaaactgtgctcaggcatcaaataaattccatgcatgggtgtgattcgctaccatcacttttcactttctctgccagactgacacaacaatctttttgtcatataaaacacaagcttgtcaaagccacagcgagaaccaaaaaactgttgagtaactgagtattgcgcggccatacaaacacccaaggaggaacttcttatgttatcctaattggttatttgtgctccaacaatggatagtttccttacttttggacttcggtgtttgtatggaccacctacaattgtgatttatttaacaaagagaattgtaaaaaaaaaattgttgccttattcttaattattctcccaacttattttttcttctccttttaaattaaatcatttttatttatttattgaaaagttaattacagataagagtaagtgtttgagagttgactcctttgtccttcctctttaggattctcctctgggctctggtaaggtattagaaagatcaaaactttttggattccctgaaattgggtgaaag

SEQ ID NO: 13709 - DNA, 3000 bp, Unknown
  misc_feature (1)..( 3000): cDNA_ID_2703856_gDNA_ID_2214645_Annot_ID_188491 3000 nt of promoter + ATG
aatctacactatcaataatgtgttcttgttttgcttcgtctagccaatttatttggcataaacacttggtgttttaatttggtttttctaaaattctactgttgctttatctaaaactctacttgagttttgttttgtttggtgtttgcgtttgctttttggagtgttttcttttgaacttttgctcaagtgattgattgctttttggagtgtttatcatcgagtcgttagttatgtagccactattaattagtcgtttgaaaagtagatgaaaattaagacttgaggaaatcaaacacaatccataatttgaattcaccccgaagataatgatcagctgctattgtaatcgtcaggcttcaagtgtatataatttatatttgtatataattcataattcgtatttatttatttatgtataattatttgaacacactccataattcgtattcgtatttatgtatatacaaacacactccataattcgtatttatttatgtatcaaacatataattagtaaactaaataaagacgaagaaacattattgagtagaatagaggcatcgaataacaatattcgtcggcctaatcaagaatatttcttggaaattcgggttgaaatccacatatggaagaatcttgaatagcacgtactttatcaatttaattacatccctcttaacggtctagctactctaattatcatctaaacctttttccttgtacgttatctcataatttgcaggactcttaatcattatcacatttcaaattttcaatattttactaaagagacgtctcgtgttcgtgcgtagctctatattttctggtttacgtaaaatagttcatgattttgtttagcttaccttttgaaaaaaataagcgaatctttcttcctttacttttcttccactcattaaaatgttctctctatatataaatgataaatctagtcttctaatcatatactctctataccacacatatctagaacaacaactagatattcaatattagctctaatggcttcttgtgacacacctgatgcgtttgcttggcttcaaactcttcctcctctttctctatggaaaggaaatttaatgtccatgtgtatttgctctccaaattcatcacacccatctttgaacttcactcttactcgtacccctcaatctccaaactttttcaccttctcgatagtagccaatttcaagactcctattactctctttatttcaaaaactttcagaaccattagcactaattcaactactttcctcaatgaaaacgtcatatctactctattgatgggttttgtcgacgttgttctcaactataacgtcaagagaaccacttgttcaatccaactccaaaacctaggctccacttctaacctcaaagacgttttcaacctcgctttcttcactttcgtgttcctcatctgcatctacgaggcgccaacgagcctgagaacaacttgtctcaaaacggtgaaagatcagctggtaacttgtaggtcaaggcagggctctaagttgctcatggtgcaactaggctctaaccttgaagaacaatggatgagatcgctgaaccttgcaataaccaactggatcatcgagatcaaagcgtttcagcatctcaagtctccttctcctttgttttcatatgctttctcgactcaaggtctatggaaagttcatatgtattgtcctgtggtagcaatggaaatggagagcgtaaatagttctctaaacgacgagagattgttcttctcgctaaactatcatcaacttgaaggtgtaatccaattgaaccacaggatttacgttcgtgaaaagtggtttaacgtcgcagtaaatattgacaacgtcaggtatcgtaaaattgtgtgtaatcaagcatacataagtaatttgttcatattaatttctcttaactatagatattgtttataactaggtgcgacataataaggcttgtgaacgagaaactattatcggaacgtggcatgggaacagaggaaaaacatttcccctcaagaatatcattgcaactaacaccaacgaatcaatcaaacatcttaatggtatccgtacaaaaatcttcagaaaacccattgacagaattcgaagtagagaaaggcatagaagcaacaatagatccaccaaacacattctttggactaaaagtctcagccaacgagaccacaacaaaaagcatgaagccatggaagttcgaggaatgggttcatggttatagcgccaatctcacttggtttctccatgatcttgacgatggaagagaagtttcgtcctctaaaccatcgaaagtctcgatgatgaaccctcgagcttggttcaagaaccggtactcgagcgcgtttagaccgttcacgaagcaaggaggagttgtgtttgcaggagatagttatgggcaaagcgttttgtggaaagttgataaaacggctattgggaaagtaatggagtttgaggttaaaggttgcgtttggttgacttattggcctaacaagcatcatactttttatagtgatactagaaagttggaatttaaggagatgctttacctcaatcttccttagatatttcttttcttactttcaccctaagcaaaatattcccctagtttgttgcttttttcagtaaagtttgtaaaataatacttatgatggaattattgaatttagaaaatacagtattgtgcttttctaatgacttcaccgacataaagaaaaaaagttttgtatatatgaatatcaaagtcgtatatagtccatagtttttttccgttgttgttatccataaatttatttttcaacattattatacgtataatttggtggatctaacataaataaaatcatgtagtagaagtttttttttatttttgaaaattggagaaccacacaagagatggcaataaaataaaatgaaaagtctctatttgtagatctagagcaatgcaaaaagctgacgtgtacca

SEQ ID NO: 13710 - DNA, 3000 bp, Unknown
  misc_feature (1)..( 3000): cDNA_ID_3031486_gDNA_ID_2214645_Annot_ID_188490 3000 nt of promoter + ATG
atttacatctaccacgtatgttgttaaactacatgttgtttgtttaatccttaatactttggtcaaactataatcttcactggtttagtctaaatctaactcaaacatatggtgatgaaggcaaagagtatcaaattgatttaaggtaaatgagatcttacaatacttgagaaggatcagctccaaattttctaaattgtgacgaaattgaagaatacaacacaacaatgcatctttagatctaacacttacagatcttcatcgaatctatactcaaaacataactaaaaaccctgagaatccaggtttcgtttgttctctaggatcagaatcatcaaattcgagcttctcaaactcgtcctgcaacaacagaagcagcagcagaagtagcagcagaattaccaatgaacgagagtaaaccagcattagcaggctcttgttcatccaagaacaaatcatcaggaaccctaaacgcaccatgtaagcaaacaatcgcgattccaatcgttaacgccgatgttaacaaagatccaacactcgtcataaacacaaccacaatcgtagtcaaaacaagaccaagcaaagtctcacgatctgagaaactacgaccaaagagaaccaaaggctgatctgaagatcggaagaggtagagaaacatccaggagcctaagagagagaggaggacgagaagcgagaatggatgcgagaggagggagaaagcaaggactaacgagacaattgcggagtaattgactttgaagtaagcgagattcttacggatccgggagaaggaatcggtgagagagtcaggtctagcgaaggagctccgatctacgagttctagccatggacggcgttgagagaggctttcgcggagagaggacgagaggcgtgagaggaaagtacggaaggcgtgagaattgattggaggttgagattgagtggctgcttgctggttggtgacgggaagaatcgccggagaagaagacattattggtggtgtcggtgagtctgtgcgcggcggagagagtgtgaatttgttgttccgattttagtggaaactgaagttgcggcaaaaccgtgttagatattctaaaggcctaaattttatgggcctataatgttttggaataggcccaatatattaagttggagttaatagcaatttttagatgggtctataatgttggaagaggcccaatatattccactattggttcataaaaccattttttttttttcaacaaacaaacaatcttactggttcagtggtttgtatctatatgatgttacaaggataacacaacacaaactagtaaattagtgtagttaataatattctaattttatttgcagataaattacgacttcctacaattgtttatatgatcatttcaataattatcatctcatttcccaccctatgagtgttctcgttgaacaaatgaaacaatcatatgatcaattgatcatgaatgataaaggtttactaaatatatctataaactgtgaaattaaattatatacaaattatgtacacttgaagctaaacaaattatgaattatatacaaatacaaattatatacataaataaatatgaattatgagttatatatgaattatggtgtcttgagacaccaggaacttggggcaaagacaactggagggaactcgagagcatttttaaagacgcctatgcaaccggtggtggagactacatgaagaagggggtgcaagcgataaaagatgagtttgacatgattgggacaatcaaaatgagataatgaaaacaaatggaggtttgcggaacttgttcatgttgagatgaccgagataaatgaggttgacgagaataacaagaaggtaaaggtaacatgtagttactttctcaaattcgtggatggaaacaataagatattctcactcagcctaggcaatgttgaactcaaacgttgcactatcaattagtgaactccaaatctacactatcaataatgtgttcttgttttgcttcgtctagccaatttatttggcataaacacttggtgttttaatttggtttttctaaaattctactgttgctttatctaaaactctacttgagttttgttttgtttggtgtttgcgtttgctttttggagtgttttcttttgaacttttgctcaagtgattgattgctttttggagtgtttatcatcgagtcgttagttatgtagccactattaattagtcgtttgaaaagtagatgaaaattaagacttgaggaaatcaaacacaatccataatttgaattcaccccgaagataatgatcagctgctattgtaatcgtcaggcttcaagtgtatataatttatatttgtatataattcataattcgtatttatttatttatgtataattatttgaacacactccataattcgtattcgtatttatgtatatacaaacacactccataattcgtatttatttatgtatcaaacatataattagtaaactaaataaagacgaagaaacattattgagtagaatagaggcatcgaataacaatattcgtcggcctaatcaagaatatttcttggaaattcgggttgaaatccacatatggaagaatcttgaatagcacgtactttatcaatttaattacatccctcttaacggtctagctactctaattatcatctaaacctttttccttgtacgttatctcataatttgcaggactcttaatcattatcacatttcaaattttcaatattttactaaagagacgtctcgtgttcgtgcgtagctctatattttctggtttacgtaaaatagttcatgattttgtttagcttaccttttgaaaaaaataagcgaatctttcttcctttacttttcttccactcattaaaatgttctctctatatataaatgataaatctagtcttctaatcatatactctctataccacacatatctagaacaacaactagatattcaatattagctcta

SEQ ID NO: 13711 - DNA, 3000 bp, Unknown
  misc_feature (1)..( 3000): cDNA_ID_2713996_gDNA_ID_2214645_Annot_ID_188488 3000 nt of promoter + ATG
agtgaagatattttgtgaggaaaaatatatatcttatgtactgaaaatatatatattaccagaaggtctcatgtgaaaacatctatacttctaattgtaaaactgaatgactagattataattttccagttgaaataatagaaattatttttaaagttaataggaaagtggtataattagagaacaacacacaaaatctagacaagtaaagcatgttgttgactatgaacataattgtagatgcggggtcaatgtcactttgctatatacaaaaaggtacggctaatttctaaacatgagattgtcattatcagagatttagcacatagagaggttaaagataccaaagaagaagacactaactaattccaccaaacataattactaatttcttgttcaccaatccatgtccccaatattcttctcatgtacttcttctttcttaacaacatgatgttaacattttttcccaactttattacctttcggatggttattgttaaagatatttacgtaacggattacatggtctctcctttccaaaagtattaacttaatcttttaggaaaaaaagttttagttaaaaaaagttcttccgtatatttacgtaaggggtacacagttttgacgtttcaatacatattggcaaaaaccaaaacataaaggaaacaatttacgacatataggtgtagaggtagctagattcggttaaagaaaattaaaggtgttattgttaagacaagaatataggggttgaaaaaagttgtgatttaggcggttagacgaatcatcttgtttacctcaactcatttttacttttttcaacactaacaaaacaatgatcatttttacttaagcttgaagccaatcttattgtaccaattttaaaccacagagttttcgttatgatgataataatattaatctttctacgcaatgatgttacagttgattcataagtttctttcatatacgggtttgtatgaagcatatggtatggaaagttgaccttacggtttttttttccttatattaaaagttgaccttatgttatgtctcatatttttatttgtattaagtatgaaaacaacattgagattttgcaaattcagatgggaggtggtcaaaagtgttacggacaagccacataaaccctaaaatggaccattcttcctcgtaaattagtgttacggacaagccacataaaccctaaaatggaccattcttcctcgtaaattggtttccttttctaagaaaaataatactagtaataattaaacataaagagaataatcgtttctggcttctttttttcgttcaatcaacatattatgcaagtttgtatttggacgatcacaaacacaagttgtcgttaacagactgcgaaatatattttttaagtctaacttatatattccaaaagtttctaaagatgaggaatctatttgcaaaaagaaaaaatcgttcacctgctattaacgccaaactcactgcagaacagtatatagtgttgatgtataggttttgacattttaattttgtgtaattcaaaacttaaaacaaaaaagttgattcagttactagaatatccactaaacttagacttatcatgaattgatcatgcattttgaggatagccatagcaaattgtttttttttgttagttaaccaaattgataaagacaagaagaaagaaaacatccaattctatatttttcatttcgtgacttgaagtttcagattttatttgatatgttggactttatctataaacttctcaacaaacataaccttaaactcgaccttaaatctaatatagtaaaatatttcatcgatttaatcagctggcagttatattaaatctatttaaataagtttttttaataaaacgaatgataaacattttgaaatgacaaaaaagagtaaaatacagttatgacttagacatgcgctcaattcgtctttctttaggtattatactgttgaatgtaggtgaccacatataaataaagaaatactactacgaaaattatattatacacgttttccttctttggtttttacgcataccaatgttttttaggggcatatgtctccagcccgactaaagttaacaacaaaataacaacggttgcatgcaaatgttacaaattcagcatcggtaaaattaggagggctaaagaccgtagaaaaacacagttcttataccaagaccgaacagtccaagcaggatcaagatccaattaataacgaaagcgactagcataattattgattagccattatcaaaacgatcttatctcaagccttatgtattaaatgtcaattaaagctgtccaatcttagagaattatagtgtccaatcttggggaatatttacatgttgtgcatccgtgcatgcaggtcaattacatgagcatttgatatttatttagatagagatcacacaacattgcgtacttaaattttgttggcaacccagtgtacacatctccagatactattttgatccatttaatggagggtccaaaacaaaatcttatattagtgtataatttatatgtactatgtttatggcaattatggaatattacatcaaaagtcaatagaaaaagcgtgttaaccaagaattcaagagacgtaatcacctttccaattttatttgttaactcggtgattttttttgtttttcttataggccccagtgggtgcaactactcttctagtgttgaaccaagttttggccttcaattaaatcaaaacctaatcctccaaccgcataattaaacaacattcatgaaaataacatatgcaaaacaaaacaataaaaataaactacacaaatatattcaccaagtttttgaaaatgtattgtatgtctctctatataaactccatctcttttcttgaaacttcccaacaaaacatttttctctctttttccacacttcatctaaaaccctccggctcgaacagaagcttacagaaatcacatcaatg

SEQ ID NO: 13712 - DNA, 3000 bp, Unknown; identical to SEQ ID NO: 13707
  misc_feature (1)..( 3000): cDNA_ID_3031490_gDNA_ID_2214645_Annot_ID_188487 3000 nt of promoter + ATG

SEQ ID NO: 13713 - DNA, 3000 bp, Unknown; identical to SEQ ID NO: 6144
  misc_feature (1)..( 3000): cDNA_ID_3079655_gDNA_ID_2214645_Annot_ID_188484 3000 nt of promoter + ATG

SEQ ID NO: 13714 - DNA, 3000 bp, Unknown; identical to SEQ ID NO: 6145
  misc_feature (1)..( 3000): cDNA_ID_1812409_gDNA_ID_2214645_Annot_ID_188482 3000 nt of promoter + ATG

SEQ ID NO: 13715 - DNA, 3000 bp, Unknown; identical to SEQ ID NO: 6143
  misc_feature (1)..( 3000): cDNA_ID_3031495_gDNA_ID_2214645_Annot_ID_188480 3000 nt of promoter + ATG

SEQ ID NO: 13716 - DNA, 3000 bp, Unknown; identical to SEQ ID NO: 13711
  misc_feature (1)..( 3000): cDNA_ID_2713996_gDNA_ID_2214645_Annot_ID_136352 3000 nt of promoter + ATG

SEQ ID NO: 13717 - DNA, 3000 bp, Unknown
  misc_feature (1)..( 3000): cDNA_ID_3031486_gDNA_ID_2214645_Annot_ID_136354 3000 nt of promoter + ATG
taaaaaccctgagaatccaggtttcgtttgttctctaggatcagaatcatcaaattcgagcttctcaaactcgtcctgcaacaacagaagcagcagcagaagtagcagcagaattaccaatgaacgagagtaaaccagcattagcaggctcttgttcatccaagaacaaatcatcaggaaccctaaacgcaccatgtaagcaaacaatcgcgattccaatcgttaacgccgatgttaacaaagatccaacactcgtcataaacacaaccacaatcgtagtcaaaacaagaccaagcaaagtctcacgatctgagaaactacgaccaaagagaaccaaaggctgatctgaagatcggaagaggtagagaaacatccaggagcctaagagagagaggaggacgagaagcgagaatggatgcgagaggagggagaaagcaaggactaacgagacaattgcggagtaattgactttgaagtaagcgagattcttacggatccgggagaaggaatcggtgagagagtcaggtctagcgaaggagctccgatctacgagttctagccatggacggcgttgagagaggctttcgcggagagaggacgagaggcgtgagaggaaagtacggaaggcgtgagaattgattggaggttgagattgagtggctgcttgctggttggtgacgggaagaatcgccggagaagaagacattattggtggtgtcggtgagtctgtgcgcggcggagagagtgtgaatttgttgttccgattttagtggaaactgaagttgcggcaaaaccgtgttagatattctaaaggcctaaattttatgggcctataatgttttggaataggcccaatatattaagttggagttaatagcaatttttagatgggtctataatgttggaagaggcccaatatattccactattggttcataaaaccattttttttttttcaacaaacaaacaatcttactggttcagtggtttgtatctatatgatgttacaaggataacacaacacaaactagtaaattagtgtagttaataatattctaattttatttgcagataaattacgacttcctacaattgtttatatgatcatttcaataattatcatctcatttcccaccctatgagtgttctcgttgaacaaatgaaacaatcatatgatcaattgatcatgaatgataaaggtttactaaatatatctataaactgtgaaattaaattatatacaaattatgtacacttgaagctaaacaaattatgaattatatacaaatacaaattatatacataaataaatatgaattatgagttatatatgaattatggtgtcttgagacaccaggaacttggggcaaagacaactggagggaactcgagagcatttttaaagacgcctatgcaaccggtggtggagactacatgaagaagggggtgcaagcgataaaagatgagtttgacatgattgggacaatcaaaatgagataatgaaaacaaatggaggtttgcggaacttgttcatgttgagatgaccgagataaatgaggttgacgagaataacaagaaggtaaaggtaacatgtagttactttctcaaattcgtggatggaaacaataagatattctcactcagcctaggcaatgttgaactcaaacgttgcactatcaattagtgaactccaaatctacactatcaataatgtgttcttgttttgcttcgtctagccaatttatttggcataaacacttggtgttttaatttggtttttctaaaattctactgttgctttatctaaaactctacttgagttttgttttgtttggtgtttgcgtttgctttttggagtgttttcttttgaacttttgctcaagtgattgattgctttttggagtgtttatcatcgagtcgttagttatgtagccactattaattagtcgtttgaaaagtagatgaaaattaagacttgaggaaatcaaacacaatccataatttgaattcaccccgaagataatgatcagctgctattgtaatcgtcaggcttcaagtgtatataatttatatttgtatataattcataattcgtatttatttatttatgtataattatttgaacacactccataattcgtattcgtatttatgtatatacaaacacactccataattcgtatttatttatgtatcaaacatataattagtaaactaaataaagacgaagaaacattattgagtagaatagaggcatcgaataacaatattcgtcggcctaatcaagaatatttcttggaaattcgggttgaaatccacatatggaagaatcttgaatagcacgtactttatcaatttaattacatccctcttaacggtctagctactctaattatcatctaaacctttttccttgtacgttatctcataatttgcaggactcttaatcattatcacatttcaaattttcaatattttactaaagagacgtctcgtgttcgtgcgtagctctatattttctggtttacgtaaaatagttcatgattttgtttagcttaccttttgaaaaaaataagcgaatctttcttcctttacttttcttccactcattaaaatgttctctctatatataaatgataaatctagtcttctaatcatatactctctataccacacatatctagaacaacaactagatattcaatattagctctaatggcttcttgtgacacacctgatgcgtttgcttggcttcaaactcttcctcctctttctctatggaaaggaaatttaatgtccatgtgtatttgctctccaaattcatcacacccatctttgaacttcactcttactcgtacccctcaatctccaaactttttcaccttctcgatagtagccaatttcaagactcctattactctctttatttcaaaaactttcagaaccattagcactaattcaactactttcctcaatgaaaacgtcatatctactctattg

SEQ ID NO: 13718 - DNA, 3000 bp, Unknown; identical to SEQ ID NO: 13709
  misc_feature (1)..( 3000): cDNA_ID_2703856_gDNA_ID_2214645_Annot_ID_136355 3000 nt of promoter + ATG

SEQ ID NO: 13719 - DNA, 3000 bp, Unknown
  misc_feature (1)..( 3000): cDNA_ID_2703905_gDNA_ID_2214646_Annot_ID_136361 3000 nt of promoter + ATG
tatactcccaaaaaccttcaagtgttcaactgttggtttatgaccactccacttttcgatcggtgtgacatcatcttctattgcctttgtagggaaaggattttgcagataatttgacatatataatgcctctatccatagcttgtgaggaagaccttggtcaacaagcaaggttcgtgccatctccatcaaggatcagttcatacgttttgtaacaccattttgctgcggtgagtatatggcacagttacttgtctctcgatcccttcttgatcacaaaactcattgaatccgcttgaagtaaattcaccaccaccatcagatcgaagccttttgatctttttacccgactgcgtctccaccaaggccttggacttcttaaacactgaaaaaacttcagacttttgtttaagaaagtatatccacgccatatgagtatagtcatctactaacaacaagaagtatatgcttccattaagagactctgtttgcattgggccacaaacattggtatgaacaatttcaagtttctcctttgtctttgtttgagactccgttggaaacgcttctcgtacttgctttccaagtttgcatactccacatatttctttgtttacatggaaatttggaaaaccatctaccatcttcttgttgtgcatttgttccatccttgaattccccacatggcctagtcttcgatgccataactccattccttcctcttcactagtcaccaactcactttcttgtgaagaattccatctgattggaaaacttttatttaccctctgtatttccatgatcttctttcccgtacgatccaagttggtgcaacacttgttctcaaacaaaacactatatccgacagatataatttgcggaacactgagcagattcttctctagtcccgacaccaaaaatacattccttatcactttctttctgaagcttgtgcagaccgtaatgtctcctttaccggcaatcataacgacttctctgtttccaactttgattggaaccttgatgcttttatcaagttttgagaagtatctctcttctctcgtcaatatgatttgtgcaaccactgaccacacatcttctttggtgattgtcgatgcatcttctgttgcactaaatagcatatgatcttcaatttcttcatcttcaacgctcatatgtgcccgttcatacttctttgaacgactctctcttgaaaatgtccaacctggccacagttttaactttcctttgaatctttgctgggatccgtctttggctttctccagcaattcgattccatgtggttttccttcttacaaaatccacaccattttttgcctttgttgtcacgccaattactcttcatttctcctcgtcgtacaacgacttttccttctcgtgataaaacatgcaatgctccttcggtcatgctttcattacgagacgacacacacttttcatgtgccttcagagttcctatcaactctgttaccggcaacgatgtcagatccttcgtttgctccattacagcactatgctgtcaaatctttcgggaagagaaataaggaccttctgaacaatttgataacctgtcttctcttctccatgaactcttaactgatttgccaaatcaattaacttgttagtgaaaaacttgatgatgtctccttcattcatctttaagttttcataatccctcctaaacgactgcaagttgatcaagcgtacttctggagaaccttcaaattatgactccaatgcattccaaacatcctttgatgtggctgctggtgctatccgaggaaaaatctgatccgtgacggcagtttgcaagagttgcagcgccatcaaatcctttgatgatgaatcctcccatttggttttcaattgaacggcttatgtactgtgatatcgttgcatcagcatacttcgaacactagactccaccactttccacaacttctgtgttcttaagatggtcttcatcttaatccgccagaaagaataattatccccatcgaatatgggaatcacttgatttattgttgcatccatgatctcaggtttttaatagaacttttgtctgaatttttcttgtctttgtactcggattggcccttgaatcaatagagctctgataccatgttagaaacttaagtctcaaaacagaaacaaagtaaaacagagagaaaatcaatcaataagtaacttgaatcaaaagaaacttctattttattcaatagaaaagacaaactgaacaacttgtgtttcagtaatacaacttatgtttaaatagacttcaatcgggtttgaaagttaagagatgcaactcttttttcttgtgtcccttaagacataactgcctaaacataacagacacgactctttaaccaaacacacactttgacttaacatacataattactagacatcctaaactcaattatcgatcaacaattatatcctaatagtgactgtggatgtcagatctcgtctgtttgccccgacccgagatccatcatcatcaatcaatgggctcgaagttctagacctggaaatgggcctgagtctgtcaatagcgaagtggggttcgagggcccattcgaggcccggcctgtgtgaaagtattttgagcgttacgtaacggagaatcaaggaaataaatgaggcgacgtgaatgcgcgaagtattgatacgaaacgtaagcattgatgaggcatgattcgcggcgtgattattgtattcatttacttcgcaattattaggtcttgttgtataaatagagcgagatcgaaatttgtaaaggggacagaaaaattaatatacaaaagaattccgattaactgaaatattatccgatttagtcttagctcgactaacaaggtttaaggtcctcgcaacatccacaaattcctaattgcggattccgacatccacaatttagcactagaaggagggcatttaaatcttttacttcagagcttcggttaaatcatcatg

SEQ ID NO: 13720 - DNA, 3000 bp, Unknown
  misc_feature (1)..( 3000): cDNA_ID_3031565_gDNA_ID_2214646_Annot_ID_188513 3000 nt of promoter + ATG
gcctgctcgattgttgtgacatcaacttcgtgaatttcccccgatgcgtacttggcagccaaaagtcttcccagagctttgcatgccttggtggcgtgaccattcattttgtgaatatcacaataagcgtttgggtctctgatccatttcttactcggaaatgccccgttgttgcccttcggagagaaaggcggtttagatggagaagcttttggagaggcctttggcgactcttttttaccgagaaagttccttctgcgggtttttggagttcggccgttttttttgaaatagggggaggagaagactttggtgtagcattaaaatttttagctagaagagctcgctcctctttagcagttatccagttcgttgctcgatggagagcatcttgaattgtttcgggtcagtttactgttaacgccttgcggaaacgcgattcatgccccaatccattttttaaggcggactgagcggctgagtcggatagattaggcacttggaccataatttccttgaacgcagtgatgtatgtctgaagtggctcgtcagactgagagaggttccaaagctgggcctcactgacgtcatttttgatgaagtatccatattgtttaatgaaagtggtggagagctgtttgaagtagtcgattgaaccttcttctacctaggtaaaccaggtgagagctggtcctgacaagttttctgaaaagagcttgcacagtccagcgtcttcttcatgcggctcgagaggtacccgtccggcaataacctgaaaagaggtcaagtgctccttaggatctcccttgtcgttgtagctcgggagcttaaaatctcggaagtcacgaatgcgaagtctcgagatccttggagtgaacagagtcctgcgggttgtttcgattactctatcaacctcgggggccgcggtggtaggtcgataaacctttgtattcatggcccaaatttggtctttgagaatctgaagctcattgctgacaacatcaggctcctaggggattctgaggtcgggtgcttgagagagggctcccctcgaaacaatgatggagtccgggcggcaactccatccacatgaatgtcgggatttgtcggggtagtcagaacaacctggttttggttcgaggtggttccaatttcgattggagagacgcgaggcaactgaggtggcggagtctgctgatttgcccccgcctgcgaagtttggatgcttggactaatgcctccttgaaaatcgaggcgtgctcgaactcagcggtgcgcgatactccggcggacagaaagtcaactcgatccgtgtatgcgttgtgagctgtcatgatttaagaatgactgtcggtgagcgctgcgagctgccgccgcactgctcctgaaaagaaacgaacttatcagataaagaagttattgcggtctgctgtcgctccgtcttgtcggagagctcctgaagcagcttcttgatatcgtcaagggtggaggcttggtcgtcggaactttggttgtcgtcagtgctcatgatgatttaaccgaagctctgaagtaaaagatttaaatgccctccttctagtgctaaattgtggatgtcggaatccgcaattaggaatttgtggatgttgcgaggaccttaaaccttgttagtcgagctaagactaaatcggataatatttcagttaatcggaattcttttgtatattaatttttctgtcccctttacaaatttcgatctcgctctatttatacaacaagacctaataattgcgaagtaaatgaatacaataatcacgccgcgaatcatgcctcatcaatgcttacgtttcgtatcaatacttcgcgcattcacgtcgcctcatttatttccttgattctccgttacgtaacgctcaaaatactttcacacaggccgggcctcgaatgggccctcgaaccccacttcgctattgacagactcaggcccatttccaggtctagaacttcgagcccattgattgatgatgatggatctcgggtcggggcaaacagacgagatctgacatccacagtcactattaggatataattgttgatcgataattgagtttaggatgtctagtaattatgtatgttaagtcaaagtgtgtgtttggttaaagagtcgtgtctgttatgtttaggcagttatgtcttaagggacacaagaaaaaagagttgcatctcttaactttcaaacccgattgaagtctatttaaacataagttgtattactgaaacacaagttgttcagtttgtcttttctattgaataaaatagaagtttcttttgattcaagttacttattgattgattttctctctgttttactttgtttctgttttgagacttaagtttctaacatggtatcagagctctattgattcaagggccaatccgagtacaaagacaagaaaaattcagacaaaagttctattaaaaacctgagatcatggatgcaacaataaatcaagtgattcccatattcgatggggataattattctttctggcggattaagatgaagaccatcttaagaacacagaagttgtggaaagtggtggagtctagtgttcgaagtatgctgatgcaacgatatcacagtacataagccgttcaattgaaaaccaaatgggaggattcatcatcaaaggatttgatggcgctgcaactcttgcaaactgccgtcacggatcagatttttcctcggatagcaccagcagccacatcaaaggatgtttggaatgcattggagtcataatttgaaggttctccagaagtacgcttgatcaacttgcagtcgtttaggagggattatgaaaacttaaagatgaatgaaggagacatcatcaagtttttcactaacaagttaattgatttggcaaatcagttaagagttcatggagaagagaagacaggttatcaaattgttcagaaggtccttatttctcttcccgaaagatttgacagcatagtgctgta

SEQ ID NO: 13721 - DNA, 3000 bp, Unknown
  misc_feature (1)..( 3000): cDNA_ID_3031520_gDNA_ID_2214646_Annot_ID_188505 3000 nt of promoter + ATG
aaaatttagatataaaaaatcgacctacggtatactgcggataaaatattcaaaattttaaaatccacaatacatcgttacttaaaaaaatatatgttttcgtatctatacttcaaaaattgaaacctaaacaatagtaatcatgtactaaataatacagagattgatatctacatttaaaaatacaaattaatatgatatatcttcaattactctttaaaaaaataacattatatttttgtaaaaaatatagccatgcggtacaccgcgggttaaattctagtatagaacaaaaaaaaattcatagaaattcaaacgaagagtttattgacgtgacttagctacctctcgacgaggttgaaaaacatttactaataaggaaatgaatggacttttgaagaagaaatatgaagcatgtgaaaattttagaaggtagggcacatattgcatagacaaaatcataagagtatggaaagagacaccctatgaaagaacaaaacaaataaaacgagtgtttgcaaaaagatagaaagagtgatagctctctggaaaaagttgtgaagacaaaattttttatacaattgaaaagaatgtgagaaaaatatgagttgttaaaaagaaagtgtaacacccaaaattaaaagaaaatataggatcagattttgggataaattgatcattttgaaactgtctgatttcaggaagatttcttagaaactcgaaagtctggacaaaatctgtaaacaaagaaaaatcagaggactaaagtgcaaaaacgtgaaaaaggagagaaattcgagtttatcttttccgaaactgaagggaagtttttggcaattcaaaaattgaattatcttttaagaccagtatcaacatgcgactctgatttagctagctctattgagcaatctgtggcggccggcatcgccaacagatgtattctgtattctgttagtctgttagtggtattgaggtcggttaatgccgtggattgtacttccttatcaccttgataggggccagcattcctatagagtatattatgtaaatattctgttagtatatggtttgggtcaaccaatgctggggttgtaccattccgacatgcattgctggaaatctggtcgttctgttctgatgttaatattctgttctgctgatattattctgttatgctgatttgataatataatttggatagtataagctctgatgtgtttactttatttcaaattaattaaattgaaatttatgtctattagtacatacacgtgaatattattctgtacgggatcagaccgtgttggtacttgttcgtcgggtttgtagtctcactgggcaattttttgctcatataagttgtgattccgtgcagaggacattgaggaggtggagcgtgcaactgaggtttaaagtttttagttcaatcgtaaagcgagacttgatagaattttcttgatttaaataattttgttttcgacatttggagtttttatgaatttttaaacattaaacattattgaattttagtatttttattacattagttttagtaatactttcaaaattctaccgaattttggggtgttacagaaagtatagataagcttatgaatttatttgtgtatagtatcttattttaagaaaagatatactaactaatccagtgaatataaacgaaaatcaatagtgaatttgttgataccaaaatgagagagtcgtcaaaattcttcctcgtacaataatttatttcatgagatccaatcaaaatatcttacgtaaaaagacgtgatcatccaaactatcaaaacgtttacaacatttatcataatataagcaaaaaaaaatgttcttttgatgttgtaaaacctaaaagttgtattagagttatttgtagttatttattaaaattgaattatctgctacggtaattttataactcaagaaatttaaattattaacaataagtagacatattaaaacttctatctcaaaatattcagtaaatatttttaatcacactaaagtttattaaaagttctaaaaatagacccacgcgtagcgtgagttcatgacctattataggaaaaacttatacattaaaaacaaataaaaaaaaaagaaaacatgtatttattactcattagtgtttttatactataccgcaggtaaaagcatgagtatcatttcgaaacgcggttcactatatttatctatctaaaaatttgcttttttctttttcttttttttcaaaaaacgcaaagtactgttatttatcttgattagtgataaagtgccgtttttcaataaaaaaatttaaattccaccaattaaatgctaccaatcaatacattaatcattccttgttccaaggtatttatgaattatttgagactactaatttaaagtttcactctcgtaattgtaacaaattctagggaaaaaaaccccattcaagattcactagaaaatttcatcaatcttttcaaacacgacaatgtaattaggcttaattaccaatcaactcatcaaatatgaagggaatttaagactaattactaatcaatcatcaatttttagttttctgatataggaaaggagggctaagaagagtagacacgtggacagtggtgattataagaatgaatcaacggctgagatgaagttatcaaagatggttgggtttaaaggaagctgaagatcagaattggatttttttatttttttttattttagtcgtgaataattgttgaagttagttgttcttccctctttgaggtttctaggttttgagtaatatgattcatcctctgtgaagaacattgctcttgcaaggtggatctagtgattcccctgttttatgaacattggatcacattgttatctttttcatattaatcggaagtgtttttgggttgtttgatcgattgttgtggttgattaacagatcgtgatttgtctttatcaaaggtatcagagcttcgtttttcctcggaatca

SEQ ID NO: 13722 - DNA, 3000 bp, Unknown; identical to SEQ ID NO: 13720
  misc_feature (1)..( 3000): cDNA_ID_2703901_gDNA_ID_2214646_Annot_ID_136362 3000 nt of promoter + ATG

SEQ ID NO: 13723 - DNA, 3000 bp, Unknown
  misc_feature (1)..( 3000): cDNA_ID_2703949_gDNA_ID_2214647_Annot_ID_136365 3000 nt of promoter + ATG
ttcggggaatctgtttcgtggtttcttggaaaatggtatacccgttgttataaaaaagatcgatgtgcgggaaggtaaaagtgaaggctatatatcagaactggagttgtttagtaaggctggacaccagaggctggttccctttttgggacactgcttggagaatgagagccaaaagttcttggtatacaagtttatgagacacggtgatttggctagctctttgttcaggaaatccgaaaacgaaggtgatggattgaagtctttggattggataacaaggttgaaaattgctcttggtgcagctgagggactctcttatttgcatcatgagtgttcaccgcctctagttcataggtactactctcctgctcagcttctcgtaatataatcttgatattttttaaagcattgacatagcaagactattggaagttgttttgttgattctgtttttagtatcatataacctttcatgttcataattagtaagatctattcaagaattgttagtgtatagtttcatagatggagaagcccaatgacatcacctgctcctaaattacttcttgttgatctatgctctattgcctgataagaagaaaagcgagagaactcatgtgtgtgtttgtgttcaatgttaaatagggatgtacaagcaagtagcatacttcttgatgataaatttgaggtacgtcttggaagcctaagcgaggcatatgctcaaggtgatgcttatcaaagcagaatttctcgtttacttcgattaccgcagtaagtgcttattacattaacaaactctctggtccttttctgttttactttgattccctaacatgactctgtatgttgtcttggcacctactaatgcttcgctgtctcttcttttcctattcttgcagatcgagtgaaccatcttcttcaggtatacacttaggagaataaaaatttcatcaggatataccatctccgattaaccgatagacatctgattggtttattcttttcaggtgtaacaaatgcaatatgttcgtatgatgtctactgctttggcaaagtgttacttgagctagtaacggggaagctcgggattagctcgccagacaacgcacttgcaaaagagtacatggaagaagctttgccatacatcagcacaaacgagaaagaactagtaaccaagatcttagacccgtcattaatggtggacgaagaccttctagaagaagtatgggcaatggctatcattgcaaagtcatgcctaaacccaaaaccaacaagaagaccattaatgagacacattgtgaacgcacttgagaacccactgaaagtagtaagagaagataccaactcgggttcaggctcttcccggttaagaacaaactcgtcgagagggtcttggaacgctgctatatttgggagctggaggcagagtgcgtcggatgtaacagctgttcaagcgggagcaacaacaagcggtggtggtggtggtggtggtggtaatggtttgagaaactcggggtcgcaaggaagtagcggaaggaacaataacaacaacgggaattcatcgtcgtcgagaagacggcaatctagtgagattgtaccggaacctgctgcttatggagtagtagaggataatttatgattcgtttcatcgattcttttgtgtcgataataacagaggcaaagagagtcctcaaaggtagcataatgttagatgggaggaggatttgttttttctttcttttgttttgtttttgggtttaggattggtgggagttagaaatgttagttcactctttgtttttgttttttggttcaaacgtggattttgtaaattgtaaaattcttggagattgggttttgttttcggtttctttcttattgaaagaccagaaaacaaaacaaaacaaaaaagttgggttacatttgtttcagttccaccattacttattattcttgtatctgatttcgtacgtgtgaattttgttgactatttcatttgcacgtggcaagcttttgatatgtatttggacaaaaagtgaaaggaaagatacttcttccttttgttggatctgatttcgtacgtgtgaatattgttgactagttcattcgcacgtgggaagcttttgattcatattgggacaaaaagtaaaaataaaggttctaccgagaattgaactcgggttactggattcagagtccaatgtcctaaccgctagaccatagaaccattatgtttagagacgtaaacttataatatatatacgtatgaaccaaaatgttgaagttgtaggatttttggtctgagttacctgtaattatatttaattatttcatacactgaacttaatttgaaaattacaacattacaaacaaaaattgaaattctaatgagttacttttgccaaatctatcatggttagaaacttagaatgattaaatagctaaactatatcccaatatataagatgttcttatgtattttatttttgtccattatattaaaacttaaaataaattttcatattttctaatcatttctgttatatgcaatatttgccacgattggttgaattgttttaaataaataaataatattttgtaaagaacataagtttcttaatatatgtgatttaactaaaacatcttataagaaattggacagcggaatattattttcttgggttatttttgccaattctcattgatttaataagttggttgttaattggctatttgacagattattccataccaaacaaaatttgaaagaaatctccaaaaatatgattaatactgtaaacaatggggaaacccatgcaaagaagtcagcaagtgggttgtagtaaaatcagcacatgtgattatgagctttgggattctgcataaacttctgttcactaaccaattaattatactatattactcccaacccttacactaacttattactcttttacatttcaaatctcacttcctccacattcctctgtcttcatg

SEQ ID NO: 13724 - DNA, 3000 bp, Unknown
  misc_feature (1)..( 3000): cDNA_ID_2703965_gDNA_ID_2214647_Annot_ID_136374 3000 nt of promoter + ATG
atatagtattatttatacataatgtaatactctaataatcgataagtttaatatcatgatttgttttccttattactaaagtatgattgcttatcttgcctagttgataactaatgtgatataacatcaatataattattcgtatatttttaaacattaaattaagtttagaaatgtatttcctgataaattattgtttaccgaaatactcttaatactttaaacttctctaactctatcatactcaacataagtaaatggaaaatcatgctggataataggtttagatcgtgctacaaaagtatatttttaaacattaagtgaaaaagaagtttaaatgaattggttttactttgccagattaatctgctaacttgctgtccgcaataagtcaatcacttcagtttgcaatccgtgatgggccaacctgcttggcctgctatttcgtggacataaatattaatgtctaaacccaccccactacagtactatttggactaagcccgtttgacacctttactaattataaccactagtgagtagttatataagattatcttcaatagtagtttcttagaatagttataagagaaataggtataaaatttaatgtttaattcatataattggtaagagatgactcttatataagagtctaaatacatcttaagagccagacacgtgttgtgatataagtgggagaatgagaaatatttgcaaaattctgtaattatgtactactaatcgttttatgtatgtttatgtcatgtatgtttaaactttgatatcatgtatgtttcaaattttatgaattgcaataattattaaaatttttaaaaatcaaatgtttatatattttttaaaaacctcaacttaagagcttacgattggacattgccaaacatttaaacttttatccaaacttttaacttcaaaactttcaaatcaattataaaaatattgctaagaatctttgctaagaattcaccattatagattctctaacaaatcttggcataatcattattattaaaaaaaactttttgtagagttcttgttttttcctttataatttacttttctttctctttttctttttttttggcagaatttaacaattttttaataaaaatttaaaaatatagcactatatatgtatcagttaactaacataaaagataaattaaatgaccaatggaggaggtgacggctccgacgatggtggctccaacgatggtggtaagttcggcaacagtgtgaatctagtgaggacatgcggtggatccggcgagtggttctcgcgaggatggtggcttggaggacggcgatggtggtgaggacactggtagctccggcgagggcagtggttccaatgaagatggtggcttggagttggaggactgcggtagtggtgatgaagatgacggcggtagtggtggttccgccgatagcgaaactgtggtggtgatggttgttgtggtggtggttaatggtgatagtagggaggataaaattgtcatattatatattatacatcaactctaatataaactttattgtataggttagtttcctcatcatttgctattgcaagttatttctctctctaaagatttgatgtaatttaatgcttacttagccattttgcacgacgcaaataaactaataccgcaaaattcgtgattacgcaaataacattatctaaatggccaaaaataactcatcccatctcttcttttttttttttttttggtctaaaactcattcaatctcttctacacttgcattttctaattactgaacaataaactgcttcatacaacataattttaaatatgtttcgtttgagataaattgttcgacattactaaagattttggctgatcaaaaaatttatcaacctttaccacgattcaattgcctagtcataggcacgaagactcttgttttcgtttacaagcatttgaatgctaaaagtacatagccgtctttggagacatgatctaataaaaaaagatctacgttgacgtatagaaaacacattgattaaagaaagatatctcttaaactttatgggcaagaagaagatatttttataacctgatagacacacatggcaaaattaaaaatatctagatatatgtacagttaatgttcttgatattattgtgcccatttgcattagacatggcacaaaaatgaacacgtcatttttcaactaaaataacttttcaacttattaaaaaattcgaagataactataattcgtcgatgcctatacgaaatacgaggttctttttaacaccttctttggacaatagatattgagatttacatcttctgctctttccgacaaaagcccatctcttctgtcttattttcttctgaaggttctgttttttttttttttttttttttttttctcatccaaataagtacttgagagaattataagaaaattcgtacttcgtttctttggacagtgtacctccacgtattcgtctctggtaataatctccatcacaaatctcttttttttttcttttgtgtgactcttgtttctggtggtacagtttgctcatcgattgaatcgatttgtatttcttccacacaagaaaaatggatttgtacttgtttctggattttatatatctggtgtaattgtaagtataaatttgtggaattagcttcttttttttttttttttttttggagaatttactgaaaaagaatgtgatcctagtttatcaaaaaaagaataagaatgtgatcctcctcacatttgtttgatgaaactttttgtgttctttaggtttaattctgaggttgtgtgaaatttggtgaagagaattttgagatcatagtaattatccacttgcttgatgctcatgagctctagtttagtattgtgtttgttttgaattatgattgagataaaggatatttacttctcaggtgatttaatcaaagcctctggagaagatctgtaggtacgtacaa

SEQ ID NO: 13725 - DNA, 3000 bp, Unknown
  misc_feature (1)..( 3000): cDNA_ID_2703938_gDNA_ID_2214647_Annot_ID_136376 3000 nt of promoter + ATG
cagggtaattgtcattatcgatcttgagaaggcgctgaagcagctctctcgcggatttgttgaagttcttaagcccctagtaattgaaaaatgacacatcgttttaaacattttttcatatttatacattttcgaaagaagaattgaggtagaaaaatgtgacaaaccactccttggacatcaaaaatggttgtgctttggtcaatgtgcttcttggctgcggcagagcaagaagggaacttgatcttaaacatcttctcgaactctttcacatggtatttctcataccggtccattgtagtcgcttgtaacagcttgtttgcatcgatttgacctaatctctcaatgtaaaccggcctgccttctttgtccactccatggtaaccttgcggataatgtttgagtacttgatcgatctcttcaaactcgaaatccttcattattaaaaaaattataaaccaaacaaatcactcgtcaaagattgtgtatatataaatgatcagtctaagatgttccaagattcttggacaaaaagttaacctcaatgattgtatcgactccgaaatccatcctccattgaagcatgtcactccacatttgctttgctttctctttgtcaaattttctcgcccttaagaatctatgtagagattaaacataataaatcataatattacaatcgcaataatcatctacaacaagtaacatttagctgtaaactcatcatgaattatggatttatatgaaagtgtaaaacatttattgattcgcttgtaagagatgaacaatttttttttttaagatatgaagatttaatgaaatgttataatgttaagacaaccaaatttttggtcatctattaaaccagctcctcatcaaataaaatattcgtttggattggtataatttttccattagttgacttcatgatattttatttcataccacaacacatcatttgacctagtagggatcttaaagaaaaatataaaaacctgagcatcatgtgaagatcatcgtgtttggggggcaaaaggtcgtcaaggacgaggacttgacggaacgcttccacggacagataatcgtccccgttgatgtcgtctgtattggctacggacacaattttgctgctggtcctccgagtcttcttcttgaaagagttcttgaatctatttgatgcgcttatcgctttctgtttaagcgagctcatcttcactagcttccttccatcctctgaattctccatatctaaaccacacatgattggtttacattaacattttaggcaagaggaaaaattgtatcaatggctagttaaggtaaatgcattgacttataaccttgtttggtgtcagccatggtttagacttttgatgaaacacctaaaagatgattaagattgtttaagaaataagattgaggaaaagagaagcaaaaccagtgtttttttttccttaccttattggagatgagttcttgagaggaaggaagggtgaaagatggtaatggtgaggatcatctgaaactaattaagacatgtagaaaagtacttgaatgtcattttaacaagctattgataaggtccaaaggtggttttgttcttttttttgttttttacaattggtttgttcttaatatatggaaatggacatgtgtgtgatataatattgaaatatatcaaaatcgattcgtatctgtaccaataaatgctataattaatagaaaagagtatgacgccaatttggactaagtgcagcccaccactttacagatgaaaacatagtttacatgaccaaattatcatcttaatcactttacagatgaaaacatattttacatgaccaaattatcatcataagaaaacatattacacaatggttttacatgacgaaattatcatcagttcggtttggatcgatttcttttgattctggataattagtttaaaagattgaggatcaatggttttacatgaccaaattatcatcagttcggtttggatcggtttcttttgattctggataattagttcaaaagattgaagatctatttaggtattttagaattttggtttatattatgttcggtgccttttcggttcgtgtcaatttagatttgaactagacttcccaatttaactaaattttaatataataaccaaatatttcgattttaaaattaataaccgaattaaccaaaaactacaccgataatttaatcggttattttttgtaaaaatttcagtttctgaaatacttgagaaaccaaacttacctatcccgaaaaagcggaataccccataatcacatgcctagtctgtaatttctctccgaaaacttgtcatttacttaaatcattcaaaaatctactattattttgaaaagagggaatagtaacatataaatatgagaaagtccatattaattagtaagttcaacatacataattaaagaaatctatgttcaaaacaaaaaagattgaaataactattggtctatctaaaaccatggttcgcacttcgcagtagtggatagtgtccggatagtggtcttacctttaaaacccgacccttactttcgatcttctattttagtttgatagagacacgtccgtctactttaagcgttttacgaatcggcgtttccctcttttctcccccgcttatcttctcttcctgtccttttcaactccgtgactaaaaaaaaaaaaaaagtaacctttacctacttttcttctgggttttcgataatctcttttgggtatttgcaaacccctcaaagattcttcctttctcctttaaatcggtcagtactgatctcttctccatacccttttgctatttgtttcaaatttcgattctttgattgttttggatagtttaattcatatgaatctgactcttgtgtttgattttcacagtctctgctttggctttgtactagccatcgcaattcatcatcatctattgcaagtatctccaaggttttgatttccacaatg

SEQ ID NO: 13726 - DNA, 1 bp, Unknown
  misc_feature (1)..( 1): cDNA_ID_3031588_gDNA_ID_2214647_Annot_ID_188558 3000 nt of promoter + ATG
g

SEQ ID NO: 13727 - DNA, 3000 bp, Unknown
  misc_feature (1)..( 3000): cDNA_ID_3031611_gDNA_ID_2214647_Annot_ID_188550 3000 nt of promoter + ATG
ttatacccattaaattttttatgagttaatgggtataagttgacttaataaaaatgagtcagttaatgcaaagtttggtacccctctgttttatattagtttttgtttaagaagttaaattatgttttatattagttgtcgtttttggtttccaacacaaatgtttgacatatttttctaattttatccctatttttaaccttatttactgatgatatcaagtaaaacaatacatttattaggggtaaaacaaaaaaaaattgaataattttttaatactcgtgaaaaaccttaaacgacaattaattttaaatggagggatataattaccaatctaaatgacttaattgtgttttaaatgcagttaattttgtttcaatgtaagaatttttttagaaaggttaaaggttccataaatgtgtgaaacgttttgattgtatgagtgagttgaatgagttcattgtatagttaagatgattaaaattaaaaagattttcttaaaaaataaataaaacattctacatcattctaattatttagaggtgtttgcttgttggaagaaactctatatagcagtaacaaactatacttcagttagtttcttataatcatcaaagttacagaacatcaacatcagacatgttaccattgttctgccaagaaagtcaagtccctatggtttcaaaatgcatctagagaatttgttcggaatgcctttacaaaggtaatcttttttgattctaccttttaaatttgtaatgactattttactcttatttgaaaaaaaaataaggttatcaaaataaaataatgattattcccgccaaaaatattccaacgataattttttggccaaaaaatccgacaaaaaatttctcgccaaattgtttttttcaaaatatcattttccccaaaaaaaatagttttggtgggaaatagatttacaaggattttaaaaagagttttaagggacttacaagggtttcaaaggattttaaaacatttgtaattccttttcaaactcttttaaaactcattaagaactcttgtaaatctttaaaaaaaccttttataagtcttcacaagagttttaaaatggttcaaaaagatttataaatattttaatatttacaaatatattttttaagagttgaaaaataatttacaaatggttttaaagactttataatagttttagaaggatttacaactattaaaaaacttttgtaaatcattttaaaaccttttacaatggtttttaaaaggatttacaactatttaaaaacttttgtaaatcatttttaaaccttttacaaagatttttaaatatgtacaaggatttgaaaataatgacaaagactttataaggattttaagaggttttaaaataatttacaagtattttaaaaaaatttaaaaagactttgaaaggctttaaaaaatttacaaagatttttaagagtttaaaaaggatttataaggatttttagatacaaaagtttggtggaaaatcttttgacggatgaccatgcgagaaaatttcagtttcttattacatgttatcattagataaataataatttaatcatcttgttcataaaaagaggtttaaaaataggttatggaaaaagatatttttggaaaaaggtattaaaaagggtatttttacaaatacccatgcatctatctatatttacatttttgaagtacaaatatgaaataaatcattgaaatgagacttatttacaagggaatggcattttcataaatatttctatattaactaatatttaaaattattttcgaaaaaatattttataaaccatgacttccaaagatagtaacaaattgattgtttctaaatttgattaattactaattttctaaaacctttttatctaatttaaacattaatttatgattcttttttcacttatacattctcttatatttaatttattttgaatataagtaaaatatatataattaagaaaataatagatttttttcctccttatgacgtggttcagttttttttaaaaacaaacatagattactcaattgatgataaaaaatatgtgtacaatgtcccacattgctttaacaattagacaatgattgtcatttaccgagattgattgaccgagacaataattagacaattagacaatgtgtacaatgtcccacattgcttgaccgagcagagcgcggactatttacacttttataataatcaaactcaaattaaattataaatttatcgaatgataatttttacacgttttaggttccagtgtaacagtataagagcatctcaaactcacttctatttttgcttctatactatattttagagtaaattttactccaacgcacttctattctcacctctaaatagagatctctatttttatctctatatatagaagatctatattttttttactatatctagagtcaaactttattatttgtaaaatggtcctttaactttatttttcttttatatctgatttaaataaataaactaataatttggactgattttagaggttttagtttaaatatctattctaatatttgaggccattattattattatttttatttttgtttatatgtgtaattcaaaaagataaataactaatatataaatgtgtaatagactaatgcatttacttataatcaaatggatggcaaaaagatgacatcctaaaaagagaatttacataaaatagagggttttattgtaagtaactcgctatctttcggttatcttcggtttgtaatttttcatgatcttcttcgacttgtagatttaagttttgaattcgttcaccagaattcagaacttgatactgatcaattgaattttcactcatcaatttgcaacgatttgatctacggaggcttgacgaggtggattggagccagaggaagggcggatcatctcgaagtagaagatctcgattttggatcgctcggaaaactgatcaaatg

SEQ ID NO: 13728 - DNA, 3000 bp, Unknown
  misc_feature (1)..( 3000): cDNA_ID_1381022_gDNA_ID_2214647_Annot_ID_188548 3000 nt of promoter + ATG
gaatctcaacttcaacgtaagtagggcactaataaaaacttaacatttacaattctcttatttcccaagcaaatatcttcggcgtcatgttcatattggattaataataataagaagaagggttggttggtcgtcgtatattatgaagacactcttccctatccactgactctatctgtccattgtccaggtctctctctctctttctccttctgccatctctgtcccaattcagacttctttctcttcgctacccatcatttcacgttcttcacttatccaccccaatttactatttttattttcttttcaagtttttattctcatattttgaagtgtaaatttaaataaaatgcttacctatgttttcccacaaaattaactcttgtgtatttcgtaattttttttttcatagaaaataactaaatcacttaattcacaaaaagtctattttggtctctccatgcaaaaactataacctttcagtgtgttggtaagaaaaggtggtaccaccattttctatcacactaagatatctcaccacacattttaatttgacttacctcttaccaccatttcgtaccaccttatactacaaatcagacttattataaaatgtcttggagttgggattttctcaatttgtttctgattcgtaatcgtaaagtcctccatgacaagatatggacctacacttagtgaaaagaaagtaaaagttagaaaatttgtagaaatacctaaaatctgtgggcacaaaaagacaaagctaagtggggaaaaaggccacttattcattatttatgagaaagagataagaatatgaagtgttttttttttgtttattccttgcaaaaatagttgtatgcaaatgcaactatatagtaaatagcatgtggaccatcacagatattattcgaaagaacaaaaaaaaatcaaatgttgaaacttgaaagtgaaatttaaagacaaagaagaagaaactgtaaaaagcttaccaaaaaagtgaaattattttattgaaaagaagttgaaaaaaaacatccgtgtgtaaactttgacacgtcgttacccaaattattccccactctaataaagatggactagtctacacaaaaattaatattatctttgattacaaatcggacatgaaatatttaaaaaattgcatagcaccaaaattagatatgaaaaacgttcattatatatttgtcttattctccaaatatgcttgataaacacattattatagaagaattacgaaaatatcttttactattgacaccaatcaggaatatatcaaatatttttagataagaatataaaaaacacagaaaatgattgtatggtggttatagcttcattcaattttattgcagcaaacaaacagaaaggccagagagacgaaagagagaggcattagggtttaggattaggttttagaaaagggtttagatctctaccaactggtttgttaagaacataatctccttaccacatttttactcttgaaaacattttgatctgtttttgttatcttcaccaaaagacttgactccaagaaacaagaagaagaatcaagaagcaagttcaagaaccagcttttaatgaaatctctacttcaaaaaggaaacttgctttaaggaggatggatcttttgttttcttgaatcttttgtgtgggtaaaacattttgtattatcaagattttgatttgaggagataaagagtttgttgttaagtttgtgttcttgggatcatcaagagttaaaacaaaaaaaaaaaaacatttcttttttccttcttcaatttgagatttagtgtctcctttaacacccacaaagccagcagatgctttcctggtaattctttaatctatcctttcttcttctttttaaattcttaaattcatgcagagagataattctcataattttcattggttcaatttcttaaaatttgcttaattaagattttattacataatgtgaagtataaaaagggtttagtgttgtttgtgtttgattctgaaacagatgactccttgtttgatctgatcataagaagaagaagactatggccacttattacaaaactggctcaagtgagatttattccagaccagaatttgtccctggaaacgcaatgaactacacaaattctttcacagagacatttcctagagattcaactaataatgtgtcaccttcaaaagagattcaagtgttgtcaagccttggtggagtttcacaaatggttgagattcaagattctggttcttggagagatcaagaagacaatgacaggaatcgcttcccggtgatgaggcgtcttggcctcagctcgcagattgagacatcgagaggcaataataacaatgagtatgcaacacaggttgtttcgggatttactcgaaccattcacaactcaaagtatctcaaagctgctcaagagcttcttgatgaaactgttaatgttaagaaagctctaaagcagtttcagccagagggagataagattaatgaagtgaaagagaagaatcttcagacgaatactgctgaaatccctcaagcagagaggcaagaattgcagagcaagttgtcgaaacttttatcgatattagacgaggtaatccgccttacaacatatcttctacacttgttaatgattctcgtggtaacataaatgttgtttgtttctttgttgtttgaaggtggatagaaattacaagcagtattaccatcagatgcagatagtcgtgtcgtctttcgatgtaatagccggatgtggagcagccaaaccatacacagcccttgcgcttcagaccatctcgaggcatttccgttgcttaagggatgcgatatccggacaaatcttggtgataaggaaaagtttaggaggggaacaggatggatcagatgggagaggagtggggataagcaggttaaggaatgttgatcaacaggtaaggcaacaaagagcgttgcagcggttaggtgtgatg

SEQ ID NO: 13729 - DNA, 3000 bp, Unknown
  misc_feature (1)..( 3000): cDNA_ID_3031619_gDNA_ID_2214647_Annot_ID_188547 3000 nt of promoter + ATG
gttttaaaaaatctcaaaacaaatttcgtcatattttatgattcgaaattttaagaatgaacatatattaaccaattggcaaaaaatgtgtgggttcaacgtcccgcaacgactaaaatattttgacaatgattcataaacatattataaataacatcaatattaataaaataaacagtttttttttgtggacgggtttggcaggacgttacttagtaacaatggtaaactataaaataatttatatatttttatatatattaattttagaaaatgaattgtcttcgcggtgtaccaatggttaaaatctagtggagtattaaaatcaaaacaactaacttctttagacttatggtggccaacaaagcaacaacgggaaagtggtctcctttcaactttttctttctcccccattttcatgaaatattaaaaatatctcaaaagagcataatacgacattaatttgcattaatcgtcaagttgcaattatgtgtctaatcatatttacaatgctacacaaataaatatattatagttatcaataaactctctaatttggcgtcttgtttctcccttaccatttgagaactcaatttttctccaagagaaaaacaagaattccaaggagagataattaagttatgggtatgtcaccattaacggtgaagaaacttggtttcatcttcatgattgtttcagcttctgctctttctgtctcctttgcaggtttcacttctctcacccactctcttctgttttgttgcagcttttctctatacttcatgtgcgcaagaaattctttagtccttgttagaaagaaatgatcacaattgtataatctttagtccttgttagaaagaaatgatcaatattgtagtttgtcgttgtgtaaagaaactactaaacaatgatgatcatgatttagttatactgtatgtacaattaagtaacctatttttcttatagatgtaacaaataaacttcttttgttatgcaggccgaccatcgatttttgttcataaaaaaataaatcttcgcgaagaggttagtctaactaacatatgaaggggaatgtgtttcatgtaactttgtgcataaataagcatacattttctaaatttgaatacataataaatcttttttgctttcaataaataattttggagctgaatttggttaaatgataatgtgactcagatggtggaaagaagcatgcatgagcatgagaggcttctaagaatgaacacaaaggattatgggaacaacagtccgtcacctagacttgagagacctcctttcaagcttatacccaattgatgacattagaattggttctaatccatccttaaataatatatacatatataggtagaattagtttcagtgactatatagttccatcgaaatttggagatgtaatataaataaaggtaagaagctagcttgagctatgctatactcttatatttggtgtgctgcatagattttggcattttgccatacatccatggcatcacaatcatgtgtctttgtttttggttttcaaatatatatttatgttgcatgcaatattatttatatgtatatatatatatatatatatatatatgagaatttgaattcttactattagacagagatagtctaacagtaaaaaatttgtgatttgagttctataacggttcgctaataatttctaatcaacctctagatctattattatgatattttctgagaaattccttaggcatgacgatttttaatctatatgaatttacatcgaattttattgtttttcttgttttagttaacaatttttctgtttagtttgatttcaacactaagaactttccgtgtgaacaaaagaactttgtgaatctgatccttaagtattataatgaactcttaatttgagggacttacttgaagtctaatttgatatatgtcaattaccaattaagaaagccttcccatttgtttgatacaacacaatcgaggtgacactagtatggccaaagagatagttcacgatagaaaatcaaaaatcaaactttgcctcaccaaagattgatgtagtagaaactaaaaacaccatgagaaactctcatgttagaaaatcaaaattcaaataataatcaaaataaatttatattcaagagttgtatatatatatatatatatactagagtcgtcggatgcatctaaaccatagtccttgattcatatatgtgacgttttcatctccacaaatgggtaattgtgttattacatagtttaaccaagacgacatcgtctatatacaaccatttagggcatgtgttgtccaaattatttttgctatgaatcatagcgtataacaatgtttgtaccaattttgtattattattcaagtcaaaacataaaaaaaatgtttgtttttggtcaatgacctttacgtaagtcacatacaaaataaaattgtaagaaagatgcatatagaatctttaaagcattctgaaatttgataaaagtagacattaataatgagagtggaataatataattatatgcttatatacatctttcttacaaattcattttgtctatgaccctttactaatttagataattacatactcttatcacctctctcttagttacagttaatgaattatgaacaaaaatatggtaatatgacattaatgtgtttaaccttcgaaagatatatcgatggcgcaagtaaaaaaaagagttgaaacgagtttttaaaagagagacaatttacatgagatatttttcgttttaattcttagaattgaaactgttagttactctcaattttgttcattaaacactctcattattgatttctcttatcagcactgatggtattagacctgtggcaccaatagcacctcttgaggggttttatgcaaatccaaaagttaaagatgtcaattggaattggaagtaattcaaagggcttttatgcaaaagtttgtttttctcataaaagtttaa

SEQ ID NO: 13730 - DNA, 3000 bp, Unknown; identical to SEQ ID NO: 13725
  misc_feature (1)..( 3000): cDNA_ID_2703938_gDNA_ID_2214647_Annot_ID_188543 3000 nt of promoter + ATG

SEQ ID NO: 13731 - DNA, 3000 bp, Unknown
  misc_feature (1)..( 3000): cDNA_ID_3031633_gDNA_ID_2214647_Annot_ID_188542 3000 nt of promoter + ATG
ttgttttgaattatgattgagataaaggatatttacttctcaggtgatttaatcaaagcctctggagaagatctgtaggtacgtacaaatgtctgaacatgttatggttttgggtaaaggtaacaaaggaatcagcaagaattcttcagtcaatccatatgaatcagcttggttaggtcgttggactcagtcaggtagtgaagtgaagtttcatgatggtgagaccaattgctctaagcagttgataagacctgaagatgagaatcatggagtcgaggtcttgccgtttcctatgttcaaggtttctcaaaagagagagactactactactactactactaaaccgtctttccatgaagatgttggttcaagctcgagagctatggttaatagaatgccctggatgtatccgcaaggagagaacttcagttctagtaaccgtcttgacttcccaattcaagaaaagactactcaaaacttgctagagttgataagaccggtgaggatttacgcaacggttgattctgttaacttgcctaaagaagatagtcatcagttattgaaggggtctacagtttccatgaaactgaaagggaagatttttggtggatatcttgatctgtttcctaatcaagatcactcccacaatagaggaggagtaaggctgcagtctctagaaagctcaaaggatactcaagaagatggaccgagaaaaaatgaatcatcggcagagactaataccttagaaatggatagacttcagactatacatctttccggctccatttcttcgtcatcaactaaggtattgttcaatcgacatatctacatatctttactcaaaatgttgaaagttgtgattgtgaaagatgttgaaaattccgcagggaaaaggaataaaaggctactcagccattccaaggaccgaaatacctgacatgaatgaagaaccacctcttgttccggatagagagaattcagtagatggacatcagggagaaacaagcaactcggctactcaaagtatgaatgtggaacactttctgtccagagattgcaaacgtgtgcggttggaaccagaagtagaagccagcagtagatgggtcaagcgtctgaagacaagcccctcagattccagtgaaaccaagagcatgatgaagatgaaagaagcatcactgggagaaaaagagaacaataatctattccttgagatcttgaagtccggaatcaacaatctccaaccgagaaatcaagaacccgtcgtttcacagagcaatgatctgagacaaggaggagatgacattacacttctgcatccatggatccagaggtggtgcaagaagaaaactacatcaacagatcaaccaacagggcaagaagctagctttgagccagagagtcacaaggagttcgagaagaaacagtatccgagtattgcagccatggcattgatggggaaggctctgagcggtttaaacccatatggtcttagaaagaccaactctctcatggtttggaatgcaagggatttgaggtaggaaaacaaaaccatcatcctcatcttcccttgtttatcattacaacgtaaagtcaagaacatcaaacagaactagctagcaggcttgctacgatcaaatattttgacaggttctaccttatatgtcagtctgactattcttataatagtttcagtttatgtatgaataccttgtttgcatcataaatattcccttttaatcgttaccgcatcagtattttgatttgttactggccttacaaaaatgatagcataattcaaagtggtaagtaaatctgttctctcgaaaatcttgattcaagggaaaaagagtaacatttaacattaagtcaagcaagtagccctagtgttaatctgctgacttgagtgagtagaaaccatccttatcgtgcctttcaccatcaaatctcttatcgcctttctagcaagcgacccattgatctacgacagaaaccaatacaacattttacacatgatcaaattcttgagcacaataaaatttctctttcaataactcgataatcttgaacctatcccaacacattataaagagctaattcagtgaaaagagtggaggtagagagttagttagtttacccgaagacggtcagagagaatcgaaggagtgatcaatttgaacttaggagcttcagacataagcttgtcgtaagttgcttgatcgaacagaaccatgttgttcaccttctccttttgctttcctttgctccacttctgttgaaatcaagaaatgagaaacgtaaataaaacaaaacccaccagaaaccaaatcaaagaaacttactgatcaagtaaaaaaaaaagtgattgtgatttggtaaaggaccttctttttctgctttccgccaccggatttggcgggtttagaggatggtggtgggactttgtccttctttggtgcctggaatcagtcagagaaaccacacacgaaatctgtatgcgacgaataaaatcaaccatccgaaatacctaaaacctatataagccaaatatttttatttttattttggtaaggtttgttcgatttttttttggtagggtcttgttcaattttatgtagtaaaatatatttttaaattgtatattaactttatgttttattatattccaaactgggttataacttataattaaatgtaaaaatttaaatatttgtgaaatggagaaaagtaaaaatttatcatgacagacgtcttcatttcccttaatcttaatcttaacatagtaaaaatctctttcttcaatttatctatatataagattttactttagttatgttttaaaataataatatactcttaattgggttataaatgtgaaatctatatatttttaaaagggagcaaaatcaaatcttattgtgataaatatatatttcttcattatatatccttaacttttaattcttcagttttacatacagatctttacggtggaatttaacg

SEQ ID NO: 13732 - DNA, 3000 bp, Unknown; identical to SEQ ID NO: 13724
  misc_feature (1)..( 3000): cDNA_ID_3031637_gDNA_ID_2214647_Annot_ID_188540 3000 nt of promoter + ATG

SEQ ID NO: 13733 - DNA, 3000 bp, Unknown
  misc_feature (1)..( 3000): cDNA_ID_3031658_gDNA_ID_2214647_Annot_ID_188527 3000 nt of promoter + ATG
tacgagaagatacccatcaaaagtgtgagtaccatcaatcaatgatcacgtaaagtacacgttttgcatcgttttagtactaacccattttatatattcacagggtagagaagaagaggagatgattacaccagtgagacgttcaagccggattaagaacaacaaaccttctggttctggtctatgataaagagatagacatttcatttcaatcattgcatcactatgcaatctttttagtttcctaagaattagaattagctttatgactccttaaaatcttctgatttgtaccaaactagttgtgattcaatccaaagtttgtttctttgtgtcagtctcagtcgtttaaagtaaaagaagaaacaaaagcatgagactttttttttttttttggtaacaaagcatgagactaaacatcacaagactcaatttctccagcttcctccttcagatcgcccctgaccaccgtaacctccgtctccataaccaccttcacgacgatcacctccataaccaccaccgtatccacctccaccgccacggttgtaaccaccttgatcacgtctacctctgtaaccaccacttccgtaaccaccaaccataccaccgcgagtaccactaccacgagcctgagcctagttaacagtaatgttacgaccatcaagttcttgaccattcattctatcgatcgcagtcctcatggaatcctcatctttaaaagtcacaaatctaaaccccttagacctcccggtctcacgatcaatgatgatctgatccaatccataaaccatataaagtcgagatttttatgatacaaagagagaaacagagcaacacaaaaacagagtcacactttaacggaccttggagtcgaaaacttcaccaaactcgttgaaacacctctctatagactgttcatcggtggcccaagctaaacctccgacgaagcatcgatactcgttgtctgcataagccacgtccaaagatttgaggaagatgatgacgacgacggttctatatagaagcgcgaaaccatggttacgttgattcggtgcttaacatgcattcagaaatatgattagaactgtgaccaaaacactctcttggacgcatgatttgtgccacgtcaccagaatcgaaataatcttgctctgatccgatggtttagatttgacggcttattttgtatgtgtggggtctcacgaagaggacatgtgttagttatatgatcttgaactggaaaacacagatacaaacaacatttgtactttcggacacgttggatttatttaatagcgatgcgggatatgtaacaaaaattaggtagtgatgtaaatttgttatccgacgaaagatgaatagttcattgctttttcttcccgaacaaatatcctcaattatgacttaactagctcgaggttagagaaaacttttctatggaaataacagtaattggaacgattaataaaatcatatacgcaactgtagcatatgaaaattaataaacagtttaagaaaatttcacatcacttgttcatatattttgagaaaacttttgagaaatttttagctcaagaaaaattcatctctattaatgtctacttaatcactattttctaaataaaccatagtgagactttgaactaacataatcattcatttttcaagtaaaattaaataaaaaaactaaatattttcattcgattggcattgtttaaattgaacattctacaatagagaatttgtttctatcaattttaaactaaacatatatcaaatttttggatcatatcaaaaaagctagaaaattcaatatcattgttttttaaaaagaatacttcaacatctttacaaaatcctataaccgataaatatttcatccaatattttgaaagaaagttgccaacatttcacatgtttttctagttgataattttctattgtactgtatatgattatatgttgtaataaattgtttaaaatgcaaatgattacagcggttgagacggacaaatactatgcagattaaaccgcttttaatttaccaatcataaattagaatctataataatatatactaagaaaactgccgtaaaccaatcataaaccatttttacatacaaataagattgatccacaacgatttattatctacttgaaaataaaacacacttatattatcgatgaatttatctattctgattgccgttaccattcgaaccaaaaaattcagagtatttagaaaattttagcaagaaaagaaaaagattcctttattcggccaagaatggtgaatataggacgtgagatatattactccttatatatccgaacattaaatttacaacaataataaaacaggaaagaaggaaagaaaaaatcccaaatagtaattgcggcaacagcttagctggcttatggcgggattaccgggaaagtcaaaccaaacattaaaacgacgtcactttaccccacactaggttttaatttaatctaatttcaaaattattaattaatcagatttgtaattaataataaattaatttcgaagtttcttgcaaagacgagagagagaggagtgtcacagtctacagttgttatctcaacaatctcgatcttcttcttcttcttctttctttctctctctaaagatttttttcactcaacaaatcactttttgttttgtctgattttaaggattagtgaaaaatttctactttttcttctcataaattaggatttagagagagagagagaaagagaaagagaggtgctttaatgtctgtgaaggtaggagctgtaattggatccagtaacagagcaaacccagttcgatatctgtctctttcttcctctctaaagatcgaaagacgttatttttattagggttgttgaattgggtattttgcttaaatcctgaaaaaaatagtctctgtctctctctgggtttgggtgatgagtgttgatgggtcattggattgagtttgataagcaatg

SEQ ID NO: 13734 - DNA, 3000 bp, Unknown
  misc_feature (1)..( 3000): cDNA_ID_2714026_gDNA_ID_2214647_Annot_ID_136377 3000 nt of promoter + ATG
agttttagagcatagcagagacactctggcttaatttacttttgcattggttgaaccgcttatgaaccatagaagttcctcaacaacacctctccagaaaactcgctaccaaaaaaaagcaaacagattgcgtgagtttgaatatgagctagtgtagatatgcaactgccactaaatacaacagaagacaaagcattctccttttgcgagtaaacgtggaaagttaaggaaaaagtgagcatacctttgttgtcagaagtggaaaacttctgcgtaaattgaatttcatctgtgttccaaggaaatgtgagatcatttaaccaactagagataaacagaatacataaagaaacggatttatatcacctggcaaccaaattttgataatgtaccagtcccggtcctatcattcttcacattgccattagagataatatcttcaaccatattcaaatacagaaactcctcatgctgatcaaaaaccatcttaggaagaaacaaaaacttcttcccatcaaattgaagagactgtgacccattgctttcatcagaagattcatcagcagaactctttacacggacaaaagtcgtgaagcaaaaccgaagtccattttcagttactggaaacgatgaagaccaaggctgataaacagaagtatcaatcgcaggtataaacgtatcacagtcaacacttgtatcaatctcagttaaatggatagcatcacaactaggcctattcaatgcttccctacacaaatacaaccaaccaacacttagttccaaccaacaacaagattccgaatcaccaaaagggataataaatgaaaatcaacaaccattacctcaatatgtcaccacctcctataacaaaaaccctctcaatagataaacaatacggcggcgcagctaacaaatcaagagcagaatctacactactacaagtgacaacattctcagtgttggctatatcaaacccaccagaacgagttagaacaacgttaagccgacccgaaagcggcctatacttaatgggaatagactcccaagtctttctacccatcacaacagcatttttcttagaggaatctgaagtggtcaaagtaatgtctttaaagaacttgagatctgttggcaaattccatggcaatttcccatctttaccaatacccatttctttagttgcagcaacaacaacttggtaagtcctttgaggctctgaagcaagtgtagtggtgacactgtcattgagagtagttgttgccattgtggaaatcaaaaccttggagatacttgcaatagatgatgatgaattgcgatggctagtacaaagccaaagcagagactgtgaaaatcaaacacaagagtcagattcatatgaattaaactatccaaaacaatcaaagaatcgaaatttgaaacaaatagcaaaagggtatggagaagagatcagtactgaccgatttaaaggagaaaggaagaatctttgaggggtttgcaaatacccaaaagagattatcgaaaacccagaagaaaagtaggtaaaggttactttttttttttttttagtcacggagttgaaaaggacaggaagagaagataagcgggggagaaaagagggaaacgccgattcgtaaaacgcttaaagtagacggacgtgtctctatcaaactaaaatagaagatcgaaagtaagggtcgggttttaaaggtaagaccactatccggacactatccactactgcgaagtgcgaaccatggttttagatagaccaatagttatttcaatcttttttgttttgaacatagatttctttaattatgtatgttgaacttactaattaatatggactttctcatatttatatgttactattccctcttttcaaaataatagtagatttttgaatgatttaagtaaatgacaagttttcggagagaaattacagactaggcatgtgattatggggtattccgctttttcgggataggtaagtttggtttctcaagtatttcagaaactgaaatttttacaaaaaataaccgattaaattatcggtgtagtttttggttaattcggttattaattttaaaatcgaaatatttggttattatattaaaatttagttaaattgggaagtctagttcaaatctaaattgacacgaaccgaaaaggcaccgaacataatataaaccaaaattctaaaatacctaaatagatcttcaatcttttgaactaattatccagaatcaaaagaaaccgatccaaaccgaactgatgataatttggtcatgtaaaaccattgatcctcaatcttttaaactaattatccagaatcaaaagaaatcgatccaaaccgaactgatgataatttcgtcatgtaaaaccattgtgtaatatgttttcttatgatgataatttggtcatgtaaaatatgttttcatctgtaaagtgattaagatgataatttggtcatgtaaactatgttttcatctgtaaagtggtgggctgcacttagtccaaattggcgtcatactcttttctattaattatagcatttattggtacagatacgaatcgattttgatatatttcaatattatatcacacacatgtccatttccatatattaagaacaaaccaattgtaaaaaacaaaaaaaagaacaaaaccacctttggaccttatcaatagcttgttaaaatgacattcaagtacttttctacatgtcttaattagtttcagatgatcctcaccattaccatctttcacccttccttcctctcaagaactcatctccaataaggtaaggaaaaaaaaacactggttttgcttctcttttcctcaatcttatttcttaaacaatcttaatcatcttttaggtgtttcatcaaaagtctaaaccatggctgacaccaaacaaggttataagtcaatgcatttaccttaactagccattgatacaatttttcctcttgcctaaaatgttaatgtaaaccaatc

SEQ ID NO: 13735 - DNA, 3000 bp, Unknown
  misc_feature (1)..( 3000): cDNA_ID_2714022_gDNA_ID_2214647_Annot_ID_136378 3000 nt of promoter + ATG
ttttctttctcccccattttcatgaaatattaaaaatatctcaaaagagcataatacgacattaatttgcattaatcgtcaagttgcaattatgtgtctaatcatatttacaatgctacacaaataaatatattatagttatcaataaactctctaatttggcgtcttgtttctcccttaccatttgagaactcaatttttctccaagagaaaaacaagaattccaaggagagataattaagttatgggtatgtcaccattaacggtgaagaaacttggtttcatcttcatgattgtttcagcttctgctctttctgtctcctttgcaggtttcacttctctcacccactctcttctgttttgttgcagcttttctctatacttcatgtgcgcaagaaattctttagtccttgttagaaagaaatgatcacaattgtataatctttagtccttgttagaaagaaatgatcaatattgtagtttgtcgttgtgtaaagaaactactaaacaatgatgatcatgatttagttatactgtatgtacaattaagtaacctatttttcttatagatgtaacaaataaacttcttttgttatgcaggccgaccatcgatttttgttcataaaaaaataaatcttcgcgaagaggttagtctaactaacatatgaaggggaatgtgtttcatgtaactttgtgcataaataagcatacattttctaaatttgaatacataataaatcttttttgctttcaataaataattttggagctgaatttggttaaatgataatgtgactcagatggtggaaagaagcatgcatgagcatgagaggcttctaagaatgaacacaaaggattatgggaacaacagtccgtcacctagacttgagagacctcctttcaagcttatacccaattgatgacattagaattggttctaatccatccttaaataatatatacatatataggtagaattagtttcagtgactatatagttccatcgaaatttggagatgtaatataaataaaggtaagaagctagcttgagctatgctatactcttatatttggtgtgctgcatagattttggcattttgccatacatccatggcatcacaatcatgtgtctttgtttttggttttcaaatatatatttatgttgcatgcaatattatttatatgtatatatatatatatatatatatatatgagaatttgaattcttactattagacagagatagtctaacagtaaaaaatttgtgatttgagttctataacggttcgctaataatttctaatcaacctctagatctattattatgatattttctgagaaattccttaggcatgacgatttttaatctatatgaatttacatcgaattttattgtttttcttgttttagttaacaatttttctgtttagtttgatttcaacactaagaactttccgtgtgaacaaaagaactttgtgaatctgatccttaagtattataatgaactcttaatttgagggacttacttgaagtctaatttgatatatgtcaattaccaattaagaaagccttcccatttgtttgatacaacacaatcgaggtgacactagtatggccaaagagatagttcacgatagaaaatcaaaaatcaaactttgcctcaccaaagattgatgtagtagaaactaaaaacaccatgagaaactctcatgttagaaaatcaaaattcaaataataatcaaaataaatttatattcaagagttgtatatatatatatatatatactagagtcgtcggatgcatctaaaccatagtccttgattcatatatgtgacgttttcatctccacaaatgggtaattgtgttattacatagtttaaccaagacgacatcgtctatatacaaccatttagggcatgtgttgtccaaattatttttgctatgaatcatagcgtataacaatgtttgtaccaattttgtattattattcaagtcaaaacataaaaaaaatgtttgtttttggtcaatgacctttacgtaagtcacatacaaaataaaattgtaagaaagatgcatatagaatctttaaagcattctgaaatttgataaaagtagacattaataatgagagtggaataatataattatatgcttatatacatctttcttacaaattcattttgtctatgaccctttactaatttagataattacatactcttatcacctctctcttagttacagttaatgaattatgaacaaaaatatggtaatatgacattaatgtgtttaaccttcgaaagatatatcgatggcgcaagtaaaaaaaagagttgaaacgagtttttaaaagagagacaatttacatgagatatttttcgttttaattcttagaattgaaactgttagttactctcaattttgttcattaaacactctcattattgatttctcttatcagcactgatggtattagacctgtggcaccaatagcacctcttgaggggttttatgcaaatccaaaagttaaagatgtcaattggaattggaagtaattcaaagggcttttatgcaaaagtttgtttttctcataaaagtttaaatggaccggactatagtctgggtcgcaattaaaatcgcttcaaattcccgagtcagagtctctcagcttcgaagcacgagcgagcgaggcaaaccaaaaagaatccaatttacatcatcttctccaaaattcagctcgaaattttcaacctttactggtttaatggacattctccagaccgatcaagcttcctcaaacggtatacgaatctctctgtgaaaaaaattaggtctttcttctgattttagtgtcactacattatatgcatgtcgttcccaaacccgattttgtgttagttgatccaaatatttgaagaaattatgagtaattttgcaatgttctgaagccaaagttgttgtctttcttgtttttgtttatttggagagtaatgtgacag

SEQ ID NO: 13736 - DNA, 3000 bp, Unknown
  misc_feature (1)..( 3000): cDNA_ID_1807870_gDNA_ID_2214647_Annot_ID_136381 3000 nt of promoter + ATG
catggttaggcaaatgcttcgatttgttttccgatattgatatctgattaatccggaaacacatatagatcagaatttttgttgatctaaataaaacggagcggatcacaaataatacaaaaaatttagaatatatactctgatttattttttgaatcaccttttagaaaattgtcatcataagagttaatggtttttcaaaatgactatcatattaagaaaataaattaacctcgcaaataattggtcaaaatattattttcttttaggctactgcttctcaggggattaattatatcaggaatttgagacagactgtacaaaattgatcaagatacatagttgtctgacgagtgatccattttgccaaccttttaaatgatttttttttatagttatttttctcttatttaaatcaatatatatatatatatatatttatatttagcccgtttgtatcaaagaatgtctttttttttttttaagtctattttggctttttttttaagtctattttattaaatactaatatttcttttgtttttgcgaattttctggaccaatcatactgcacggtctatgtgggaatggaataaatcctttatcattgtaccaccataagcatatgcattggttgacgacctaagtctactgaggcatatcatcaattatctttacataaatatattgtgattggattattttaggtttttgtgaaaaaaaactatgaagtcactaagttttgttattttatctttcatctaaaaaaaatgcagaataatcctatgaaatctctaattatacataatataattcttagatatatactgtaaacgttttcatatcacatacatttgacttttaaaattttataggtaaatttgaactatttatcttgaaggtttcgatttgatattatatataaaatttttaaaaacttgacaatcgtgaaaaatggtaaattgcatataatttaggatttcataaaattatctgcatttttttggaagtgaaaggtaaagttgcaaaaaaatatcggtttcgaggtttttttttacacaaaaccctttattttaaaacatagaaaaaactgaaatgtactaagaaaaatagctatttataatttttggtcaataatcgtataaatttacaataatccatcgagtaaacatgatatatttagggtcctgctgcatatgattaaccaaagaataccaaaaataatcttctacgatctttaacatttccttttattttccatgcataagaactttttgtacctcttctcatcttttattttatgcttatgcaaattgagttaattttgcaaacgtatttttttgttccaaatattaccataatttgaatttttaaaacaaacacacaacaacaaaaaaaaaattgaaattccaagtgagaacatgtcatgccattgtcaaacatatcatataatgttttgttttttcttcttttttatttattatagttattattaaaatcccaatgttagtttttttttcggtcaaaaatcccatgttagtttgttattattaatatcatatattgttagtttgttctctttaccaatctaacatgttattatgtttaacaaacatagaaaatgatgttttgttatatattttcctatatacgtaacttctattaaaatcaaatggaattgaaagttattttgcattagattagttaattgaataaaaatagcatttatgcgtttaaaatagcatgacgtgttttcacttagaatcacatatctattttttttttttttttgcctacatatatatatcatggcattttattttaaacatatgaaatcaagtaatatttttagtacattggtaaataaaatataatagcatttattatatgttttatatagtagaatttcatctgatttaggctcacatatccattttaaaaatgttttgtaatcatctaaaaaattcaaactatggcatatgaagagtagactaatatagcaagttgaatcaatttctacgaagagatagaaaataaaatgagaaaagacacataaaatattaactgcatacacaattaaaacaaaaaaaaaaaacaagaaagagaggttaaagatggtagaaaattatttttgttcatgttgtttataaaatgatcattcacttcatatattccacataggtactatacattacattttcaactaattcacatattcattcataataatattatattaagagactaaatccaaagaaacttggtgggctattaattgactttaattttcttggcactccacaaaaccagaaaatgaaaataatccatggatcaaatgtttttgatttgattctttatttagagtgttcaaactggatctgttttctttatttcatgatttggttctttatttcatgagttagagtgctgttttctttatttggttctttatttagagtgttcaaggtggatctgttatttatttggtcttaatgttttttttctttctaaaacttaaaattgactgtgcaccactgattagtctgaatattacgccaccttaggtttttttttctcgatcataacaaaatgccaaaatcatgaagaaaaaaacaatttacagttgacaaaaaaaaagattaaaaatcaaaacagaagacaacaaaagaggaagcatagattcgtgtgtcctctggaccagataattaaaaataaatatccaaccgttcgttaacatattccatatcgacatttggccatttgggtcaaacaatacaaaaaccaaagttaaagaaatagaatttaatacctttccttttaaaattcccaaataaaaacttgattgaaacagtgttgacgacacggctccattaacgaatattccgtacatcaagcctcatacatttcccctgtctcttctcttataaggttttttctccctttgtttatcggaaaaaatctctctttcgaataaaaaaaaaatctcagaatccaaaaatg

SEQ ID NO: 13737 - DNA, 3000 bp, Unknown
  misc_feature (1)..( 3000): cDNA_ID_2714010_gDNA_ID_2214647_Annot_ID_136382 3000 nt of promoter + ATG
caaatgagcttatgattataaaaactcaagattaggataattttctcaaaaaaatgcgtgtatatatatcattcttaagatacaagaaacattagttttgttaacagttaagatatagagtcggatttgattcttctaattgagtgttaacatgaagcctaagttgccattgaataaaatcacacatttccttcttcaacgccaagactctttcttttattttcttccaaatgaatcatcttcttgcagtgtatataatttgtgggatcaatgggtttcttaaaacccccttcccaagaaaagattactgaagattgaagaagatccaatagctggtggcccacttggacgtgaagattagcccaattttatttgtattaaccgactaatggtctttagtatacagtatatagctacgtttctcttaggtcttttgtgaattggttttgtctaggtcttacttaatctacaagttctgtttcttcgtctgatcggcaatcatgaatccaagtccaataacgattgatctcatcttggagatattgtcgagattgcctgcaaaatcagtccggaggtttcattgcgtgtcgaagcgatgggcatcaatttttggtagtccatatttcaaggagttgttcctgaccaggtcctcgactaagccgcgcctcttattcgccatcgcagagaaaggcaacaaagagaaagactgtgtgtggaggttcttctcgtcgccacagcttgagaatccatatgagaaatcctcatcgactcttgtagcaaccgctgaatttcatgtgagattctctccagacaatctactgatctgtcattattatgacctaaaatatttttcaattggttatgcctttggcttgatctatatctatggtaatcgaggccgggctagacctctaatatgtaaccccactacaggacggtatgccatcttacctaatcggtatacttacagaaaggcgtttagctttttcgggtttgacccaattgacaagcaatacaaggcattgtccatggtttatccatctggtcctggtcatagtagagttattacatttggagctggagatctgaagtggagaaggataaaatgttcattgcgacatgatattaagagtgaaggggtatgtatcaatggggttttgtattacttaggtgacacgtcggattggagtcgcgttaatggtaatcacgtaacgtctggttatatgatagtttgctttgatgttaggtctgaaaaattcacctttattgacgtaaaaaggttttgtcgattgataaactacaagggcaaattagctgtgatttattgggaggatgatgtcgacattcaagagctttattacaaaaagggtatagatgtcgaggaatatgtggagaataatgtcaacgctgatgccactaatgagttgtgtgtgtggattctagcggatgttgagaaacaggaatggtcgaaacatgcctacacttggaccgatgaaaagttcttccgtcgtttggtatccatcgctggagtgactgcttcgggtgaaatagtgttttcgatgcgcaagtgtaatcctaaacaaccgttttatgtgttttacttcaatcccgaaaggaacagtctccaacgtgttgaaattcaaggttttggtgaagccgttacgaaatcttgtgacgtttgcacctttgtaaaccacgtagaggatctcaatgtttacgatttaaaacaactcaagtcagtccatcctccattggtcgagccagaatattatgattcagattaagagtcagactgagaagggacaaggagaagaagactgacaagtgacaaggataaggagatagagacgagccaggtgaaagcaatgggcatgccattttatgctcttacttatgcgttttttttttaaatcaacattatctatgtttactgttttttttttctcttttgaacgagctttatatgtatccttcattttgtttggtctcaagaacaaggtgttgcagtttctcttagttctctgtcttaatctgagtatctattctttgaatttcagcatggtttcttctggatgagatctgtcctctgttctgtttcaatatcttgttgtgtttgtcggttgtgtgtgatgggactaattttcatgatgacactttggactaaatacttaaatgggatttgtacaaaatcgttcactcacttgaagaaaacattccttgaattctaccattcctggtttctattagtctcagtcttcatgtttaaagtatgcaacttcttgttagcttagttttgaaacttttggttctctgtaacaaagggtcttgtaagctgtctttgaaagagggaacattctcgttaacagtctttatgggtcttatgctttgttgcttctctaagttttttgtttgaacttgtgaatggcgaatagatgagatctgtcctctgttcttaacatcttattgattttgtcatttggtttaagaaatgggaccaataggcccaggaattaggtccattaaaagcccagtaataatggcgccaaaatcaagtgaagtccccgcctaattcatctcttctcactaaaaaagcgtcgaaacctctcactccgtctctcaatcaattctccgatcagccatggcttctgattcttctctcggcaacaccaacgacggtactatctctctccctctctctaaatctgaaactgcttcataattttgacgaatctcactacctcaggtcctccttctcccggagaaaacgtttcaagccctatcgaaaacacatactcttcccccgccgcacttcaccgtcgccggcgaggaagatcctctactcccacgcaattcgcaactcctccaccaccgccttcacgtctcgcatcatccaattccactcctccaacatctcgtccttccgccgccagatctaaaggaagaaatggacacggaggtggcggtggtggcggtggtggcggagacccagggacgccaatg

SEQ ID NO: 13738 - DNA, 3000 bp, Unknown
  misc_feature (1)..( 3000): cDNA_ID_2714004_gDNA_ID_2214647_Annot_ID_136385 3000 nt of promoter + ATG
gagaaagattaatttttcacgatcttctaggcaccaattaatggttatctctaagctattttcatgctgcaccgaattgtaaatgattcttgcatttatagcaaatggatcagattttttttggtacagatgttgttcaattccacaaactattgagatgcaggagcccaaaaaacactgtacagtctcttagtatagtactgtccctcatattttagaatacatgttttaaacttttaaaatagtacactgtttgagggattatttcccctaatttctttaaactagaattaattggcattctgcttcggttatgctgtatttttaagtttctctctgtgcatggtcatacttttgtttggttacctctctctgtgtatgtatgtattccgtgagctttcatcatttccatgtctttctaatagaacctaacataatgcttcatttttatgagtaggatggcacctatgtagcaaatgtgagaaaactgcaacgtacttgtgttatacatgtatgttttcattatgcaagggatgtgccaaggatgctgtcttcttttgcatcagaggtaataagggtttgtgtgagacatgcatggagacagtcaagttgatagaaagaaaacagcaggaaaaggagccggtatgcctgacatactcttgtagtttttttttgcttaccgaaatgttttcttttcttgtaacaatgagctgataaactgctcatgttgcagtagctcatgatcttatatttcctgtttctctcattaaacatgttgtgataagtctgatgatcaatcttctgttgattctctttcaacctagttgatgcatgataaccttacatttctttcttttactatgtaatgtcactaataaattatgagtttattttcacttctgccttagtttccactttgttatttgaatgacagttttttatttttctgatctctttcttacgtcgttttgtcttttacaggcgcagttggattttaatgacaagaccagctgggaatatctctttaaggattactggattgatttgaaaacccagctatctttaagtccagaggaacttgatcaggctaagaggccactgaaaggacatgagaccaatgctagcaaacagggaacagccagtgagactgactatgttactgatggaggatcagattcagatagttctccaaaaaagaggaagaccaggagtcgatcaaagtctggttctgctgagaaaatcctatcatcaggcgataagaatttgtcagatgaaactatggagtgggcttccaaggaacttttggatctggtcgtgcacatgagacgtggtgacagatctttcttacctatgttagaagtacagactctcctactggcttatataaaaagatacaatcttcgtgatccccgtcgtaaaagccaggttatctgcgactccaggcttcagaatttgttcggcaaatcacatgttggacactttgagatgttaaatcttcttgactctcattttctgaaaaaagagcaaaatcaggcagatgatattcaaggtgacatagttgatacagaagaacctaatcatgtggatgttgatgaaaacttggaccatccagtcaaaagtgggaaggataagaaacgtaaaacacgcaaaaaaaatgtcaggaaaggacgtcaatctaatcttgatgattttgctgctgttgatatgcacaacattaatttgatatacttaaggcggagcttggtggaagatctacttgaagattctacagcattcgaagaaaaagttgctagtgcatttgttaggttaaggatatctggaaatcaaaagcaagatttatatcgactggttcaagttgttggtatgtttagttttctattttacagactaagtcaatatggttgatacaatgggtgactaagatctctttttgtttgaaacacaggcacaagcaaagctcctgaaccttataaagttggcaaaaaaacaacagactatgtacttgagatattgaacttggacaaaacggaagtgatatccattgacattatatcaaatcaagatttcactgaggtgacgtactgctgatatccaatgtccttttttgtcactggaaatgagaaaacatgttctctttttttggtcctaacatagtattttctattgcacttgcatatattgacaagccatggaggctgtggttagtacgaagtaattgttcaagggtgctatatgtttaacctataactttatgcaataatttcaggatgaatgcaagcgtcttaagcagagcataaaatgtggattaataaacaggctgacagtggtatgcttcatataacttgaactcttgcatttgattatgtctaaaaatctgtggaccatggtgttttgcatttctggtattctaatgtcaatgtttttttagggtgatatacaagaaaaggccattgcactgcaggaagtgagagtcaaaaacgtaagttgcgttttttcctgctgacgcattttcctgtctctaattttttcattattatatgtatggtaattgagcttgctggtctgggagacggaaaataactgtattatctgtctagggaatgtgcatgattctagttttatcgtctctattaggttttgggttctcaggtttcttaatattgcaaagctatcatgatagtatttaagaaatgtataaaaaaaaaatgtatgtctgcttcagtactgaagttattacttaaatgaatgcagttgctggaagcagagatcctacgtttcagtcatttgcgtgatcgtgctagtgacatgggccgcagaaaagaatatccttatctgttgaaactttcaagttcttgtcaaaaataatgatttcccatgctttggaaatgctcctctctgtgcatgtttttgtacttcagggaaagagcattgaatctatttgtagtggcagaaagcatatagtttccttctttttattcacttcgttattccttaactatg

SEQ ID NO: 13739 - DNA, 3000 bp, Unknown
  misc_feature (1)..( 3000): cDNA_ID_2714000_gDNA_ID_2214647_Annot_ID_136386 3000 nt of promoter + ATG
aggaagctggggcttcaatcgtcaaagaagaggattttgtagctgaagctaatttgtcaggagataggcttgaggaaaacaaagaagtttccatggaagaagaaccttcatcacatgagctctcggtttgtgaggtaaacggagttgattctttgaatgatgaggaaaatagagaggtaggtgaacagatagtttgtggaagtatgggtggtgaggagatagagagtgatttagagtctaaaaaggaaaaggtagatgtgatagaggaggaaaccacagcgcaagctgcttccttggttaatgcaattgaaattcctgatgataaagaggtagcttgcgtggctgggtttacggaaatttcctctcaagataaagggttagacgaatcaggaaatggatttttagatgaagagccagtgaaagagttgcaaataggtgaaggagctaaagatctgacagatggagatgcaaaagaaggtgtggatgttacagaagatgaaatggatatacaggtattgaagaaatctaaggaggaagaaaaggttgatagtactactgaattagagatagaaactatgcgcctagaggtgcatgacgtggctactgagatgtccgacaaaactgttatatcatcagctgttgttactcagtttactggggaaacaagtaatgataaggaaactgttatggatgatgtcaaagaagatgttgacaaggattcagaagctggtaaatcactggacatacatgtaccagaggctacagaagaagtagacacagatgttaattacggtgttgggatagagaaagaaggcgatggggtgggtggtgcggaagaagcagggcagacagttgatttggaggaaattcgagaagaaaaccaagaactgtctaaggaactggctcaagtagatgaaaccaagatttctgaaatgtcggaagtaacggagacaatgatcaaagatgaggatcaggagaaagatgacaatatgactgatttggcggaggatgtggaaaaccatagagattcctcagtagctgatattgaggagggaagggaagatcatgaagatatgggagtgacagagacacagaaggagactgttttgggtaaagtagacagaacaaaaattgctgaagtgtcagaagaaacagacacaaggattgaagatgaggatcaggagaaagatgatgagatgactgatgttgcggaagatgtgaaaacgcatggagactcctcagtagctgatattgaagagggaagggaaagtcaagaagagatgacagagacacaggaggacagtgttatggctgatgaagagcctgaggaagttgaggaagaaaataagagtgctggaggaaagaggaaacgggggagaaatacaaagacagtcaaagggacaggaaagaagaaagaggaagatgtttgttttatgtgctttgatgggggtgatcttgtcctttgtgaccgcaggtgaactttcatttgtagtttctgtgactttgctgttggtccttctccttcttgcttatggtcccttccctttaacatatgataaattttattaatgtatgatcctgttggcttgcaggggatgcacaaaagcgtaccacccttcctgtgtagatcgagatgaggctttcttccagacaaagggtaaatggaactgtggtaagttttttctgttattctctcagtaggtgtctgcttaaattaaatcagtgaactatagtttggaaaaacatgatacatcatctgctaagcacatattttctttcactagtgtatgtagtggtgaatattgtttactataggtatttagagtgtcttttaactgtacttccctagaaaatcatgacagcatatgtttttttatctgacttccggattatgacatttataacaattctttgtaatttaagcttcttctttcttcttttgtttgagttcctggcttgcagtttgtctttttaagtatttgctctcaaattattagtttgaacctttagttgaaagttatgtcaaaggcatttttctattgcttttcacatcatctttgattttcgtgttgttccttattgattcttactttagtctcaggcctgttgtaccactgtccaatgctacacaggcagtgacagatgttggattgtttgtgaaatggataagtctgattatcatcaaggctatgctcacccttttttgtgtacagtcatgactctttgagattccacaagaacttgtcaatggtagcttttagttgattctccgttgttcagtgtaaataccaaatagcagcagtgggatctgctatgtcgtttatttaaataaactataaaagtaaatacactggcattgatacttttaaatactttggtagttttctttccttgactatgggttggcgtggtgacatcatccagttttatcataccagaaatctacaccatttaaacttggtaacataacatattgatattaatgagaaagattaatttttcacgatcttctaggcaccaattaatggttatctctaagctattttcatgctgcaccgaattgtaaatgattcttgcatttatagcaaatggatcagattttttttggtacagatgttgttcaattccacaaactattgagatgcaggagcccaaaaaacactgtacagtctcttagtatagtactgtccctcatattttagaatacatgttttaaacttttaaaatagtacactgtttgagggattatttcccctaatttctttaaactagaattaattggcattctgcttcggttatgctgtatttttaagtttctctctgtgcatggtcatacttttgtttggttacctctctctgtgtatgtatgtattccgtgagctttcatcatttccatgtctttctaatagaacctaacataatgcttcatttttatgagtaggatggcacctatgtagcaaatgtgagaaaactgcaacgtacttgtgttatacatgtatg

SEQ ID NO: 13740 - DNA, 1682 bp, Unknown
  misc_feature (1)..( 1682): cDNA_ID_2704218_gDNA_ID_2214648_Annot_ID_136387 3000 nt of promoter + ATG
gaattcgattcaaaaaatgtgatgtggaaacgagcaacaacaattattgtagctcttgaggacccataggacgtgcatgtccacttatacctaatgagacaattctgtccttttttataagagcatcttccacagcttaatttgcgagcctcattcacgtcaatatataaggggtatgtgatacggtagatggattgattatttacatccatctacatgtaagttgaccagcatagaccttttacatagtgacatagaaccgttgaaatgccatccgattgatcaataatgttgggacagaccaaaaccaagataccaaaacggtaaagggacaaatgcgacaatcagatattgaactttaaagttgtggctctgatccagtttggcaacaacttcacttaaatttttgtgttaccaacaaaacagggaaaaagattcgctaaaagagttgcctaaatatatgtttgagcttgttgtcgatattttatgtttatctaaacagtaaaaaaaaaaaaatttatgttttatttaccacatttagaactaggcatatatatatatatatatcttattatataaagtatggtttttaaagttgctaactcataagattgtgtcacgtgtcaagtcaaacgatcagatgtttacatgtatcattcaaaatttaacttttttattctctaaaattaaatagaaaatcttaaaaagtaaacaaatttacatatactaatttatatgtctatatatttataaacaattaacatttattcaacaaaaggaaaattaacaaatttgtctttaactcatgtaatcataagtgaaaatagaacattttgagaaaaatagcttatcttataggatttaacttttcaattattttcatttattaattttaactcatttaatattaatttgcatgatgtaaaattaacttacgagattacggcatatatagaaaatatattttcaacaatgtttggtttctaaatattttgtggatttcttttttttattaattattagccctaggcgtttgggtattcgggtcgggtattttgggttcgggttttcgggtttagaagtttaggacccgttcgggtaatttaagatttcgggtcgggttcggtttgggtgggtttgagtttatttatatattgaaatatcaaattttgtgtgcaaatctattaaattacttgaaaatttcaaaaattcccaaaacaacacgagtagttttgcttgaatatatctaaaaatacacaaaataattaaaatatccaaaaaatcctaatattttctatatataagtataaatataactaatatatatttatatttgaaatatgtttggatacgtattcgggttcaggttcgagttttttgggttttgaagtttagatctgttcgagtatttgaaaatttcgggtacacccgcctcaataggcgggccttatctagtatatatatatatatatatttttgtgatggatttctttctgtctctctctatatatagcatataaatgaaaatgaattatatttgcctttaagggagaagaaagagacttactttggatatcaaaacatgtcttgctctctattctaattaagtctagcctatctacaacatacataaacctctatctacgattatatttggatctacaagtgaagattgatcgatg

SEQ ID NO: 13741 - DNA, 1919 bp, Unknown
  misc_feature (1)..( 1919): cDNA_ID_3031681_gDNA_ID_2214648_Annot_ID_188582 3000 nt of promoter + ATG
tgtagtagtactactacttggtttgcataatctgaatcaaagttttacaccaaaaaaaagaaaaaaatctggattaaagtaaaccccaattaattaatcatgcgtgggattgactcattttgacatcatagtatgtgtttagaaacattttttttagcaaatttctagtcatcaagagtaagtaacattagatggagcgtaaggaaaaaaaaaatacattaggattattatgattatggcattcggcccaaaatctcttagtattcaaaaaaaaaaaaaaaaaatttaaaacmaataaatagctaaatagttacatgtagtygmactactacttggtttgcataatctgaatcaaagttttacaccaaaaaaaagaaaaaaatctggattaaagtaaaccccaattaattaatcatgcgtgggattgactcattttgacatcatagtatgtgtttagaaacgttttttttagcaaatttctagtcatcaagagtaagtaacattagatggagcgtaaggaaaaaaaaaatacattaggattattatgattatggcattcggcccaaaatctcttagtattcaaaaaaaaaaaaaaaaaaatttaaaacgaataaatagctaaatagttacatgtagtagtactactacttggtttgcataatctgaatcaaagttttacaccaaaaaaaagaaaaacatctggattaaagtaaaccccaattaattaatcatgcgtgggattgactcattttgacatcatagtatgtgtttagaaacgttttttagcaaatttctaatcatcaagagtaagtaacattagatggagcgtaaggaaaaaaaaatacattaggattattatgattatggcattcggcccaaaatctcttagtattcaaaaaaaaaaaaaaaaaatttaaaacgaataaatagctaaatagttacatgtagtagtactactacttggtttgcataatctgaatcaaagttttacaccaaaaaaaaaaaaaacatctggattaaagtaaaccccaattaattaatcatgcgtgggattgactcattttgacatcatagtatgtgtttagaaacgttttttttagcaaatttctagtcatcaagagtaagtaacattagatggagcataaagaaaaaaaaaatacattaggattattatgattatggcattcggcccaaaatctcttagtattcaaaaaaaaaaaaaaaaattttaaacgaataaatggctaaatagttacatgtagtagtactactacttggtttgcataatctgaatcaaagttttacaccaaaaaaaaaaaaaacatctggattaaagtaaaccccaattaattaatcatgcgtgggattgactcattttgacatcatagtatgtatttagaaactttttttttaacaaatttctagtcataagagtaaggaacattagatgagcataaggaaaaaaaaaatacattaggacaaatgttaatttggaatctcttaaatttagatttttttaaaaatgtctatctgtttttcttctagataaaagtgtttcatattatccatatatattacttttaaagaaatctttttataaatagaatagtatttttgtagagtatatccggatatgttctgcgaaagaagaagaagctcacgagattagtcatgctgacatgggaactagctgtcttgagcaatcattcatctctcagatcttacacgtcctccaatcacagtttcacacgtcaccattcgcggcgccatgtatctgcttctctgatttctgataggtcccattttattctctcccacctactatataaactcccatttttcctttgtttttcttcaacccaaacaaaaaaacattttttctctataaatcctttattattgttataaaaactccgatg

SEQ ID NO: 13742 - DNA, 3000 bp, Unknown
  misc_feature (1)..( 3000): cDNA_ID_3031704_gDNA_ID_2214648_Annot_ID_188579 3000 nt of promoter + ATG
atgaaacttaataacttaacccagtcaactagaatcagctgagttgatgtcatacattcataactggctagagaatatatatatcagaccaacacagtaaacaacagagattcaagttctgcagtgttgcagtgttgataggcctataggcccaagtgagccaacttatgtcttttgacttgtcgtctgtctgaggaaatctctctctattctagctttgtagataaaagaaaccatttagagtattggatcaacaaccatggattttacattgtggccagaacatttattgtcaatggaattgtttaagcaagacatgactttgatcacacagcttaggcgttttatacgtcttttgtttctccctctcacacacaccggaatggtaaagtttatagacaacaaaagtttatctatcactggaaccttacaactatacaagaaatgtcgtctgtgctttgcttagagactgcttcttctatcaactccttggctgccgcttgtggatcttttatgcttttgatcaaatccaccgcttcttggttcgacatcacctgataattaatgcaacactcgtcaagacattgttaaagatttcatcactctgatgataacatgggacgagatctcaaataccttccaaactccatcacttgcgaaaaggataaactcagtctcatgatcgatattctcgtctcttatgtctggatctgagctcagatgtatctttaagctcttatctccaaacgccctagcaaccgctagttgtccatcaactcttggaacatcccctgaaaccattcaagaatcgtctataaattcctcttctcatgttttatatgtgatgagcaagtaagtgtctccatctacaaaacttacctggaatatttgatacaaagccaccacggctttctatttccttttgttccttgcttggttcatgatcaacagagagttgagaagcaacaccgttctttgacatcactgcacgtgagtctccaacgttagcaatcactagcgttttcccatctatcagaatgcctgttacagccgttgatccacctttgccaagtttaagtgactgctctaatatcacagcatcggttgatatgtatgcattccttatagcgtttttcgtatcagtccaaaaatccttctgaaataagtgaaacaacaaaaacattttaagtcttatcagagacattatagaaatccataaaaacagattcatgcatgctttaaacatgagttacctctttgagtatgttatcaaagagattggtttgcaagtacttggctacatcatgccctaagtgaccatcaaagatagcaaacaaacccaaatcatggccgtctactttcttgaactcagacacaacatagtcctccatcggatggcccgctttgcctttcacaaagtcataaccgtgtgcgatgttcttccacaccttggttttacctctgcctgtgtcagatccgcataatccaaccttcaaatattcacacccaaacaacaagaaattatactattagtttcatttttaaaaaaaacttttttactactcaatacattataatcattttattcttaagctaaaaacataagttgacaaataacagcaaaatataagaagaaaaaaaaaagcaaatatgaaaataaatgagaaagataaattataaaatcaagtttggtttgataaacaaaaagaaattcaaagtttagacatttaaagaaaaacaaatgattattagatccacataaccctttgtaaagactcaatttcatgaataaaattcagcttgcagaacaaaacaaacaaaaaagatctacataatccaacctttaccaattcacaccaaaacacaatcacattaatccaagttctgtaatttcttcatcaagagcaacatacatacatttcattatcaccaaatctctaaccaaaaagagaatatagaaaatgcacaaattactgaaacaaattcagtaacacaagctctagaagaatcaatatcatcgtttaacatgcgagatgctaacttccttaaaacggctctacgtacaagttatcacaaagaaacaaatatagcttaatgagaaacagaacaagacatacaaggatcagatcacaaaatcaagattctttagagcccttgaaacgctactaaagaaaaaagaaaaagactagcgttgagctaagcataccttcatcttatggagaatctctctgcctgccattgttacaagaatttgtttctctgcctttgtgtctgaaatatgaatgattctaagaaagaaaaacagagagatgagtttatgtaataaatatgaatgtgaggtaatcaatccacatgtgaacagccggtgattcttatcattattggctactgacttcctccgccgacgacttttcttctttatatttttctcaaggcaaaagtattccctaaacaaattctctctattattatttgctacattctttcacattgccgacaaaataaaacattacttttaaaataaaaaactgttatttcgtgcacatcatctcattcattacattattgatcggaaaaatatttttttgttattacttaaaataacaagacattattttatcagtttttctagttactctgtcatgacaacatgtgcaacaaagaaaggaaactttatcttaaaaatattttcaaacaaattcgaacaaaatgacgtcgacaaaaagaaatacgcgtgtaaaagacaaaccacacgcaacaaaggcgcgtttagcgcgtaagactagaatccgtggacctgaagcgcgtgggccgggattttcatttgtcttaactgaaacaatgggccacataattaacaaaataggcccatttacacttttgggttatatagaatatttgctctggtccaacaaattttgaatttcgaaagttaattttttttgaaaagcttcacttcccactctctctctctctctctctcttcctacggctgcgaaa

SEQ ID NO: 13743 - DNA, 3000 bp, Unknown
  misc_feature (1)..( 3000): cDNA_ID_3031708_gDNA_ID_2214648_Annot_ID_188578 3000 nt of promoter + ATG
ttctcatgaaagcctgtctcagttaggttttctctgcaagtaatccgtgaggtatgtcagtctctgccacgatcgttaacatacaagtacatggcttcatgaccaaaaagtctttatctacaatctaatcagcaatattggagcggaataaacttacggagggtatcggatcagcagattgtctggcttgaaatcaccatgaatgattccaacactgtgcaaagtctccagcatgttcagcatttctattgtgtaatacatgcacaaaacttcttccatggactttccaacaacgacatacgagtttatgacgtccttaaatcacaaaaagaaggcaaatgaagcaaagaactatgtttgcattttgtatattcagtccgtgagagtcctaagataccacctacctggagtgtcccgtgtgataaataatcgcagacaagtatactgtagtctgaatacacgtgcactctctgagccaatccaaaacttgatctctaacatagcatgagagtaattagtacggtgtgaaacacctgtgaactggtaatattaatggaaaagggcatacttggctatctgggatcctgcaatcaagttggcgatacatgtggaattcccaaggaaaaggtggtttttgtacctgtgaagagatttgtatatgcaatatgagcatttagcatcatactgtatttgaaaaaactttaagggtctatctacctttagagcaactacttcatcaggattgctgtcaatgaatgctttgaacacttgagcaaaaccaccttggccagcacagcccttcatctggtactttcttccacctagcaaatagacagagccaatggatccaggtcactttttttattttagtctcagagaagacatattgtcccaggtgagaacaaagcgggaatcaatttcttttacacaaatgaatacatgcccagccacttttaatttgaaaaatgcatcttataataaaaagaaggattctttatcctgtagcggtgacagactagattggtatgaaaaaagtatacctatctcaatgatcttatttctggaataattctgcaaagatgacaggttggcctttccagggaaaactttgttgcttacatggtacccctgatgcaaacataaagaaagaaactcagtggacaagcctccctatataagttaaatcatgtaaaatatcatgattttccatcagccttacatcatatttcacaagctgtggttttatcttgtgaattaagccgttcacagtggatgtttcccatggattcacaaaacccgtctccaagtcagtggcctgagcatcatcaccaacctgccagaaagaaaacgttcaatcctcaactaaagctatcaaagtgcattagaataaccatatgctactcattaaaattaaaaaataaaccttttcaagggaagatgctttggtcctcttagagattctttgtaagaacaatgagtgagcctcttttaacctgtcaaatggttcagctttcctacaattctccaatgagaaacaaataagaaatgaaaccacaaactagaggaaaaagataaggaaggagccacagaacaaggagaaagataagagaccttgaaagaccagtctgataaacagaatttgctcttcgccacaatcctttgacctcaagaaaaatagcataccattcatagagcaacgaatgccctttacatatctcagtctcttcaatttctctataaaccctctcaaaatcttccctgccttcaagctaagaagagattcaacaatttaacccccaaactgtaacatctacatcagttgattcgcaatataacaatcccaaaccctaagaatgctaatcaaacaaacaatcgaggaaagaaaagcacaatttaagctcaaacaagttgggagagagggttttagtaaagttacatagagaaaccagatcttgaggaatctgaggtcatttcggtaccgagaatctttcttataagttgagatacaatcaaatagaagcttatcgagatcgtatccggaatttttaccagcgtatagatcctccatcgaatttttaatctccctgtgaaaaccccaaaatacaacatcggaaaattagaatccattttgacacatatagcacaattagttagatgagaaggaaggataaagcatgagttacataagccacgggaagagcgggtctccggcggcgtctctgtaaccgattgtcattttcgcagccgtaggaagagagagagagagagagagagtgggaagtgaagcttttcaaaaaaaattaactttcgaaattcaaaatttgttggaccagagcaaatattctatataacccaaaagtgtaaatgggcctattttgttaattatgtggcccattgtttcagttaagacaaatgaaaatcccggcccacgcgcttcaggtccacggattctagtcttacgcgctaaacgcgcctttgttgcgtgtggtttgtcttttacacgcgtatttctttttgtcgacgtcattttgttcgaatttgtttgaaaatatttttaagataaagtttcctttctttgttgcacatgttgtcatgacagagtaactagaaaaactgataaaataatgtcttgttattttaagtaataacaaaaaaatatttttccgatcaataatgtaatgaatgagatgatgtgcacgaaataacagttttttattttaaaagtaatgttttattttgtcggcaatgtgaaagaatgtagcaaataataatagagagaatttgtttagggaatacttttgccttgagaaaaatataaagaagaaaagtcgtcggcggaggaagtcagtagccaataatgataagaatcaccggctgttcacatgtggattgattacctcacattcatatttattacataaactcatctctctgtttttctttcttagaatcattcatatttcagacacaaaggcagagaaacaaattcttgtaacaatg

SEQ ID NO: 13744 - DNA, 3000 bp, Unknown
  misc_feature (1)..( 3000): cDNA_ID_2703977_gDNA_ID_2214648_Annot_ID_188577 3000 nt of promoter + ATG
cagcaatgcaatcttctacatgaatttcaaggcatatggaggtccacaatgcagaggaatagtaaggaaacaagtgattgaagactaggacatatgtgatcgatcgatagatagagagctgatggtttttgtgtctggataatactttttgcatgtaaaaaaccattgagacaagtcaatcttttacattgtaattgatttaacacaatatacttactacatcttaattagtattaatgagagttttagtactagatataagtcgaccaaattaaaggaagccaaatgttggcgttagaagcatattgtggtttaaaagaaaaaataaaaaataaaaaagaaaaaagaaacttgtgagtcaagtaaagaaaaacaaaaccccaatttcagatttatgtttggttccgatttaaaagggtcttttttttttcttactttgaatattttacaacattgacaaggttactctctctcccgtacgccactactctgaattgtgtttgttttggtactttgaatttgtccgtccgtatgatgaatattattctctcctttctatgcagggaagctgtggatccggtcgacaaggaaatgaggaaattggtctattctatttacggagaggtaaaaccgaaaagtagaaaaaaatagaaagggaaaaaaatgtagagttgcgattacaaaacttttaaaatatatagaaagtagataaaattaaagattttaaattattacattagagagttttgtatattttgatttataatttttccaaaatgataacatatctccaaaatattgtgtaatatattcccctcttctataaaaatcatctctaccaaagtgaaaatcacacgtataaacacaataattatggtatttgtgaagtaagctatgaacatggaaccatccatgaaaaacttgaagtttggttggatatttacttttcatgtgttggattaatgctttgttttaaaaattgtttgtgtggtgaattttcacagaaattagaaattatagagaagcaaagagtataatttgtgaagaaaaaaatataaaatcataatccaataacatctaattatactaaatcagcagtcacttttccaataactgatgcattcagtgattgacacatcaccttagtactatttttttattctttcattttcacgcaggatttttatgtgtcgtttttatttaactttgtttctttctcaaacgattttctctttcatccccacgatctccacatctccactttctctcttccaaaaactccatgactactgtgtaaaatctcaaagatgggtttctcaacatcattaatcgattactcagaaatcaggtactttgttcatctcaatgaaccaatttaccattttctatttctgtttgtaattttgttttatatatatagaattctccatagatccgaaaatcatatatccttcttctagatttctatggctttttttttttttttttttttgctttgtttctgctttatttgactgaattcgatttctctttttccataggattattctttaatacaatcaatgcatatgattctcctgtctcacaaacactcaaggaacagcgacaaattttggcttctcatcggaacagttgccttaaaacaagggtgaatttaatatcttaatggaagctcaagtgtttttttaatggtaaattaattctcatactttttactaatcttctttcatctcttattttactctgcaatttcgtttttgtattatctcatgctacaaaacaaaacaatgtcttctgtagcaatatctcactcgcttgctttctctttatctcagtttggtcttcttttgaaacttctgtagagaacgtaacatccaagcatgggacgaccattagttgacaagttctttgtaagtttcttttcagcatcctctttctccaggtgtatttactgtcaagtttgttacattcatgtttgatactttgatgcataagtcatcataattatagagaaaacgtaatgtctttaatttacagattggattacaattgggcaattcacttacttcaaaagctaaatgcaattcacaactaaattattattttgtatgttgagcaaacttagaatttcttagttagaaacttgcattcaatgacgtaatggtttaatggtttaattggtctgtttgacaagattttaggacaaaattgcattttttttttgtattcatctatggtcattatcttttgacatgcaaacgtttcaaaggcagcgtgtacgtcatgtagttacttacttacttgtgcacattttacattttttctgagacttccaagctttgggtgtcaacgaatgtttgtaaactgaattactgatgatgagaagaagaacacattacaattggttggagctaatgatgaaataagcggacatgtatatacccagcataattttcgtacctatactctcttatatttctaaactcttgatttgttagttactgtctatcccaattgattcattgggtagaaaagttgtaccttttttatatctttttcttaatctttgtatattcttcggtcaatgataataaatttgttgtatatttatgttgtctgctttattttaaaaatcttagttaagagttatagcagatataatttaaaacaatgttgtccctgcatagcaggggccaaatgctagtaatattttaattgactaacaataatggaaagtgttgtttattttgaataacacaaaaattttaatgactttattaaagtatgaatctaataactccagatttataaacactttaaattactttttataaatcaaaatttaataataccaaagttttataaacctttaattaaataacaaaaaaatttcataacatttcaagtaattaaaaattcatataaatcacaaattaataacacccctataagttaagtagccagcgtcgaaagtttgtttggtgcgaaatcagaaagatg

SEQ ID NO: 13745 - DNA, 3000 bp, Unknown
  misc_feature (1)..( 3000): cDNA_ID_2703973_gDNA_ID_2214648_Annot_ID_188572 3000 nt of promoter + ATG
aaaaaaaaatcaaaacacaagacttacttaaaattttatccaagaagcaaatgctaatgattttagctgctcactgactttggataaacactcatagattgcattcttagaagatattagatcattaaaaactctttgcaaaacagtaagaacatgttgttgaacatcacttttttaaccgatttgataagatcttgtatatctttcactcgctaaagtgtttgttctataactttttcatggtttgacattgtaaaacctaaaacattcaaaacactgagttttcagagtgagatgtagataattaatgattagtcattcataattataagctttagattacatagaattatatagtaaaagaattttctatctataatggatagaaatatataaataataaatataaaatattcttaacaaaatctttcaagatatttcttgtcaaaatctatcaagatttataaataataaatatagattacatggaattatataattaatgattttccaagatctttctttatttttattttttaataacttctagcaaaatcttgactcttaaatgaccaaggaaatttgttatataaaaaaaaaagttaccaatgaactttactttttacacaaagcttgcacctctcacacaaacttccacctttctcaatgtcaaacacaagataagatctaacttgatagaatgcttagaagatgcaaataattatgcaagagatgaatgaaagagaaagctaaaatgtaatccttgatgtacacatatctccatgtcttttaagaacttcaaacatttcctccatcaaaggcatgatgaaataatctttgatgtacacacatctcgatggatcacgataagggttaggcgcatcacgagaacaccctatgaacggcctatcttctttaagttgtagttcactatccatgacatatattgcattgctactttgtggtttagaccatatcagtaatggtcttccttatcaagagtgtttctcttatctagacttgcaaaatcaatcaaatcttgaggagaacagagtgtatcatcacgtccatcaagaagccttataactcgtatgagttcactcacaacaatggccaccacacatcttacaaaacacacataagaaaaaacaaaaggagttaaaaaagtgaagaaaatatttcaatatcatatcttatctatattacaattagagtagttgtattgtaaacttttcaatattgttttaaagattctcatatgtacttcatatatatgtctctttatattgcagcatataataatcttttctctacaaaatattcattcatatgtccattcctttttctcttgcaacttaactgtgttctttctgatctcttaaagctttcattattatccttcaatcagctttcagtaaatctgggattttgaaataaaactacaagaacaataataaattgttagaccaaacttgtttcatagagaaaaaaaaaagaatctgatacacttacctaacatgttgaccaagatgcaaatgtagattatttaatcgtcctcccagctctcaaaaaaaaacccatatctttagcaatttctttcaaaacatggagaatattttttcgagcatcacttataccaaccagtgattcaagaagctggtgtagttcaaaaagtatagccctcactcgtcgacgaactttaaatgaaagtaatgaaaatctggtattaacttgaaactttcacacttctcttccacttttatcctttcacactagaaaattacaatgtgcacaattatagccgtttcacacttctcttctacaattttttttttcacatcaaaaaattatttcaggtttttgacacatattcccaacaatttatttttcttaataattaatataatttttaaaatatatcaatgtacaaaacataggctccaaatggatgacaaataattgaatatttgggtgcaaatggttgcacaatttaaaaggttgaagaggttaaaaacattattcaattaatcttcagcattttagttgaaaaagttgaaaaaattattcaattcattcaacttaaaaagttgaaaaatgaacaaattataaaggaaaagtgttcaacttcttgatccacatttttggagatgatcattcaaccccaattttgttcaacctaataatttcaactcattcaattttgaaaaaccatttgtacaagttgaagatctttcaacttattcctctacaaaaaggttaaacaatttttctttataacttttttggttgaatggatgaaattagttcttagttatttatctcaaatagtaaaaacataagatgaatgatcatttaactttttataacctcttattttcaaacaacatttgcacccatagtctaaaaatagaaatttgttgaccaagaagaatttggtatcaaatgaatattttttgtggctcaaacttttattctctctttaagtagctgaaaaattaacgttggaaagtggggtctacagacctttacgcccatttatttacgctacaatggttttctaatcacatccttaatcttacaatttgtttgataataaatctactaattaaatttgacgtcacaaatcacaatgcactgacgcccattagcatgttagtgacaatgtaaccaaactgattcatcacatttcaaactgaactcattccggttgactaatcggttgggttttaactcgccaactattcttatcaggccaggcccaaacattccttcacaaagccctgccaatttgattaatttttgtggcacgtgattttagttttgtgttaggtctcaccaagattattgatcacgttccataattcaaaactttgcattatataccaaaaatccaatccgtattgaaacttcatttgtaaagtttttttttttcccaaatagtactttttttttgtttggccttcttatagaaagaagaactcaaagcacagagagaagatg

SEQ ID NO: 13746 - DNA, 3000 bp, Unknown
  misc_feature (1)..( 3000): cDNA_ID_3031736_gDNA_ID_2214648_Annot_ID_188568 3000 nt of promoter + ATG
atacaaattcggtaaaaaatcaactgaaagttaaacaaaaaaaaagatgaatgtatcgaatcacacttagttaaatagaggttggtttcacgaaaaattaatataacaatatcaaaagataaaaacagagtttgcttttataagatcaaagaaggtaaaaaaagaaatggcaaaatggagtgcgatcgtattgataatgatggtgatgattgttgcggtcacaatagaagcacaagaagaaagtggtgggactatttgttttcgccaatgttctcagccttgtcgcagtgacgacggtagttgctatgaaaactgtaaaatcgaatgcggtggtcccaagcctcccttatctcgtctacggtaatgtataaataattatttgcctttaatttatatatatgtgtgtgtttttttttcctaattacttatatatatatatatgcatgaatagaagctcacatgcatgagatggcatcatcaatggaagttcgcggaaggataggatgataaaaagagatttgtagcggatttttgatcatctctactgtttttaacttcacgttttatattataagagtttcattaaaaagatcaataaaacgagaaaatgtggaaacaaaccttgagttaatttttctatcaaaaagaaaccatgagttttgtcataaaacatgttaaaaacctgagttttgttttaagtatttaaaccctgagcgtttaataaaagtgtaaaaaaaaacctcaaaactcaactagatctaaaacgaacaaaagaaaatagtttcaatctactctatcgcccttttccgccacaccatcctgatcccctttgctgactcctctctgagttatgtctttgcttaatttgttcaggacataaagttattttccatagttcaagagcaagtaaagtataaccgtttcagtgtcaccaagataagcaaaaaaggaagagaaagttacggtgtttgaagatcttacaacaagttaaatatcacttgcaattgataagaactggaggccttggacatgaacaagaagcatatacatgtgatagaagccatctttaacttatgtggaataatcataacatacaaaattttacaaattgatagagttatctatgacctatgatgagagatcatgtttgaagtcacaattggctctattttgaccaattttctttgtagctagctatcacataacaaagttcagtattttacacacaattgtttgttttttaatctaatattaaattatattcaaagactaataaacatctatacaaattaatgcaaactttttaagaaaaataataaacaaaagaaattatctttcattgtgtgcctttgatgcaaaccaatctcgtaaacctacttcatacttccgctcatctccattttgtattgtacttaattaattattaatgttcttatcgatgattcttatcaccctctcgcttggtgatggctcgtctctatgccttctattgttcctctctttcaaaatcgagtggatcgtgttttgaaacacataacatagagtgaatgtttttgttatgtcaagattgtttccatttaataattatttataaataattaagttaaacaattgcaaaataaaaaaaattatcaaaataaaatgacattatctgtaagcaatattccttagttctacttttttgaactctaattaaaatcggatgataaaaaaaaaaacatactagtatattgcttgaaattggcaaaaataaacactcccatagaattatgcttcgttggcgattggacaagcgaaccagtaaccgtttctcttctttggcctccatcttttccgattggtttagggccgccggcacttgtcggcggttccatttcttctctttagtttgattttgctttttgttttaatctaaataaagtatttgctctcaattctggatttctaaatccaaacttcttcttcttatttgtagttttaattcacttttagatctgtaagaaaaatcagttatgtatagattccaagtgtttctgttcaacatacatggtggaagatctatggatgtgaacatgagcctttggatgtgttgggtttcttaccgaaatgcaatttccgacggctacgccgtatttgttccgacataatttgtcgattatatgtcaactctaacatgtattgttagttttgtgttagtttccggtggtcatcgcgatcgtttggtggctttccgatgtttgaaacaaatcttcatagatttgttgtggaaacggcgaccaccttggaaaccaccatggaatcaaatcataagaaccttgtatttctggtctttgaagaacgtcaacaagagaatcgagatcatggatttatcatgggcaacatttacaaccaaaacaatgtcattgtctcacgcgggtgatggaaataattatatggttagcgatgtaactgatggatcgcaaccttttgattttcgaaaagtgtgttggagtttcattaaagagatgatagccaaacaagaagatcaaattagaccgaagacgaagacgatcaaggaaaataacagattgataaccctgttagcgtgtaaggcttacctacgaaaggaagcaatgtgtaatttcactttttcgattatttcgttcaacttaagtattggttgtatggattgtagagctctcacttatatgcttattggtatatttgtaatctctttttaagtttaataaataagacgttaaaaaaaaaaaaaaaaactcccataagttttacgccgttaaagagagacggagcgacgtttgctacgaccgtcaagattcaaatggaatcttttttaaggaaaaacaaaaattcctccaacggctatatctgatcagacatctctgtcttcttcttggatgcggaaaaggaaaaaccttattacttgtttgagattctcaattcaattctctgagattcttaaattcaattctctgagattttgcccttttcataataatg

SEQ ID NO: 13747 - DNA, 1682 bp, Unknown; identical to SEQ ID NO: 13740
  misc_feature (1)..( 1682): cDNA_ID_2704218_gDNA_ID_2214648_Annot_ID_188565 3000 nt of promoter + ATG

SEQ ID NO: 13748 - DNA, 3000 bp, Unknown; identical to SEQ ID NO: 13746
  misc_feature (1)..( 3000): cDNA_ID_2703969_gDNA_ID_2214648_Annot_ID_136389 3000 nt of promoter + ATG

SEQ ID NO: 13749 - DNA, 3000 bp, Unknown; identical to SEQ ID NO: 13745
  misc_feature (1)..( 3000): cDNA_ID_2703973_gDNA_ID_2214648_Annot_ID_136390 3000 nt of promoter + ATG

SEQ ID NO: 13750 - DNA, 3000 bp, Unknown; identical to SEQ ID NO: 13744
  misc_feature (1)..( 3000): cDNA_ID_2703977_gDNA_ID_2214648_Annot_ID_136391 3000 nt of promoter + ATG

SEQ ID NO: 13751 - DNA, 3000 bp, Unknown; identical to SEQ ID NO: 13743
  misc_feature (1)..( 3000): cDNA_ID_2703981_gDNA_ID_2214648_Annot_ID_136392 3000 nt of promoter + ATG

SEQ ID NO: 13752 - DNA, 3000 bp, Unknown
  misc_feature (1)..( 3000): cDNA_ID_2714034_gDNA_ID_2214648_Annot_ID_136393 3000 nt of promoter + ATG
aataaaaaaaatataataaaaaaagaaaaagtaaaagagaaggaagaaaaagtaggagaaaaagagaattaagtttctcccaggaaaaaatttgagaaactattctcattcaatttggacagatattatcctactataagtttaactattaaactagattttaacccgcggtataccgcggggacaacttattttttaaattagtatatataaaagtttgcaaattaaatctatttatttttattttatagtttacaattgttattaagtaacgtcctaccaaacccgtctcgccaaatccgtcccgtaaaaaaaacccgcggtacaccgctaatttaaatatataattaaaataaatattttacggaattgcaattgtattttggtttgtcaaacaaatatttgtttaaaatagttaccaaaatctagttcaaattttggagaaaaaagatttattggatagataaagaatgtatctaggtgggttttgctcattttaagggattgcaattatatttttgtttgtcaaacattttttgttttaaatagttgctgaatatatttagaatatttttagtttgttaatcaatttatcgctggaaaaaaatcaataattaatagttaatggcaaccattgtaaataactcccaactctaggatttattttacaaaatgactgcaaaaatgtatatatagataacaattaatatatctgtcttaattaaaatattaatattttttttttttgagaaactttactcacttatactgatgatggagatggtcttacaaaaagtaaaactccgacattccaagtttccacctttgttctctccaaacatatattatactaatagattagagaagaactctataaagtttttaactttctccccaaacgaggaatctcaaagtcaattgctgttctgtgattccagagtgtttgtttctctgtcataatctcttctagttgcggtttgttgggctctcactttctctttcagccgatttgatctttcgtttcttgtggtttgacttcacttgaagcaagctcttttattgatcttattgtctcctttatgttctgatgattccgcattgtgaaatcactagagattttggggttgtgatatgaataatctggggaattttggggtttggggattcgggttcttctccttatctatttggtttgcggttctgcaacaagctaatggactcagacccataagggagactgctcggtcctggggcgatgaggtttgtgttgttttgatatgatcgtttcaaattgttttcaatgttccttgattttgtgtatcagctaagtctttgattagtttgctgttcatgtgttcgttgacttgattaagttgcaatagtagaatttctgatagctcagaatctaggatgggaattagattatgcagttttcgtctctctatttgccgccgagttttcgatagaatgggaaggctgagactgttttgtgatcttgcagtggctctttggcaaaaaagaaaaaggtggagcaggaccgttttctgcgtggaatataacaggaacatatagaggtttcgtggcattgtattgttgattttctttctgcttcaatatcataaccttgaagctcatttccgtgatgtatttatgttacaggcacatggaagtttctagatactgtaaatagctcttcaaagtttccagatttcagaaaagaaagtggtaactctgtcattgagttagtgacaagtccaacaaaaattactggtgtgcattatgttcaggtgaatagtcgctcttcatagtcttttgcatcatggagatcgtgctttttgatcttagtaaaaactttgcaaaatcagaacttgtgttaactttgaatgtgaacagggtgcagttgttttccatgacgtatttgacaatgaacacaatgtgggtggtgcccaaattaaagttgaaggtgtatatatttggccctttagacagctccgtcttgttgctaacaggtataactacatttttttttaaaatctatttaactgctttcaagatccagtattggtagtgttctctaatgtctgtacgtttaatgattgatcagcggaaagaagagtgattcaggactagaagacgattatcttctctccaacccctatcatctggtaatgcctgatgtgatccactttgccacaagatgatggatcatatttctgattcttcgttatctttatttgatgcgttaaaatgtttggagagctgataagtgtcaacttttctgctgttggacagctcggtattttttcctcccaagtatttcaagaatctccaagagacagaatattgaaacagaaaacttgtgagtaggatctggatttgtttccatatgttttactcttctgctacatctgaccttcatttatgttgcattccagctccaatatatgagatggagaagcactgcaatatcgaaatagctgcccaaatatcccaaagcacttctagtgaaaacagtatgtatgccttctaacacttggcgttgaaatgatgatgctggctcagttcttgccttcttagctaattttagtctgactttgagaacgagttttacttattttggtagatggggacaaagatcgttatcaaattgaaggattgatggaaagtcctgcagtagatgatgaagtagattgtttttcgccattgtcgctgaatgcaacctccataaacgtcgaagtctactataacaaggctgtgaactatacattgatggtcacttttgtatcctttgttccaatctcttttccattccatcagaaaatgacaaacacatggcagttttagcggattccttaacttgttattgtacctaggtctcgttcctccaggttcttttattgatccggcaaatggagcacagtaacacacaatccgtaagattctcattgtttgtttatctgatctttctaagagaagagactggatgctaacttttggatg

SEQ ID NO: 13753 - DNA, 1919 bp, Unknown; identical to SEQ ID NO: 13741
  misc_feature (1)..( 1919): cDNA_ID_3031681_gDNA_ID_2214648_Annot_ID_136395 3000 nt of promoter + ATG

SEQ ID NO: 13754 - DNA, 3000 bp, Unknown
  misc_feature (1)..( 3000): cDNA_ID_3031785_gDNA_ID_2214649_Annot_ID_136396 3000 nt of promoter + ATG
attttttcaacaacactgggatttagtgaagcctcaaatcttaagtgaggtctttggtttttttcagactggtgttctacctcaggattggaatcacactcatatttgtcttattcctaagataactacaccacagagattgtctgatcttagacctatcagtttgtgttttgtgttatataagattatatacaagattttgattgcaatattgaaaaaacatctcccaaaaattatttccacaactcaatctgcttttgttcctgaccgtttgatctctgataatatattggttgctcatgaaatgattcacagtctgagaaccaatgatcgcatagcttatgaacatatggctttcaaaacggatatgtcaaatggcatatgatagagttgagtggccttttttggaagctatgatgaatgctctgggttttaacagcaaatggatatcgtggataatgcaatgtgtaacatcagtctcttattctgttttgattaatggtcagccttatggtcaaatcattccagaatgtggaattcgccaaggtgatcccctatcaccagctttgttcgtcttatgtactgaagcttaattcatatccttaacaaagcataaaaagaaggaaaaataactggtattaggtttcaggataaggaagttttagtcaaccacttgttatttgctgatgatactcttttgatgtgcaaggctacaaagcaagaatgtgttgagttattgaattgtttatctcaatatggtcagccttccggtcaattgatcaatttagagaagtctacaattacgtttggggcacaggttgatactgaaaccaaaaactggataaagaatgcttcaagtattctcttggagggaggaactggaaaatatcttggcttacctaagtgtttaagtggctcaaaaaaggaattgtttggttttattaaggaaaaactgcaatcaagactaacaagttggtattccaaaacattatctcaaggagggaaggaagtcctactcaaatctattgctttagctcttcggtctattccaggtcttgtttcaaattgcctaagagtttatgtaagaatttgacttctgtgatgatgaaattttggtggaacagtgttcaaaggaaaatccattgtattagttggcaaaggttaacattacctaaggaacagagagggtttggtttcatagatcggcaatgtttcaacaaggccttattggctaaacaagcttggagactcttgcatgagaaagaaagtctgttttgcagagtttttaagagccgatatttctctaagtctgatttcattaatgctaccaaaggctctagaccttcatatgcttggaacagtattttatttggtagataattacttcaggaaggtttgagaattgtgattgggaatgggaatcatacttctgtttggattgataactggttgcatgatggtcataatcggagaccaatgaatagacagcctctcattgatattactttgaaagaaagtcaacttattgacccggtgtctaggaattggaatcttaatagagatttatttccttggaaggacattcagattattatcaagcaaaggccgatggtgtttaaagaagattctttctgttggttacattctaattctggtttatattcggttaaatcaggatacgagttgatcaataaacaagtccatcatctgatgtaccaagaagctgaaattgctccttctttgaactctctttttgacaaagtatggactttgtaaacagctccaaaaatcaaaattttcctctagaaggcattacatggggctctctcagttgaagctaggcttagaacgagaggaatcattattgctgacggatgcttaatgtgtgatgaagaaaatgaaaccatcaaccacattttactccaatgtccgttagctcgacaagtatgggcaatttctcatttatcatatccgggatttccagctctctgtatgcaaatataagtaaattgtttgacttaactcagcatcatggtggtcttcacaatgtgagatttgttaatccatggattatgtggtcgtcatggaaaaacatgaataagttgttgtttggaggtatttcctctatgacaactactattgcagacaaggcttttgacaatcataatcaatggttcttagcgcagccttatagacatgaagatgagaaaattatgaggattatgcactggagtccacctttgcctggtgatttgaaatgtaatattgggtttgaatggtctaaacaacatcaattcttgggcgcatcttgggcggtacgtgattcacaaggtactgtcttatttcatagtagacgttcttttgctcaggtaaattctctcttttatgctaaattacgaagctgggaatgggcacaagaatgtatgattcatcatcaacttaacagagtgacttttgctgctttctacttatgagattattcaagcattacacaaatcgaatgattggcttcttctattaggtcatatcacagagcttttgagtctcagtcatgcaaacccaaattggttcctactagtagaaccctctctttgtaatggaggagcgactgcaattgccacaagtgttgttacaggttttcgatttcaaagctacatggctagaggacatccgttgtggatgacaaagctttttactgaagaaagaggaaactagattggagattgggatgtatttttgttttatttagtgtcgctttcttaagtctcaggtttctttcgtgtcaggtcttcttagtctgcaggttctattgtctttatctttcttttatcattcttaatttgttttaatatcccaatagttttattattatactttagtctttttctattcgaccaaagttttagcttctttggttctctaagtctatatatattctctgttttttagttttagtgttagttatccctttctcttttctctagttctctacatctcaac

SEQ ID NO: 13755 - DNA, 3000 bp, Unknown
  misc_feature (1)..( 3000): cDNA_ID_2704026_gDNA_ID_2214649_Annot_ID_136398 3000 nt of promoter + ATG
gagcactttcacaattaatagaaaacactgcattatacacttccaattctgtgacatcttgagttaattgttgattcatatccaatgaaacctttgcttgaaaaccattcaaaaaattatcctggcctattggataagaagatgaaaaaagatgctgaaagaacgaagaagcaattttccctttctcactaatcctggtgtgttcttgtccattttcatccagaaggaagctcaaagagttccctaatctagaagatttcaaagaagcatgaaaaaaccaatgtttttatcttcagcaaacagccatttttgactacttttctgtctccaaaagagttcatcatcctcatcagcaagacccaattgatctttaatatatgcaattctaggccaatttggaaactcataacttttcagcaaatccaaatctttcctcaatctttgaatcctactctaagcattagtatcagctgatttttttccatacactaatagctcttcgacattcaataagactaaagatagaggagtgagaaccttgagacattgcattggtccaagagttggaaatcacttgaatacaagaaggatcatcagctattcttttgtcataacaaaactgtccacgaaacaactcgttatcattaataaacttgactaaaacaggacgatggtcagatccaaatctctcagaaaccactggtgagaatttggaaacaaagaaaaccaagaggaattcccaaagcatctatccaatctacactgaatccattgaccatttctagtccctccccaagtaaagccattgcttgtactacctagttcatgcatatcacaagtattcaacatgtcttgaaaagattgaaacgaagaaggtactcttctcggacccctctctttcccgttttcgacttaatatcattgaagtcacctatcatacaccaagcttgcttccgatgtgatccaagactacacaacttatcccaaacctaaggcctaagatatgtcaccagatgcccataaacacaagaaacaaagcatactttatttctagaagaacactgaagatccaaaagatgtttatcatcaaaaagaatctcaatgtccaaatggcttttccaaaagattgctaagccaccacttctcccttgaggttctattgtatacatatagttataaccaagccaatcaataacttttgaaacaaactcgtcaggattcatagtctccatgaagaataaaatgtccgagatatgattttttttcatctccttaaggtgtcgaattgtccaaggattcctcaagccttgacaattccaactaaggacgccttactgatccaacggtggttcacttggaaccaccgtattcttgtctctcttgaaactttgagcttctgtaatgtctgagggttttcttttccttttgaacaccttttcaaaatgaggagaggcaggagactgaataaccttattcttcagagacagctcattaactagtttttctttcctgaactgaaaaggagtgaaatcctgcattatatgatgtttaaaccctgaagtggaggaactagcctcaccaacacatgtggtaaatccagtactaatgtccaaatctagcatctcagctaacaaagtattctctggatgactatcaattgcaacagtagctgatagaggatttgctggcaaagcatctacccttcctttgggagcaattgactgaaagggaaactcagccagcctcggtaaaaacatcttcttctgtttgcctttctcttgtaatgatctcacatcatgtttgatggaatctaagactttggatgggcatctatttttatcatgagttaatctttgacacaagaaacatctctttctaatctgttcatagtcaaaagaaattgtgacaacttcaccagatggaagttgtacctctttattgttacgaagtggattggcgacatgaaacaaaacccgaacacgaacatagtcctgaaactgtgatttttcagagtccatcaccacctccttcacttccccaatacagctcgtgatctctttaattgtgtcctgagtataatagttcaccgaaatattcctcactcgaccccagattggaagaaaattcagataatcaattggaggattctcaatccatctatccatgactacaccccaatttatcttctgtccaaactccaattttcataatttcttctaaatcttcctcagatttgaagaaaaattggaatcgatcctttgagagagcaacacctctaacccgagaagaaattctccaaattcgtggcatatctaatatccaattagacatcctttgattctctagattcaaaaacctacccaactaacgacagttgtttctgttaattgaacaaaagcgcggttgatcagaaagaatcagaggcttattgtcttaaatcgacatattctgaatggctttatccagctccatgatgagatcctgatagagagtaaacaactttcccgaactcgtcaaacctgatttgcaggaaacaaactccaagagaaaaaacagtgaagaaatccgagtaattcagatgataaccaacacagaactgagaatcacaaagcaaactctcgtaacagagaaagagtcagaactaccaaaaatccgaggaagaaaacaacaatttagaccggaccgaacacgtaaatatttctggtagaagctccgttcagaatagaacacctgagagaaaagtctttaggctccaaattaactgggacgactattgttttaacggctagtttcagctactaagagaaagaagagagagaaaaactttttgtcaaactctttttgtgaactccttttcttagatgacaacacttatgagaaaaaaaaaaaaaaattagttttgacgagacacggacataaaaaaaaaaactagggcagagtgactgataccaaaggagaaacaacaaagagacgaactgaagaaaaacctctcggaagaag

SEQ ID NO: 13756 - DNA, 1673 bp, Unknown
  misc_feature (1)..( 1673): cDNA_ID_3031750_gDNA_ID_2214649_Annot_ID_188610 3000 nt of promoter + ATG
caaaatagataggctaaaatttctggtggaaagaattaagccgaaaggtcaacggtatggtacaaagcaaaaaggcaaatggaccattattgccaaacttttatttttattcattcagattttgtgtcaaattgccaagtttagagacacataacagtagtacacttttgcactgactatcaatttaaatacgaattctcactgattaaactaattaagacgcatcattataaatttcttaaatcataaacactagaatccaaaatcgattttcatttttccctcttttcttttttgaattctttcctttttttgattccttcttcttctttaaattcaaaataatctcttatctctatgtcgattgatggtgcgaaagagaaaaaattgtgcctcaatttgcttaattaacgaaaattcgtgattaaattgaaaatcaacataaaaattgagaatttaaattaccagatacagaactcatagtttaaatcaacaaaaatagtaaactactgatttaaatgacatttttccaaaaaagcaaattgtacaacatattgtgtgatttggaccatatggtaccaaaccattataactaaattagataatttatgtttatattattatttcttctcaatatataagagatttatataataaccaataactataaaatgatgaaaattaacaaaataacatcataagctcaataccttaggagagaacatatttaacgtgtaactgtcaaagttactccaaacaaagtttgtgttctttttttataaataacaatgtttgtgttgaatgacctcaatgaagagatttgtttgatagtattaaatagctaatattttcttaaattttagtatagttatgacatatttgtatatggcctatttgtatatgatcagtattattctgttttattgtcttaaaaatgatcaatattattctgtatttatagataaaaggctatttttcgctttggaataatttttaatttcaagaaatacatactagttttatttattcatttagacatgtttgacatgagtagttgatgagtttgtcaattttgaaatacccactgagaaaatttattttgttttacataatggaacttcctctaacttacgaaactcttaattttaatataaataaacaaacgaaagaaacgaaaattggtcagttttttttttttttttctcttctggtcaatgccatctctctccctcgtcttttcagtttcctaatttccattgtttcttcaaaacaacatttcacagatagctccaccacgacctgacgaagatcctccgcgtgagcaagtttcatgttcttcttcttcttccgattcatagttttttttttttccggtaacttgtcatcaattagatctcgtccgaagttgaatctttagttcgcgagcttttggacaacttcgaggtaaaattcgttattctctacacaacttccgattaacgcttgtgtagctactctcaactttgctgcttgatccaatctcgtcttaagttgattttagctgcgaattggaaccgaattggtttttatgtaaaactgttactttttttgtgcgtgtattgttaagaatgatggatctagttatataagcttgaaagaagttagtttctttggtaggtcttagctttgcaatg

SEQ ID NO: 13757 - DNA, 3000 bp, Unknown
  misc_feature (1)..( 3000): cDNA_ID_3031766_gDNA_ID_2214649_Annot_ID_188605 3000 nt of promoter + ATG
gcagttttcttttttttccttacatcaggctggttttcttataagcagtaaaatgctcaaccgtactgaaccgggaataaccgaaactaaaccgaagatattaattaaagggttttctgcaaaataacccaacaagtcgatctcatttgcaagtttaccctccaagtccgaattatgcaagtcaaccccaccatctctaaagtcacccgcaatacaaccctcccgtatattgatggtgtggcactcgataactccgttgaaaaacataaggattttgtgcaaaaaaaacttcaatataattttttttgcaaaataaaccttcatgtcaaataaatacaaaccacaatctgaaaaatctcctgcaacatagcccttccgtgtatcgatgacgtgacagtcaataacttatttagagcatgagtcatttatttaaggtgcaatgtgcaatgggtaaacactaaaacttaaataaatgataaccgtaattttaaacaaaaaaacaaaattaaatttttgaatcgataactgtaactaaccaaatttttatcagattcgctctggttctttttttctttcaaaataactaaaattaacctaatttaaccgaaattaacaaaaaaatacaaagaagaaaaatattagaaagaaaattaaaattttgttttattttgtaaaagagtatttaattttgaaaaatataactaacaatatttgaatattttgatcatttaaagtatttgattgtttttctaaaaataattaatattttgagtttataattatagttatgggtattaattttggatattttctaagtttctggatattttggttaatcgtttggttatggtttggttttattttatttaaaacttagatcaataacttaattaaattatatgcattaaagtaatatattcgatagacttataaaatctctaaatgagttatcgactgtcacgtcattgatacacggaagggctatgttgcaggagatttttcagattgtggtttgacctatatttatttgatatggaggtttatcttgcaaaaaaaaaatacattgaggatttttttgcacaaaatttttatgttttcaaacggagttatcgagtgtcacatcatcgatatatgagagggttgtattgcgggtgactttaaagatggtggggttgacttgcataattcggatttggagggtaaacttgcaaacgagattgacttggagggttattttgcagaaaacccttaattaaaacgaaatatttgcgattttcacccataacaatcttattataaaaattaaattatggttttcaagtagtaagacatataatcgtcatagatatcaagtttattgatcacaaaaaaaaaaattttattaattttaaaaatataattataagaaattataaatttaaacaattttaaaaatataaaagataataacaagaaaactaaactaatatctttagctgcatagaattggaagcaggtacgcagaagcgaaagcgtaaaagccagtttttaaaaatatttagaaagcagatacgtgttgtgttggaagcgtatatatatatatatatatataccatgtatattatatatctatatcccaagtattttatatatatatatatattataaaataccaaacataaaatcatttagaataaattagataataatcaagttagaatatattagttaaaaactaaatttcaaatactaaagattagaagttaaaagcatagaaaattcaaaaacttctttaagtttttataaacttaggagagtatatagttttttccgtcgaaaatataattatattaatttgaattgtcaagatacaattgttcactaagccataatagcgggtacatacaatcagaaaaagtaacaactagtttgacatccgcgtttagctaatagatgtaatgtcttattaccactcctcttcgtgaagctaaacttaatgttttgaaaattttctgtccagtaggcgatatcttgatgaattccggcgatagatatatcataggtttttccattggtcatattgatcggatatcgcaatctccttcaagaattatagatcaaaatctttttatccatacttgttgcaatgccgataaaagggtttcagcttcagcttccaagggtgatattcttgtaacaagatatgatgctccctaacttagtgactgtaacgcccgcgggcatgatcatggccggtctaaccacggccatcccgggggtggggtggggggtggggggggtcatagatggagagaacctgtcgcaattcggctaaggtcccagggttccggatcttcggccgattcgtatccggtcatctccccactagattcaccgcgtaggcttgccaacccttgcggtgaacccggtgttgtgcggttcggacaaagccttatatcattacgtaacattcccgatttgtaaaactgattgtacttatatatgtactagatattatatgaataaaacatcaccaaatccatacatatatatttatattcggatccaagttttccaaaatactttagtacaaaaacggttttacaaaagcaacataaaacaataccctagttcggcggtcttaacgttcgtcttccctctactggttgattgcgacgggttacctgtaagacaagtagaatcatgagtaatctagtattactcagtgagccgggaccatgtaacaaagaacctattgcaactctaagccgatctaatgcaattctaaaaacctagaggggttaacaaacgaatgaaaagtaaacatgcgacaaacaaatcagagaaacacgcagtaagcaagcaaacatgcaaagataaacaaacaagcaaagagactcgacaatactctagacgcgaacctatgggtcttgagctccattcctcctccctaaatattggaagttgagttctcctatatggatctatcaacccgataacaactcattgaatccacacatg

SEQ ID NO: 13758 - DNA, 3000 bp, Unknown
  misc_feature (1)..( 3000): cDNA_ID_2703998_gDNA_ID_2214649_Annot_ID_188602 3000 nt of promoter + ATG
ggagttgctcgaagttttttgaagcttatcataaaattgaaccgagtttcttcgcgttttaggcttgaactggagaccggcaaatgggaagggacttaccaccgatacagaactggaccgcgatggctatcacagttggcggtgttcggcgtgatgcatgcaggggtgtccaattacctgacgcgtggctcggcggagttccatcactcaacacgtgtcagcatctaaagattaggattttaatctcgaccgttaaaattacgcttgtactttattttgggcgtttccctatgtaaaaagtccattgggcctttcttaataaaatcgttggccgactaaaaaaaaagactaaaatcttatcaactatatatacgttaaattgagattagtatccacagatttgtgcatcacaccacacaattgctacttgtaagctaccaaattagacaacattaaaaatttatatttttcatatattgattatggttttttgtagtcataagtttttcttctacagaggaagaaaaaaaagagtaaaaataagttactttcttttccgcatcaccagttatattaaactagataaagcccgcctaaataggtgggtgtaagatataaattcaaatttttatcgataattttaaaatttgaatagtaaatagtgtttcacacacctttttaatatttaatttagtaatttttgtattaaacaaaatattaatcatatacattcgattttactatacattttaactatttatttgaggataattaaatctattttaattttatacgctccatcttatagttgatatttgaattttatatattaactcatacacttttcagcctacaaaaaaaaaaactcatacacttttcaaatatttaatttagtatttttttcaaccaaaatttaatcttacaaattcaatttttcaaaacaatttaaatatctactttatcataatacaatacattttgatttgattgtattcaaactgaaatacaagtcgatttgtaatacaaatatagttttagtctatacattccaccttatttttagtttttctttttagttaaaaaattaaaagttaaatattttaaatatctatgtttcttttatttagttttcctatttatttaagaaaaaagtaaatattttttgtcatgtcaacatctgaacgatagacttgatacgtgtcacgatcacgcgagttagtaactttgaaaaccatactttatataataagattataggaaatatactctattctacaaaaagtcattcatgaaccaatttgcttacatgagagaaaaggcaattacgatttcgagagttcttagctaaacaatctgctcgagtattaaaactacgagctaatgctgaaagaagagaaaaaacaaactaaataccaaaaagaggccaattccgttgcaaaagttggtcaatcgtcttggtgatcaacgagagagatcaaatctgcgcaatcggtagcaaaggtatctgtatcgccaatgctgatcatgcattccattgcccctagcaaagattcaagttcgacgtaaagcggagataagttttttcgaagaaaaaaaaagttactcatgtaagcgagtaagtaactcaaaaaaacaaaaaaaaacctagttttctctctcgcaaaaccagccgccgtctaaagaggttttgcagttttgaggctagaatgcggtggctaccttagcactgattctggccttgtgcgtctttgtttaatttcgtctgtagatttcttccttctcgtttttatggtgatatggttgtagggttgatggtgttggggagtgcggggaccaatttctcttctatatctgtttcggaggttggtctctatgttgttggcagctcccgtttttaggctttgtttcaattttggctgtatatgcggctggggttttgattgatttccagatcttgatctggttttgtcagttgaagctatgtcagtgtttgtcacgatatggaattgtttccttttgtcttcccccgttgtgttctgtgtgtttgcagttgaagatgaagtcgttttgagttggtggatgcctctggtgatgggttctgaccgggttatgtgacgttcttgttgtggactaggcgacgactcgtcagggtggtggctgtttggaggcgatttaggttgtcttccggtgcgggtatttggctgaaactgggtcggcaaatgcatgcgtgcaagaggtgtttgtcttatttggcttgtcatttggcgattctcaagggcttcccttgttcctagtttattttcgtcttctcgtgtgccttggtatggtgtgattgttgtctctctagtatcatttggttcttgctttcgttcctggcggtttgacttcagaaagatgtcttaattttgtggcattaccagtcttattgctgcttcacgtgttcttttggaaatcttagtgagaacctctatggaacaataggtcagcttagtgctttggtctccatctcttctttttgcgagtttatcttgttgtttttacctttcttggtaatttggctgtctggtttttagggattagttttcctccttttggtctttgtctctagggatttttgtttatccgccggcttatgtatgattttcgacttgtatgttctcgttgcaattctaataagataaaaaaaagcgagtcacatatcaaaatttcaaaaagcttggtacagttttcaaaacatgtaaaacatttccaataaccgttttgaaattcattatttcaataacacggtttacttaaccggttctacgtagtccacccttacccattgacatttgacactctgtcccgatataatctcttttgacgaaagtcaggcaaagaaaaaaatgagaatcttcaaataaaaaaaaaagaagagactacggagagtcaaaaacagtgagagctttctttcatcttcagccagatcggagcaatcttctccatagattccgtgaaacg

SEQ ID NO: 13759 - DNA, 3000 bp, Unknown; identical to SEQ ID NO: 13755
  misc_feature (1)..( 3000): cDNA_ID_3031773_gDNA_ID_2214649_Annot_ID_188600 3000 nt of promoter + ATG

SEQ ID NO: 13760 - DNA, 3000 bp, Unknown
  misc_feature (1)..( 3000): cDNA_ID_3031781_gDNA_ID_2214649_Annot_ID_188598 3000 nt of promoter + ATG
tcaagacatgttgaatacttgtgatatgcatgaactaggtagtacaagcaatggctttacttggggagggactagaaatggtcaatggattcagtgtagattggatagatgctttgggaattcctcttggttttctttgtttccaaattctcaccagtggtttctgagagatttggatctgaccatcgtcctgttttagtcaagtttattaatgataacgagttgtttcgtggacagttttgttatgacaaaagaatagctgatgatccttcttgtattcaagtgatttccaactcttggaccaatgcaatgtctcaaggttctcactcctctatctttagtcttattgaatgtcgaagagctattagtgtatggaaaaaaatcagctgatactaatgcttagagtaggattcaaagattgaggaaagatttggatttgctgaaaagttatgagtttccaaattggcctagaattgcatatattaaagatcaattgggtcttgctgatgaggatgatgaactcttttggagacagaaaagtagtcaaaaatggctgtttgctgaagataaaaacattggttttttcatgcttctttgaaatcttctagattagggaactctttgagcttccttctggatgaaaatggacaagaacacaccaggattagtgagaaagggaaaattgcttcttcgttctttcagcatcttttttcatcttcttatccaataggccaggataattttttgaatggttttcaagcaaaggtttcattggatatgaatcaacaattaactcaagatgtcacagaattggaagtgtataatgcagtgttttctattaattgtgaaagtgctctaggactagatggatttactgctttgttctttcaacaacattgggatttggttaaaactcaggtcttaagcgagttttttttttttttgagaatggtgttataccacaggattggaatcacactcacatttgtctcattcaaaaaatcacaaaaccgagaagtatgtcggatttaagacccatcaatttgtgctctgtcttatataagatcatctctaagatcctcactgccagattgaaaaaacatcttccaagtattatctcttcaactcaatccgcttttgttcctcaaatattggtttctgataatatcttagtggctcatgaactggtgcatagtcttagaactaatgatagaatgtcaagagaagagatggccttcaagactgatatgtctaaggcatatgatagggttgagtgggtttttttggaagctattatgaaggctcttggttttgacaggaaatggattgcctagattatgcagtgtgtaacaactgtttcttactctgtgctgattaatgggcaaccttatggtcacattattccagaaagaggtattagacaaggtgatcccctctctccagctttgtttgttttatgcacggaggctttaattcatattcttaatgaagctgaaaagaaaggaaaaatttcagaaattcagtttcaagctgaaggaatatcaataaaccatttgttgtttgctgatgataccttgcttttgtgtagggccacaaaggaagaatgtgaggaactattgaattgtttatctaattatggtcacatttctggccaactgattaatttagataaatctgcaatcacttttggggccaaagttggtgatgatctcaagaattggataaaacatcggtctgaaaaatttctttagaaggtggtttacctgactgtttacggggttctaaaaaggagctgtttggatttattaaggaaaagctacacactcgtttgacaggctggtatgctagaaaactatctcagggtggcaaagaggttttactcaaatttattgctctggctctttctttatatgcaatgacttgttttcgactgccgaagactttgtgcaaaattttgaccagtgtgatgatggatttctggtggaatactatgcaacaaaaaaaaattcactcgattggatggaaaaggttaactatacctaaggatcagggagggcttggttttaaggatctgcaatgtgttaaccaagctttattagccaaacaggcatggagattaattcatgagaaagaaagtctctttttcaaagtttttaagagcatgtatttttccaactctgatcttcttactactattaaaggaactaggccctcttatgcttggaatagtattttgtatggtagagaattactcattcaaggtttaagaacaatcattgggaatgggaatcagacttatgtttggactgataaatggttgaatgatggacaaaatagaagaccaatgaataggcagcttttaatggatattaagttgaaagttagtcaacttattgattctgtgtctagaaattggaatctcaacatgcttagagatctgtttccttggaaggatattcagttgattctcaacacagaccagtggtttataaagaagactatatttgttgggatcactcgaataatggtctttattcggttaagtatgggaatgatttgataagcaagaagactcataatcagttgtatcaagagtctgaggttcatccatctttaaatccattgtttgctaaaatttggactttaaagacagttctaaaaattaaaatcttcctctagaaagttttaaaaggggcagttgttgttgaagacagactcagaactagaggaatgattattaaggatggatgcttattgtgtgatgaaacaatcaatcatattttgtttcaatgcccttttgatagacaagtttgggctctttctcatttgtcattttcaggctttgaatttttgggttctgtttatgcaaacataagctctttgtttgatttaccacaaagacatgatattcatcatcggttgagattgttggtccttggattatttggttttttatggaaaaacagaattaaattgttatttgagggtataggatcaatg

SEQ ID NO: 13761 - DNA, 3000 bp, Unknown
  misc_feature (1)..( 3000): cDNA_ID_3031785_gDNA_ID_2214649_Annot_ID_188597 3000 nt of promoter + ATG
taagagagaagtactgaaacccaaagaaatgggacggcggtgattgaaatcaggaagattgtaatcgtagaaattgaccagctaggagagagaacagagcgaaagatctaatttttggtctccagaacggattagtatttgtatatgttcatatttctcttttgtgccatctttttaataatttaatcttcatacagaagataatctccaacaaattccatcgtcgtcgttaatcaaatcgatgtcccaggtttcttttgggcttaaggacttttctctcaggttgtttcaaccgttcggagctcctaccggagatttcaacgtactcggtccggttctgaaaatctttacatcgtgttctgtttatgagttctgtttttttctgctctgttctgttttgttgggttttcgatatctttctcaaaagtttggacgtatcaagagtatggatctggataaagctattcaagatatgtctattgaagataacaagacgttgattctatctaatcttccctaattttgctcagttgaaagaaacagctgcagtttgccgggatggtttttgaatccggaaaatcagaggatgtctaacttgattttagatatgcctcatatttgacgtctagcttctcgggttcgtggtgtagctctttccaaagaccgatttcagtttttctttaaatttgaggaagatttagaggaaattttgaaaacatgtgtatggactcaagatgattggggggttgtgatgcaacgatggaatgagaaaccaccttctgattatttgatgtttcttccgattttggttcgtgtaaggaatattcccgttaactactatactaaagaaacaattaaggagatagcggttgccttggggaagtgatggaagttgttatggactctgacaaatctcaagttcaggattatgttcgggtaaggttttttttcctatgtctaatctccttcgaaatagtaaagcggttcagcttcctacgagtgaaatagtcatcatttcttttgactacaagaggatccggaaatggtgtttccaatgtcaaaggttgactcatgttaaaagcagatgttcgttcaaagtttcaggttctgtaactcttgcagttatgaattctgtaaccatcgttggatcagtaaggcgtcctaagatggaattgtcaaggcttgaggaatccttggacaattcgacaccttaaggagatgaaaaaggatcatttcccagacattttattcctcatggagactaagaattcaatagagtttgtttctaaagttttctgttggcttggttacgattttatgcatactggtagaacctggagggagaagtggaggtttagcaatcttttggaaaggtcatttaaacattcaggttctcagtgcagataaaaatcttttggatcttccggttttttcaagaaataaagtttggtttctttcttgtacaagtaatgggttcacttggggtggtaacaaaaatgatcaatggattaagtgtaaataagatagatgttttgggaatccagcctggttttctttattcccaaatgctcatcaatggtttcttgacaattttggatctgaccatcgacctgttttggttaaattcactgacgataatgagctttttcgagaatattttcgatatgacaaaagatttgctgatgatccgttttgtattgatgctatctatcgttcttgcaattgtgcaatgtctcaaggtactcactcatctatttttagtcttactgaatgtcgtatggccattagtgtttggaaacactcggctgatactaattctcatagtagaattaaaagattgaggaaagatttagatgagttgaagagtctgcaatttccagactgacctaggattgggtttatcaaggatcagctgggactggcttatgggaatgaaaaattgttttggagacagaaaagcagacaaaatggctggcaggtggagataagaacacagggttctttcatgctgcggtgaaagttgctagaatagggaattcattgacttttcttgttgatgaaaatgaacaagaacacactagaaatagtgataaagggaaacttgcgacatccttttttgagaccttattctcatcttcgtatcaaacaaatcagaatatctattaggaaggatttcaatccaaggtctctttagaattatatcagaatctgactcatgatgtcacggaattggaagtgtataacgcagtgttttctattaataaagaaagtgatctggggccagatggttttactgcattattttttcaacaacactgggatttagtgaagcctcaaatcttaagtgaggtctttggtttttttcagactggtgttctacctcaggattggaatcacactcatatttgtcttattcctaagataactacaccacagagattgtctgatcttagacctatcagtttgtgttttgtgttatataagattatatacaagattttgattgcaatattgaaaaaacatctcccaaaaattatttccacaactcaatctgcttttgttcctgaccgtttgatctctgataatatattggttgctcatgaaatgattcacagtctgagaaccaatgatcgcatagcttatgaacatatggctttcaaaacggatatgtcaaatggcatatgatagagttgagtggccttttttggaagctatgatgaatgctctgggttttaacagcaaatggatatcgtggataatgcaatgtgtaacatcagtctcttattctgttttgattaatggtcagccttatggtcaaatcattccagaatgtggaattcgccaaggtgatcccctatcaccagctttgttcgtcttatgtactgaagcttaattcatatccttaacaaagcataaaaagaaggaaaaataactggtattaggtttcaggataaggaagttttagtcaaccacttgttatttgctgatgatactcttttg

SEQ ID NO: 13762 - DNA, 3000 bp, Unknown
  misc_feature (1)..( 3000): cDNA_ID_3031793_gDNA_ID_2214649_Annot_ID_188595 3000 nt of promoter + ATG
ccagagcattcatcatagcttccaaaaaaggccactcaactctatcatatgccatttgacatatccgttttgaaagccatatgttcataagctatgcgatcattggttctcagactgtgaatcatttcatgagcaaccaatatattatcagagatcaaacggtcaggaacaaaagcagattgagttgtggaaataatttttgggagatgttttttcaatattgcaatcaaaatcttgtatataatcttatataacacaaaacacaaactgataggtctaagatcagacaatctctgtggtgtagttatcttaggaataagacaaatatgagtgtgattccaatcctgaggtagaacaccagtctgaaaaaaaccaaagacctcacttaagatttgaggcttcactaaatcccagtgttgttgaaaaaataatgcagtaaaaccatctggccccagatcactttctttattaatagaaaacactgcgttatacacttccaattccgtgacatcatgagtcagattctgatataattctaaagagaccttggattgaaatccttcctaatagatattctgatttgtttgatacgaagatgagaataaggtctcaaaaaaggatgtcgcaagtttccctttatcactatttctagtgtgttcttgttcattttcatcaacaagaaaagtcaatgaattccctattctagcaactttcaccgcagcatgaaagaaccctgtgttcttatctccacctgccagccattttgtctgcttttctgtctccaaaacaatttttcattcccataagccagtcccagctgatccttgataaacccaatcctaggtcagtctggaaattgcagactcttcaactcatctaaatctttcctcaatcttttaattctactatgagaattagtatcagccgagtgtttccaaacactaatggccatacgacattcagtaagactaaaaatagatgagtgagtaccttgagacattgcacaattgcaagaacgatagatagcatcaatacaaaacggatcatcagcaaatcttttgtcatatcgaaaatattctcgaaaaagctcattatcgtcagtgaatttaaccaaaacaggtcgatggtcagatccaaaattgtcaagaaaccattgatgagcatttgggaataaagaaaaccaggctggattcccaaaacatctatcttatttacacttaatccattgatcatttttgttaccaccccaagtgaacccattacttgtacaagaaagaaaccaaactttatttcttgaaaaaaccggaagatccaaaagatttttatctgcactgagaacctgaatgtttaaatgacctttccaaaagattgctaaacctccacttctccctccaggttctaccagtatgcataaaatcgtaaccaagccaacagaaaactttagaaacaaactctattgaattcttagtctccatgaggaataaaatgtctgggaaatgatcctttttcatctccttaaggtgtcgaattgtccaaggattcctcaagccttgacaattccatcttaggacgccttactgatccaacgatggttacagaattcataactgcaagagttacagaacctgaaactttgaacgaacatctgcttttaacatgagtcaacctttgacattggaaacaccatttccggatcctcttgtagtcaaaagaaatgatgactatttcactcgtaggaagctgaaccgctttactatttcgaaggagattagacataggaaaaaaaaccttacccgaacataatcctgaacttgagatttgtcagagtccataacaacttccatcacttccccaaggcaaccgctatctccttaattgtttctttagtatagtagttaacgggaatattccttacacgaaccaaaatcggaagaaacatcaaataatcagaaggtggtttctcattccatcgttgcatcacaaccccccaatcatcttgagtccatacacatgttttcaaaatttcctctaaatcttcctcaaatttaaagaaaaactgaaatcggtctttggaaagagctacaccacgaacccgagaagctagacgtcaaatatgaggcatatctaaaatcaagttagacatcctctgattttccggattcaaaaaccatcccggcaaactgcagctgtttctttcaactgagcaaaattagggaagattagatagaatcaacgtcttgttatcttcaatagacatatcttgaatagctttatccagatccatactcttgatacgtccaaacttttgagaaagatatcgaaaacccaacaaaacagaacagagcagaaaaaaacagaactcataaacagaacacgatgtaaagattttcagaaccggaccgagtacgttgaaatctccggtaggagctccgaacggttgaaacaacctgagagaaaagtccttaagcccaaaagaaacctgggacatcgatttgattaacgacgacgatggaatttgttggagattatcttctgtatgaagattaaattattaaaaagatggcacaaaagagaaatatgaacatatacaaatactaatccgttctggagaccaaaaattagatctttcgctctgttctctctcctagctggtcaatttctacgattacaatcttcctgatttcaatcaccgccgtcccatttctttgggtttcagtacttctctcttaggtatcttctgtctgagcagagctttgcttggagatatacttgttttctgtccaaatttgggtttcagtttttcagaagtttgtgtttgaaacaaatcctctctggttctgatttctgctaagaacatcttggaagcgtttatgatttcttgtggataatcttttatctggtttttgctctgaacatcttggaagcgtttgtgatttctcttggatattctttatgcggaactgtaatagattttcaatagataagtatttgaaggagatg

SEQ ID NO: 13763 - DNA, 3000 bp, Unknown; identical to SEQ ID NO: 13758
  misc_feature (1)..( 3000): cDNA_ID_2703998_gDNA_ID_2214649_Annot_ID_136400 3000 nt of promoter + ATG

SEQ ID NO: 13764 - DNA, 1673 bp, Unknown; identical to SEQ ID NO: 13756
  misc_feature (1)..( 1673): cDNA_ID_2714038_gDNA_ID_2214649_Annot_ID_136408 3000 nt of promoter + ATG

SEQ ID NO: 13765 - DNA, 3000 bp, Unknown
  misc_feature (1)..( 3000): cDNA_ID_2704061_gDNA_ID_2214650_Annot_ID_136409 3000 nt of promoter + ATG
tttggattattcggtttttgaattgttcggtatgaaaaatttcccgccaaattataactgacttggtttggttcggattcggttaaaatcttttataaacttcattgattctcagatttgaagcaactcgtcagataagaatgatggagaaggaaactaaagagaagacaaatctcgaatggcatttaccgattctagcgatgactgcggatgtgatacacgcgacctacgaggaatgtctgaaaagtgggatggatggttacgtctccaaaccttttgaagaagagaatctctataaatccgttgccaaatcattcaaacctaatcctatctcaccttcgtcgtaatccaatcttccggcgagttttttttctctctccgcagccggaagagtggaccgattctgctgattgatatgcattttggtttctgtacatacagtaggttcacaatctagagattttgaaggtttttttttctttcaccgaagtaatgtagcttgccatgactagtgtatgttgttaaacgacaacgtctaagacgacggttcagtgttgatcttagcgtaagtattaatcccacgggatcgtttgtactgtatcagatttggttagtcgtttaaacattgtaatgttctaataataacttttccatatataacatcttcttataacttgagacgagaccattttgattcatcttttgagcttgtttagcaaccaaatcggttagctagttgaacgaagatcagagaaagagctcaaacaactcttcattagctatagctcagtcgacgacttgagctttcaaacaacagaaacagagcaaagcttaaaaacgactgcgttttactattggttcgtcgatctcactaaaccgagtgagataaccaaagccaatcaacaaccctttaatcggatctctcgatgtaatctataaaggatgagaagaattaggaacttgtccaagaagagtatatagaaaatatctgactttttgtttgttttttatatactctatcgacttattttatcagtttcagtaggaacgcaacgaaatactacagaatgaatttctcccgatttaggtagaattggatcaccacactgttaggttctaatttgaaatgccttccgactaataccaaggataatcataccgtttgcatttctaactaccaaataaattaattggaccaaatcacaactgagagactttctaaacaaatttgttattgttttcatgaaaaatcaaactcaggtataggagttaaagtttccttgtgccactacaccaaagaggtttggacaaatatctgatttttagaattattgagaatttaagaaatgattgaaaaaagaagtaagtgaaataaatgtggttgatgtgtgaccgtaacgaacagcaaagtggactagttgttgttgtcacgtaatctttctacgtacacaagtgttcgatctacatttcgtgcgagtttatagtatatggttggtgcgtataatacaccaatctttagctacttttactatttttctataagattaacaacaacaatatacatgtcccaatttctacatatcgtactataactatttttaaaatagtatagttataatatttattactagtgaataaaaacagacattcaataccataagaagaagaatagttctaggttagagtgaaactggtaagtaataataataactctccaacctaacaaacattaaaaattgtggtaaacggcgtaagataacgaccgttaaaaaatcagccgaatgaagattaatgcgtggctaatatgctccggatttcacggcgtctgtcttttacagttaaaaacttttttgtcgggactgcaaaaaaatcacatttatcttgtttggtcaaaattagtcatgagaagattaagaccatgcaatgcaaagtactcattaatcttttaattttttttattcaaagtatataattactcacgaagtcgtgacacaatgagtcaaaaaatgaattaaataaaacggtgtaatcttaaactgtctttagcacgttacgatgaaatttcaattttcgactaatctttgaccctaaacaataggtaaccaccgtcaccgtattaaatgctttttctattctaagaaatacagataagtttccacgtattgtattcgtcccacaaatattcataaggaggaaataatatcctttttttatagaagcaaatggaaataatgtgaacaaaaatccaagatctattacaaaataaaatattttaaaaatttaggaaagacaatcgatattattagcagtttagtccgaaaaatgccgaaatacactcaatcatagagatattacttttattattaccaattttgacacaaatcaattgttaaaacttcctaaaaagtaaaattctctaattgaatatataaataaaatatttcaaatgtgatttttatttacaaactttacaaatgttaataatatattcacctaaactgaaaacatctaaatgtcataaaatttgtatcttattcctaattctgatttttttttaatataaagttataaacacaattagtagataatctcattattcataattatggattattcggcgattttcactattgtttttcaccactaattatgccaccttgccagctgtattcacacacacacacacactctacacaagcaaaacttaaagtatgcatttttattaattatggttcatccattttattacagaagaataaatatttcatttgaatgagaataataaataaaaaggcaatgcttttatgatcctcttacctttaatcttcttcgtctctctatcttcctcgatctccgccgattccttcgtctttccctttcctctctgtaaaccttttcttcttcttcttcttcaatgcctccctaaaaccctagactcagaattctcaaaggcgacacctttaacctcctccactctgtttctttctccaacaaaaaatg

SEQ ID NO: 13766 - DNA, 3000 bp, Unknown
  misc_feature (1)..( 3000): cDNA_ID_2704057_gDNA_ID_2214650_Annot_ID_136410 3000 nt of promoter + ATG
agtaagacaaacctagttagtgtcacaataattatatttttttttttgtcatccaaaattattaaagctcaagtaaaccaatcctgagggatattatttacaaatgtgatatgatgcggttcggtgcggatcttccgcgccaaattatacgcttttatattagcattataaaaaattatagataaagagaagtttgtgaattcttcattgtcgctttgcaatttctctaaatacacagtaaataccgacaattcggttagagaaaatatatctatttcgtataataatgttaactttgaggagattttgggtaaaataataacttttgttggatggatcatatcatgagccattaagaaaaagtccaaaacttttcttcttcaaagttggactcaagttagaaaaagaaaaaagagctagagagatataaaaatgaaaagaaagttcatggcaaaaaactgatatagacagagacacagagagagagaaacgtatctgaagaaaatctaaaaaattcgattcaatttttttcttacttttaaaagcaaaaaatctcactaaaacaaaagaagaagaaagaagaaagaaaatggaatacctacatttgaagtgatgagaagagattttgtgtataataataatgcaatgttcaatcctctcacaactcattacaggtaactaaaataatttctccatgtgcttgcttattagtcgttcttcctaatgttatgtttctctctgtgttctttctttctttggtcaaagctttaattttttttctattgttggatttgagacagtgaacatagctatgttcttgttccaataataaacaatcacgcctgtaaagagcttatgattgattagtgtgttttttagtattaattaatttctctgacaataattacttagtttttaattcttctctgtaagaaacctttggaaactgagcaaagttgcttcttttgagaaccatgcgtttctttctctcttttgttcttgaattcgcaaaaacatgtcctttttcgtctacaggtttctagggtttgtttctgtactataaactatgtttatggtaacattcttaatcataactacactaccaatgcttttatgttatatgtatgcaaaaaaggctctaacttttgttttctttcactattgtttcttcttttgttctctattgttgtagctcagatatgaactgggcactcaacaatcatcaagaagaagaagaagagccacgaagaattgaaatttctgattccgagtcactagaaaacttgaaaagcagcgatttttatcaactgggtggtggtggtgctctgaattcgtcagaaaagccgagaaagatcgatttttggcgttcggggttgatgggttttgcgaagatgcagcagcagcaacagcttcagcattcagtggcggtgaagatgaacaataataataataacgatctaatgggtaataaaaaagggtcaactttcatacaagaacatcgagcattgttaccaaaagctttgattctgtggatcatcattgttgggtttataagcagtgggatttatcagtggatggatgatgctaataagattagaagggaagaggttttggtcagcatgtgtgatcaaagagctagaatgttgcaggatcaatttagtgttagtgttaatcatgttcatgctttggctattctcgtctccacttttcattaccacaagaacccttctgcaattgatcaggtcagtgtgtgctttattaaaagctcaaagctttggtgaaatttttgattcataaatgcaaagttgactttttttggaaccagaagtttttgaaatttactcttttatgtttggttattgagtaaatgaagggaaatttaggcctttgctttactcattggtttgtggctaattttgcaggagacatttgcggagtacacggcaagaacagcatttgagagaccgttgctaagtggagtggcttatgctgaaaaagttgtgaattttgagagggagatgtttgagcggcagcacaattgggttataaagacaatggatagaggagagccttcaccggttagggatgagtatgctcctgttatattctctcaagatagtgtctcttaccttgagtcactcgatatgatgtcaggcgaggtaatataaacattatcagacacttatggttttgttttttcggttaagtatccgacctgcacctcttctgaattttggctatcttttctgcaggaggatcgtgagaatattttgcgagctagagaaaccggaaaagctgtcttgactagcccttttaggttgttggaaactcaccatctcggagttgtgttgacattccctgtctacaagtcttctcttcctgaaaatccgactgtcgaagagcgtattgcagccactgcagggtaaagttcccatctgattactggagcaaacttttgcttgtgatcatgtaaaaagagattttcgagatttcatgattggtttatgtgtgtgatcatgtaaaggaaagaggttttttgagatttcaagattggtttgtgtgtaaagtaaagattgatgcttgaatttgaaatgcaggtaccttggtggtgcgtttgatgtggagtctctagtcgagaatttacttggtcagcttgctggtaaccaagcaatagttgtgcatgtgtatgatatcaccaatgcatcagatccacttgtcatgtatggtaatcaagatgaagaagccgacagatctctctctcatgagagcaagctcgattttggagaccccttcaggaaacataagatgatatgcaggtaccacacagaaaatcttaaagctaaaatactctctgatatctaaaaactgatatcttgtttgaacaatttcgagtgcaggtaccaccaaaaggcaccaataccgttgaatgtgctcacaactgtgccattgttctttgcgattggtttcttggtgggttatatactgtatggtgcagctatg

SEQ ID NO: 13767 - DNA, 3000 bp, Unknown
  misc_feature (1)..( 3000): cDNA_ID_2704053_gDNA_ID_2214650_Annot_ID_136411 3000 nt of promoter + ATG
aaaacattcttttacgaggcacacttatatcaaaaagatatttgttgatgatttttattttgttatcttacttaaggcattgttatttgtcaatatttgttgaggaactttatagtttcaacaaagccggttcactatttctaaattttaatgaggtgtgtagttatataataatatttttgacacaaacgaaaaatgataaagctaataaccatgtgattatattgatcaatgttgtatagtactgcatcatgtgaataattattgctttgtatttagctaacatgttcctgatcatatataccatatctttaaatagttgttagtgtaggaaaatgatgattggtgttctcaagcggttttatcactcgagcttcaaagtttgaacatggacattcatttgtttaatttcttcggtctgttatatataacgttccagtccacaaaattatattttgtatagtatgcaagtggatggatttaaaatcattagattccgccgaaccaatggcaatgaggccaaacgttatgtagtgtggtggggtgcaattttatcaataacaaattgagtacatatacacaagattcattcataattgttaattattttattttgttttgaagaatttttgttctttctttgtaggtccgtttctcatcatatattcccgacatcacaaacatacaatgcaatttttgtaacaactacttcatctatatataatatgtctaaaaactagagtgttaatcaatttatctccaaatgcggtatatgtttgagtttccttgaatcacatattgtataaaacgtaagtgacacaatttacgaattccttaaactcgtaatgtgtaactcaggtacggctaatcgtgcgtgagctttccaatgcatcattagtccttgcatcatctatgcgaatcgaacgttttagttacttggaaaaatttacgtctctcaaaatccgatgaagaaaataaagttgtttctatagaaacttttttttttttttttggttaaagatgttatgaatctttgttatatgtatatgatgtatctagttcttttgttcattgtagataataagttcttaattaattagttataaagattacaaattttctagcacatatatatgatgtacatacacgataagaagcttacatatttaatgattacaaatttacaatattacatggtgattttgaacatctgtctctggccccatggcggattttatttgccgcttatatatgaaaaaagacaaaaaatatattgattaaacttattaatagtggctctttgtgtagttcctttttttgtttctttacgtgagtggctgagtgctagtggatgaatagttatgattaagcagtatggttcatcacattggtcattggatgatcccatgacaaatcataagctttttatttctccaaaacttgaaagttcacaaaactttatgatcctaaaatattttatgtatttagattctaaatgggtgtaactaaactagttgtattagatcatgcacgaatgctcttatttatcgtatatctatctggttaagttaatcactgttatcaaggctttgtttgtaaattatactgttatatagaagttgacatatacttataaaagcgtagtgatttattgtatcttatgtcatatgaataaggatcatttataaacatgataatgtcgttgttggtatagttaaacttacgtgcaattgcaagtaactttaatgaaaaactatttggtagagagaaaaagacagcgaagataagtatgaagtcgtgttatggatagactgtttatattgttttgtggatgtgaatttgtctcaatctaatattgtcacgtcctcatttttcgaaccattgtgtggcaatatcataaccctcattaaatgtcattagctcaattggtaaagagtataggcaaagcttagaagtcgccgattcgaatgacgtttaggacgaaactaatattaaatgcggtcatttcgggtctgagggggttacgagcttcggcgcagaacttcctgatattaaaaaataaataataatatcataaccctcatgacaatttttattttgaaaagaaaaaaatttgggaaagcagtgcgataaattgataccaatatataatcaatgaagcttatttattaaaacattttaaatgaaaaattgtttatcttatccatatatagcttgaaatgtagctcgtgtggaccaaagacaccaatgggtccattttatgtacctaagagtcaaaacatctatcctcaaagttcgaatatgtgaacgaaatggaaaaattatattttcaaatatagtttttccgttatattaatgttgatttttatgtcatcgtgattaatcgaagtaccttcttaaatagggcaacacctgtggcgatgggtccatgcaacctaacaacggaataataaagtttgaaattatgattacagattattataaagtatgtaacttgaatgatttttctccaaaactgaatgaatttaaatggctagtgcgtattttaaaaaaaataaaaaatgtttcaaaggagtgctattgttttcctagagattttatttttattactaggtgatagtaaatatttacatttataattagaaaaaattctttataaaaaaatagaggataacaaaaagctagataaaaaaaaaaagactctcagaaaaacaaacaaaaatggcgattgttaaggcgatttcgctacggttacttcttcgtcatcttctctcgaagattctgacagttttttacgccggagtggggcggttcctcttctcccatgatcaggcggttgttcataataggatagtgggagttccccacgattctgttgttactccacgatggattcgaatctatttaaagaagagacttgcagatttcttctccattccctcacatttaacccctccaatcaattatctctttcgattctatcctctccgactaatcatg

SEQ ID NO: 13768 - DNA, 3000 bp, Unknown
  misc_feature (1)..( 3000): cDNA_ID_2704049_gDNA_ID_2214650_Annot_ID_136414 3000 nt of promoter + ATG
tgtttggcaacaaatccttttttttgttgtatatcttaaatcaatttacaaaaatatttcacgcttataatatcgacatgaacaaaccagtgttaataaaattttgtttatgtaatgtaaaactgaaaaattggcagatgggagttgtgggagagaaattagacatagattttgtgatatcagtaggagataatttctacgacgacggattaaaaggagtcaatgatccttcctttgaagcctctttctctcatatctacactcatcctagtctccaaaaacaatggtattcaggtaatttacttccttctaatcaaagtttatacacatgtttaatagttagttacttaattgtttatctatatgcctaactgagtttaaacactcaaatgtgttatgggattattgtgtagtttgcaattgttttggaaaatgtcatttttactaagatcttacagatttgtcgtacgtatttcaatttttttgttgttaaaaatacatattttataccaaatactaaacttaagatcagatggaaccgactgacctaaacataacgggtaaaatgcatgtttaaattataattttttagcttgcaaaatggcaaaatccataaactattcaaaaaaggcaaaatctataaatgccactaagaaaaatggcaaaatctgatattgattcatgtgttaatgcagttttgggtaaccatgattacagaggaaatgttgaagcacaactaagtaaagttctcacccaaaaagattggagatggttttgtcgcagatcttttgtcttatcctcaggtagattttaaggaaagaaacaaacaaaattaaactatcataactaaatcaaagttttagttagtgaatatgttttgttgtggttataggaatggtggattttttcttcgcggacacaaatccttttgtagaaaaatacttcactgaaccagaagatcacacttatgattggagaaatgtcttaccaagaaataaatacatctcaaacctcttacatgtaatacattttctttcataatcacatatatatatctcaatcttctttttgaaattttctactaattataacttatgttattgaaatatcaggatttagatttagagattaaaaagtcgcgtgccacatggaaatttgtcgtgggacatcacgggatcaaaaccgcaggtaatcacggtgtgactcaagagcttgtagatcaacttcttccaattctagaggtaaaattcataatatcacttttatgctaattacatgttatattatctttattgttttctacattgatgtaccccaatttaattaactacgatagtttttcatgatttttttcacttattactgaaggagaataaagtggacttgtacataaatggacatgatcactgcttgcaacacattggttctcacgggtaaaattataagtacttatttgttgagtttaaaatgtttctttctctattaagttgttatattttgttgaaagaaagaaaacttaacatatattttggaaatggtgaagtaaaacccaatttcttacaagtggaggaggatcaaaggcatggagaggacatgttcagccatgggatccaaaagaactcaaactgtattacgatggacaaggtttcatgtctcttcacatcactcactccaaagctaaattcatctactatgatgtttccggcaatgttcttcaccgatcctcattgtccaaaagatctgctcatctttaaataacatttctaagaataaaatttgcacacaatttaatttaagtttttatttacaataaatttattgatgtatgattattgaacacaatggtcttgaataatatagagttttttcacgttctgaaaacgtggttccgttgaatacatatcatttacaaaaataggcatgggcataatacctgaacccgatctgaaatacccgaacctgttctatttcagtttcggttaattatccgatcggattctattttcaaataattgtaggtatcggtattatccgaaccgaacccgatactcgtaagtaatatttattactcgaacatatatatacatataggacatatattcactaataacttgaatttgtgacatatttaatgatttgagttatggaacaagctcaaaataaggtttacttcttgttttatattattgtcttaaagaaaaacttgttataatttcagatttttgggttttatggatatttttatgtatgtttcggtatatttgaacaaaatttgggtaagtagtacttaaacccgaaatagttttggttatttatgggttctttaaccaatattcgaattatgcggacccaaagtaaacccgaaccgaacccaacccgaaattgaacatataacccaacgagtctaaaatttctaaattagaacccaaaagatccgacccgaaccgacccaaatatccacatacccagggctatacaaaaacttgtgtttaattatatatagaatatgaaaataacaagcgaattttcagtttatcttgcatgttttaaaattattactaaattttagaaagttcattaatctacgaaataaaaactttatggtgtttgaaacaaaaaatcatttttattcagcttagaattgttgtccggtattaaatgtgattcatctattctattattcagctgtttttcatagtatttctcttatataccttttaagaaaatattaaatttcatagtattctaattataaaaatacttgatatgaaatataatacattttttgggactaaaattgggcctttaaagccttatacttggaattatcacattaaaaatgggcccaattttgaatgtctggtgatataagacttttatgtaaaaacaactccctaagaagtaaagttatctacaactttgccatcaacaatgtccacacagaaaaaaatatcatcttccagagtggtgtagcagaagaaacagaggaaactgataatg

SEQ ID NO: 13769 - DNA, 3000 bp, Unknown
  misc_feature (1)..( 3000): cDNA_ID_2704042_gDNA_ID_2214650_Annot_ID_136416 3000 nt of promoter + ATG
atttatatcatgttgtttggtatatttttatttatgtgatttgtcatttcacattgttacctatatatatgtgaacgatagatacctgtcaaataccaaaatattttacacaattagtaatagtgtcaagtttaaggagacaatagctatacgtactatatgtctatataatttatattagtataactttgatcaatttaattttttatatatattgaattgaatctcattggctggccggtgcaatatttgattattttcgtacaattttaaattcttcctaccagccgagaggatatttactaattagacagaaagtgcaaatactttagaaaaaattatgtcaaatatcttcttcatcttttgtccaattataaatatctaagatgccgatattgcattacatattactttcattcgagagatatttagtagttcttaattatggattgtaaaaatacagtacttattaagaggtagataaatttgcgtaaaaagctattagtggttaagctaacaacgctacatcaatttcattaatattttgggaccactgagatcataaattccttttaggcactatacatgattatttatatttttaatcatataacattaattgtatatttgatttggtataacatatttaatttggattgtaaaagtttggtatcctataccaaatgtccaaatgcaacccaatattcattatagttttactgttttaatgatccagaagatatatataacatggaaaaattcaaacataatcatgattataaaataataagatggaaaactaaagattgttttatgtatgcaaatttgttgaataaactaatttcaaacaacacataagttggataaataaaaataagtgataaattgtctattaaaaattaataaataaaaaatcttaccaaaattgtgagtttttaatttcataacaaataaatcaacataaattataagatttatattatatcatattggtaaaactgagaacaacacaatggaaatcagaagagaaaatgggaaaaggttattcgaacttattaaccatactatcaattttatacagtctatttgaattttattggtatgagctcattcgagtgggaaaacaattttggttcaagtcaatgaaagctaaccaaaacgagtttggtaatttggtcttcttactcaaaatctgtttcaactttcaacaagcaactacacatttgttctactgttgggcttctacttccaattagtgatctgaccaagtatttggggcttctaattaactactacaaattgttttgggcttccgttggttaaagtaattgttataacaaacaaaagagaagagaaattctaaacaaatatcattgcttaagcatatgatgatgctctttaccaatttttatatacattcttttgtttcaacatactttatatcatacgcgctcgtgatcatatcattccgaagcatagaatctcatttgagatttcggatagatcggacatcatatatacgtggatactatttattttcgcatgtgtattttcatgtatggaatctcaaaataattgaaaagattttggaagttttcgtcgactctcacatgcattttggatattcttgtagtcgacgcctcttggatcttgtctagataagaaaaacaatacatgaacacaaatttcaataattgcaaatcttaaagaagaatatggtatgggttcccgtttggcttgtatgacatgacttcggatggtggaggaaatatacatccatgataaattaatatttttatcttataattccggaattaaactgataaactcctaaaaatgaataaatatctatcaaaaaaatataattttttttaccgtcttaaatttattatttattgcaaattatgagaattgttacatagccgaatggatataattgcacattgttgaagatctcctgcacacttgtctctaccaatctgcaaatctgctaataaatcacagtatctgggactcgaaccccagacttttttagtgtacaaaagcattaatgaaccttcggtcaaccaatgaaccaaaaaagcttctaaatatgaatttttaactgacaataaataatttttgatgttgacaacgactattttcattaagtttaaacgaggaagtaaacatttccaattggtgcagaggcctatttccaattactgttaataattagttgtatctttataaattataacagttttaaaactataaaggaggttcctagctccttcatggttgtcatatttgtttgtataatgactctgtcactcttccagtgacataatcaaataatctttgttggaaaaggaaaacaaaaaacaattttctcttttattcgaaacttgtgtattattcacgaattttttttttccttgtagcaaagttttatgacaaacagatttttttttaaaaattatgaatcaaaccttttgtgtataaattaacaactcgtacaatggcctttcacatatgtaaggcaattagcaaataaataaataaaatcaccttcaaaaagtccggtcaaccttttttttttttctttcaaaattctctttaatttccttgttaatatatatgggaactaaaaatgttatttatatgtggaacaatatataccacgttaattacctaaacatggaatattcagactacttctatccaccgccccttttcattgacgtgcaaataattttcacgtaattgtctaaagtccattttagtcttatatagtctcggattgaaacaagaaaaacaattttttcgactttaaaatttattaattattttgaagagttatttttctagtgacaaagttcattacattattttttctcttgcctttttctatttttaattcttgtccacataaggactagctataaataaacaaagccacacgaaaacccaccatcaggtccatcacctcttacattttttctccaaagtctctcaatg

SEQ ID NO: 13770 - DNA, 2054 bp, Unknown
  misc_feature (1)..( 2054): cDNA_ID_3031814_gDNA_ID_2214650_Annot_ID_188628 3000 nt of promoter + ATG
aaatgcagagaatataaaaagaatcaaggagattatgatagaaaagaagttgtggaaagaaggagggaaagagctaaggagaagtgcatcaaacatgaagcaagacttttacttaatcatccaagcaaagcctcctaaggatagacctctttttaggtctctttattcctctctctttaactcaatcaccaaggtacatttatcttcattttgctctcattactatatactcattactattaatttattaactatactttggaaatggtagatggattatgcagctagagatggagatgaaactaaggtgttggagtactatattaatattgttgcaatcctcgatgatatcttccctcgaatttaatttcgaacaatataatattagtttaggcaatcgattcgcatttgttgtcatgttctttcttgtctatccaaaagaaaacactagtgaaaatacaagtgacaagagaaaaagttggcaaatgttttttgtacgatttatcttgtcatcttaagaaacttacctacctacataaagaaatcatagcatatgtgagcaaacaaccgttcaaaaaaaaaaaaaagctaaacttcaaaacattgctaattacttaaactcaatccccgaggagttattaccctataacactcttttcaaatcactacgagattcatatatacatttttacataacaaattgttggacctttgataaaatcagaatcagtatataagtaattcagcaaaattttcttttgttaaactttcgaccgagttcttcaacaagttaacgagttcgagccgcaaaaatataaaatctcttgtgtttatttagcaaaatttgcttaacaatgtttgttttgtatgaaaattttgtggctacttatagaaataccgctaatattttaccgtataattatggtattttatatagactatattggtgtatttatagtaagcttgctttttccattcgcatacaaaaacggcttgttgaagtaaagcaaagtggtgtacctcatgctttccccttaacggccggctttagtgtgttttggttttccttttttgcaatttgtaattttaacggaatacgagcaaatcaatagcttttctctacatcaccaatcttcttcaaagccctaaaagggaaagaagaaaggaaaaaaaaagtaagacatgaaacaaagcgaaagattgttcggattttcaaagaaagatagcatctccttttgttaaaagcaagaaaagtgtatataatatatggtagttgttcttgtcatctttttagaccctgaacataatagtgatacaattccacaaatacagtaaaaattacatttttttataatgtttgactgatttacaaaggagacaaataaattgtttgttttactcttttacattaatattgtgattgtcatatatatatttgataatttgtttatatatagcggttatatatctatattttttaaaaatatctgaaagttcaggcccaaaatccatacattttcaagagacgggaccgaaaaggttaaattcatctcctttggaaaaaaagatatctctcaacgtgtctcaaacccatcacctccacctagaaaatcctaaaatttaccacaggaccaacatgctgttggttatataagggttgtaatgtgatatgttttgtaactttttatacactccattaacacaatgcatgttttgaagtttggcaccgattgctaatataaaaaaaaaaaaagacaatctacaaaaagtttgatcacccatacgccatttgaacgatatgaaaatggtcctgaaaaaagaaagaaaaaatagtggaaggttaaggaatctttttctgcctcacatcttttttcactgtggggttaaaaatccctccttttcatgccaaaaccaacttttgtttatttattttttacctcttcgctttctcttttatttttacccttttatacacacaaactcttctcacattcacattcacattcacattcctcctctctctcatttcatttcatcttcaccaaactctcatg

SEQ ID NO: 13771 - DNA, 3000 bp, Unknown
  misc_feature (1)..( 3000): cDNA_ID_2704034_gDNA_ID_2214650_Annot_ID_188627 3000 nt of promoter + ATG
attggtactttaactccgaatatttgtccttactgtacccacattaggctttgtcttctccaaataattagtttcactatttaaccgaaaaatctcacccaacataagagacaaataactaaagttgacaaaagaaaagacaaaaaaatgtgaaaataaagagagaaataactaagtttgcttggcatttatagatttttgtttgcaagctttctctggcggaatcctaacttcactgtaatatttactattacacaaaacaaatgtgagctgtgctataacaaaaatttcaataaacccttccaaattgtatagtttttttaattattattctcaaacaatcaataattcaggactgttgagttgtgaattgggtgtgccatgtcgatgataaaatccaaccactagataagtatatgattagatgatatgattagatgatatgattagacacttaatcccagtagcatcctaagggggttaagcacattattaaagtgattttatacctcttttcagtatttaaatctcatttagttttgttttgataaataattctctttgctttctactttatcaatcttaatatataaaacgaataatgtgattattagttaagtacattcctcttctaatagtataaaagtgattatgtttcttcataatcgtatcacgactgtatccagcacgacgttgacttttaatattcagtctcccacacatgcggtattaaattgggagatacagaaacaaatccaaaaaaaacaaaagttttcgtaaagattgttagtttatgtgtctaattctgttttattaagttacccaagcctaattattgagagaagtatatataaactactcccataattatttagatcatatacttaatgatagaatcatggaatttaaattgctacgaataagtcttatggttattgacttactgtataattgcatggaccgtattaaaaatttcattaccctacccaaagttgaaacctattctacttgttgttttctgcccaaccaccttaaatgttatttttctggttctttatgttaggagtttatgtgtcatcttttgtcttttaattccaaaaaattatagagatatatataattcagttaaacaaaaaaaaattaattagacacttacactgtagaaatatatggtaaaagaatttgaataaaaacttatgtatggtaaaatgatacgtatactaattttataaaattattaagcttgatcgttactcgtttataataaaactattttggtaaaacaaaatctaatatataatattgtatatgtatatatatacatataatgatttgcagcttgattagttggtacggggagcgagcaataattatgtttggatgggaatgggatactaaaacaaaagttgttaattaaattaatttaaaaaatagacatctacttttctcgatgaaactggtggagaagagcggtaatgagagagaccatacttttgattagaccaaattggcatctttcttgttattaagaggggtacatagtatcatcatcatccttaattaattagagtccacgcaataacaatagaagactctgtcctccccatttgtggtaaatcctcttctcatgattattgtttggttgagtatatgttttattctattactactcaccagaagaacattttcatatgtgattcgaatacaatgttacatttctaatatgagagataacatatgcacctactttttatacatgcagttgtatattgtgtgatgtatagttatatattttcgtctaatttctgttgagttcatatgtcatacctaatttgctataggattttattgactgaacaaaaaaaaatgtatacatggtctttatcttagaataatggatatatctatttcttttatttgatttgcttcgcaaatgtacgaatattcgatctttctaaatcgaattgaatcaaataacagatcgaaacaaatctaacgaatattttgtccaaccctaatattttttttaaaaaaaatgttagttgtttaattatattactaaaatcatgaaaatataataaatgttgtaaatgatagaaaaaaaaattgaaagaacgtttttctgaagagtttatataccttgtatacaaacatcttttaataaaaaaaacaaataattcatattaatggtgacatagactgcacccaaaaccgcagcgcaacagtgctgtaacagtattaaaatctttacatatacatatgtatctatgtatttttgttactattcgaaccgtatcgcactttttcgtaaaacgcagttactagtcagaaattaaaaatatataattttaaatgaaagcaaaaaattatcgtaaagtttacacttcaccgtcaaaacacagctacttatgtcagtgactcttcttctatcaccactacacgacaccaaagaaaaacactaacacactctctctgataactctcgcgtgactctcctccttcaactctaactggttcgtacccttcacgctccattaccggcaacgcgcttatcgtctggcacactcacccgcaccgtacccgtcgtcggtcttttcgccaatttatcgtatttttccgtgaaagagaataatataatactctaataaagtgttataataaattacaacgttactatttacaacgatttttaaaagaagctgattattatttcttctgtaactctcttctctgttgctctacctgttcttttctctctgttcattctcttttctttagcttaattcagcaaaaaatttatctttgtttctctcttttgtttctttcctctgcaaagtaaagttatgagagcttaataatgtttgtctcatcttcaagcttcagatctgattccttgtttctacaagtaattgtctctttctttttcgattaaccaccatttctgtgaagaaaacctttttgcttgcttcaagattcgagtgaggaaaattttagctgaaa

SEQ ID NO: 13772 - DNA, 3000 bp, Unknown
  misc_feature (1)..( 3000): cDNA_ID_2704038_gDNA_ID_2214650_Annot_ID_188625 3000 nt of promoter + ATG
aagaaaaaaacaatcaagctatttataggtttataatcttatcacaataaaacgaatgcagggaataatggacaatttgtccggttgtaatctaaacattaaacaatgaactatgcttctaattatatattgttatatattttgaaacaaataaaaggacgacatgtcgacatgtgcattataatactaaacaacatctattttctttacgacaagaatacaaaatacatagaaacactgaaacgttaacatatacaacttacacacctgaatgtttctacaaggagatgatcttagatcagtggtaaaactatattttctttttttatataattcttaacggttaatccgataaaaatatatagaagtgtttcagaatagacttttctttaatatcagccgcctatatttctgactagcattttaaccaattaggtcaaaaaacaactaatagattttctaaacaaatatgtttttgttttttcttttttttttgaaaaatacaaaatgtttttgttttcttttagtcttagtgaagcaagggttgtctagaaccaatttgccaatttgttgttagtatataattttgatttacatcattgtaactgccacgtgttgcatccttacttagcttgtctaatatgtcctaacaatacaattctaccataattttctcacaccccttaaagaactttttgactatataattcaaaagtatataaaagtatgaaactaattttgaacaataaaagaaaattcatatcgttctttttccttgttaaagtaaaaaaataaaaatccagataatatttctcatcatgtaatgatcaacaagaaaccaatttaagactgctaaacatcgatgattaatgctgaaaaaattcttatcgtgaaactgagactactaacatcgatgattacgctattctaatattcgttgagacaacccaatactaattatattcttgtgttttgtgtatgtatgcactgatacatataacatatattgatatatatagctttcgtggagtcaccattgagaatggttggatccagtgcaagttccatactcgaaacttaatttgttttcatgcaagttgctccataataagatacatttatttgtttaatagggcagcaatatttgctttgtcagatttaaaatattttcaaattcacaacagttaaacaaatattgccgtgataaatagtaattattagattaatttttattttttacttattttagtttgaattgaaatcttgatccatactaccaacaaaaataaaccactaactaacatactacgtgtagttatttttaagttttcatagtttattttgttatgtattaattacttttaattataagtgttgattcgatattttctgaggaaatctatattaaaactcaattatataccatatttatttattttatttaataaaactataaattcttacaattttataaataatacaaacttgtgttttaggaagggatgttaaaactttatggttcttttggaatttttttaaaaatcaatggtagttttagaaaacaaaatttaaatagtactatttgcgacctttgatatatcaccctatatatatatatatatatatatatatatatatatatatatatatatataggtcatttgataagaagcttacgaacaaattatcttctcgtaacagttgccattttagaaagaaaaaaatcaaattccatctctcctactgccaattggaaaattaaaatcttattatgcaagttactaactcctctggttagtacatatacgagttgcataacttactgttattgttctttcttagttaggttagatactattgcagagtcatgtgcttctgtgtactccataatatataatttgagggacctattaaaagactaacaaaataaaactgttgaaatgacttgcaagttacaaacagagcaccaaagtgatacgacgaatatttcccatacaatgtcaccactagccatcattattggtgaattgattagctgctcaaattataagccgaatagagaaattaataatatcgagattaatatatcgttaaacaaataaaagtaagcctttgaataaaaatatgtagaggtccacagtgattagaccgaccaaaaaataacaatatttaatttcactgctataagaaagtttatgacataatgataagattcaaagaccaaaatagtagaattctataattagaggaaaatactattttcttttctcattatactatacttgccagcccattttgtcatttatcatgaaaattaaattgttttacatatcttcatttaaatgtttatagtaacaagttggaccctcctcgttatcaaaggtaatcgccttcagtgtttaataaagtaatacgattgaggacacaaagtgaatggtttaaaattaatttccgtgggatttaaagacgaatacaatgtgatcaaggtggtttgacgtctaactatagctagtctaaactagctagctaggctaacaaccagtaataatagctgaccaatcatcaacattcatttctttggatttaataaagaagctcaataacatcgactgactaattattaaaatgataataaaaactatttagtataataatcgtcgtccacgtcagagtttcacctctttctctccggctttgcatggctctttgtttctccttatctccctcccttacctattatacttcctctacaatttcattgcttcttgataagagctctctcttctttctatctcttgttctttaatttgtctctctctttttctctagcaatgcttggaagctatagagaagtgagtattagtgtctctctctttactttcactatctctgtttagatgtgtgtgtcggatatataaccggactaatatacgtataacttatagttattctatcttgaccattgatatatgcgaatcactctatggtattaataaggtt

SEQ ID NO: 13773 - DNA, 3000 bp, Unknown; identical to SEQ ID NO: 13769
  misc_feature (1)..( 3000): cDNA_ID_3031825_gDNA_ID_2214650_Annot_ID_188623 3000 nt of promoter + ATG

SEQ ID NO: 13774 - DNA, 3000 bp, Unknown
  misc_feature (1)..( 3000): cDNA_ID_3031834_gDNA_ID_2214650_Annot_ID_188618 3000 nt of promoter + ATG
gactgaattgcccctgtcagtgaagtcatattacctgtctccgttggattcacctactactttacaaccaacgtcttttgtcttattgcttaccaaaccaaatcatattttacgtgaaaaatacaaatattatcatatcttttcttcctaaatttatactaattgccgtaaaaacaaactatactacatatgatcaacaataacatgaaactatatgaaaaattcattaccttcaagctgtcaataaaaaaaatatcatcacctataaaatggtataaaacattcttttacgaggcacacttatatcaaaaagatatttgttgatgatttttattttgttatcttacttaaggcattgttatttgtcaatatttgttgaggaactttatagtttcaacaaagccggttcactatttctaaattttaatgaggtgtgtagttatataataatatttttgacacaaacgaaaaatgataaagctaataaccatgtgattatattgatcaatgttgtatagtactgcatcatgtgaataattattgctttgtatttagctaacatgttcctgatcatatataccatatctttaaatagttgttagtgtaggaaaatgatgattggtgttctcaagcggttttatcactcgagcttcaaagtttgaacatggacattcatttgtttaatttcttcggtctgttatatataacgttccagtccacaaaattatattttgtatagtatgcaagtggatggatttaaaatcattagattccgccgaaccaatggcaatgaggccaaacgttatgtagtgtggtggggtgcaattttatcaataacaaattgagtacatatacacaagattcattcataattgttaattattttattttgttttgaagaatttttgttctttctttgtaggtccgtttctcatcatatattcccgacatcacaaacatacaatgcaatttttgtaacaactacttcatctatatataatatgtctaaaaactagagtgttaatcaatttatctccaaatgcggtatatgtttgagtttccttgaatcacatattgtataaaacgtaagtgacacaatttacgaattccttaaactcgtaatgtgtaactcaggtacggctaatcgtgcgtgagctttccaatgcatcattagtccttgcatcatctatgcgaatcgaacgttttagttacttggaaaaatttacgtctctcaaaatccgatgaagaaaataaagttgtttctatagaaacttttttttttttttttggttaaagatgttatgaatctttgttatatgtatatgatgtatctagttcttttgttcattgtagataataagttcttaattaattagttataaagattacaaattttctagcacatatatatgatgtacatacacgataagaagcttacatatttaatgattacaaatttacaatattacatggtgattttgaacatctgtctctggccccatggcggattttatttgccgcttatatatgaaaaaagacaaaaaatatattgattaaacttattaatagtggctctttgtgtagttcctttttttgtttctttacgtgagtggctgagtgctagtggatgaatagttatgattaagcagtatggttcatcacattggtcattggatgatcccatgacaaatcataagctttttatttctccaaaacttgaaagttcacaaaactttatgatcctaaaatattttatgtatttagattctaaatgggtgtaactaaactagttgtattagatcatgcacgaatgctcttatttatcgtatatctatctggttaagttaatcactgttatcaaggctttgtttgtaaattatactgttatatagaagttgacatatacttataaaagcgtagtgatttattgtatcttatgtcatatgaataaggatcatttataaacatgataatgtcgttgttggtatagttaaacttacgtgcaattgcaagtaactttaatgaaaaactatttggtagagagaaaaagacagcgaagataagtatgaagtcgtgttatggatagactgtttatattgttttgtggatgtgaatttgtctcaatctaatattgtcacgtcctcatttttcgaaccattgtgtggcaatatcataaccctcattaaatgtcattagctcaattggtaaagagtataggcaaagcttagaagtcgccgattcgaatgacgtttaggacgaaactaatattaaatgcggtcatttcgggtctgagggggttacgagcttcggcgcagaacttcctgatattaaaaaataaataataatatcataaccctcatgacaatttttattttgaaaagaaaaaaatttgggaaagcagtgcgataaattgataccaatatataatcaatgaagcttatttattaaaacattttaaatgaaaaattgtttatcttatccatatatagcttgaaatgtagctcgtgtggaccaaagacaccaatgggtccattttatgtacctaagagtcaaaacatctatcctcaaagttcgaatatgtgaacgaaatggaaaaattatattttcaaatatagtttttccgttatattaatgttgatttttatgtcatcgtgattaatcgaagtaccttcttaaatagggcaacacctgtggcgatgggtccatgcaacctaacaacggaataataaagtttgaaattatgattacagattattataaagtatgtaacttgaatgatttttctccaaaactgaatgaatttaaatggctagtgcgtattttaaaaaaaataaaaaatgtttcaaaggagtgctattgttttcctagagattttatttttattactaggtgatagtaaatatttacatttataattagaaaaaattctttataaaaaaatagaggataacaaaaagctagataaaaaaaaaaagactctcagaaaaacaaacaaaaatg

SEQ ID NO: 13775 - DNA, 3000 bp, Unknown
  misc_feature (1)..( 3000): cDNA_ID_3031838_gDNA_ID_2214650_Annot_ID_188617 3000 nt of promoter + ATG
aaatatagatatcaaagagaatgaagtataagaaaaagaggaaacaatggtcaatgccaaacggatcaccttttttataagacatttccctaaattaaccatacataacaaaaaaaggatatttgatatttccatcgacccattttgtcaattttcaaacaatttttttcaatgcattgactaataatgtatagggattcacacattgtatttttgttttcaattattttcgttaggttttaaccatttatgtttctctaaggtctaacccaaacccatttgagttaaattttaatatatatatatattaaaaaataaaataaaagaacaaaaaagaaaataaaataaattctttttcctttataatataaagtacaagtcccttgcccaataaaattatgccacataagatttgtttataatttaaagaattatttaaaattttttaaaaaaaaaacgctcattttttttttctacatatttaaaaacaaaaaaatattcctagattttctcacacaccacaccatcattatctttggaaatttgtaaccaactcaagattttccaaaccgttttatcttcctctacaaaaatccaattcacgttaaatctatctcttgctcttgcttcctccaaaaaaaaaaaaaaatcattcccagatccatcgatatgaaattgtatagaaaaaatggtattcgatccaagtttattgtcttctatttttcttaggttaatttcactttattccagattcattgtttgttttttctttctcggaagagcacaatgtgagtttcactggcctctgttataaacatatatagaaatctgtaacaaaaatcattactaaaattctgtgacatgtgcagcgatcaaagaatcaatagcggaaaaagaaactacactgcattcatctatgactgaaagcttctgatcaagccatgaaattaaggtatcccaaacacgtatcttctctatgtttatcaatcttgctttaagttctaattctgcatatttcaaaggaaccatacaagtgttcctaaaatccatttgaatattcaaaaacttctctcaaatatcatgtagttatagaagctactgtctctaagcgcacgagagaaagctacacaacccacgtcagtttccatctacacatataaggtaataataatattttcatgtatctttaataatagctctatgtttttttctgtatttttcattataaaactcataactatgttatcatttaatatggtactaatttaatgggattgatttactattgcctcaaacatgtaataatttaatgattttttgtttttaacgtttttagaaattcatgagcattttaaatttgtggttaggtcataacaatttgctattacaaaaaaaagaaacactctaaataatataaaaaatagtttaccgtataatactagtagtaaataaataatttgattgttattcataaattttgaattctaaaatctcctgaatcaactcatgcaattgtcttaagaattacacgtggataaatcatgggcttatgagtcaggcccatttaaccggggtattttcgtagttaagagactagaatggtgggtatttcaggtaaaaggtctatggggccagatctgcgctttgtcgcgatgtcattatcgccaaagatatgcgatagcgactctcgtacaaagtctctcactcacctatattttttgttttcttatatttcaacaaaaaaacgttttattttccttttggtgtaagtaaaaaaacaaaacaaaacgttttatttctaaagttcagaaaacttatttataccaaggaaaaaatagataataaattttgagaagttggtgactatatattacttcacttattcaagaaatttaaacatggtaaatgttactttaaatgttaaatgatgtataagaaatgtaatgaaattgaataaatgtagttttaaagatgttttaattagtaagacaaacctagttagtgtcacaataattatatttttttttttgtcatccaaaattattaaagctcaagtaaaccaatcctgagggatattatttacaaatgtgatatgatgcggttcggtgcggatcttccgcgccaaattatacgcttttatattagcattataaaaaattatagataaagagaagtttgtgaattcttcattgtcgctttgcaatttctctaaatacacagtaaataccgacaattcggttagagaaaatatatctatttcgtataataatgttaactttgaggagattttgggtaaaataataacttttgttggatggatcatatcatgagccattaagaaaaagtccaaaacttttcttcttcaaagttggactcaagttagaaaaagaaaaaagagctagagagatataaaaatgaaaagaaagttcatggcaaaaaactgatatagacagagacacagagagagagaaacgtatctgaagaaaatctaaaaaattcgattcaatttttttcttacttttaaaagcaaaaaatctcactaaaacaaaagaagaagaaagaagaaagaaaatggaatacctacatttgaagtgatgagaagagattttgtgtataataataatgcaatgttcaatcctctcacaactcattacaggtaactaaaataatttctccatgtgcttgcttattagtcgttcttcctaatgttatgtttctctctgtgttctttctttctttggtcaaagctttaattttttttctattgttggatttgagacagtgaacatagctatgttcttgttccaataataaacaatcacgcctgtaaagagcttatgattgattagtgtgttttttagtattaattaatttctctgacaataattacttagtttttaattcttctctgtaagaaacctttggaaactgagcaaagttgcttcttttgagaaccatgcgtttctttctctcttttgttcttgaattcgcaaaaacatg

SEQ ID NO: 13776 - DNA, 3000 bp, Unknown; identical to SEQ ID NO: 13765
  misc_feature (1)..( 3000): cDNA_ID_3031842_gDNA_ID_2214650_Annot_ID_188616 3000 nt of promoter + ATG

SEQ ID NO: 13777 - DNA, 3000 bp, Unknown; identical to SEQ ID NO: 13772
  misc_feature (1)..( 3000): cDNA_ID_2704038_gDNA_ID_2214650_Annot_ID_136417 3000 nt of promoter + ATG

SEQ ID NO: 13778 - DNA, 3000 bp, Unknown; identical to SEQ ID NO: 13771
  misc_feature (1)..( 3000): cDNA_ID_2704034_gDNA_ID_2214650_Annot_ID_136418 3000 nt of promoter + ATG

SEQ ID NO: 13779 - DNA, 3000 bp, Unknown; identical to SEQ ID NO: 3112
  misc_feature (1)..( 3000): cDNA_ID_1568553_gDNA_ID_2214651_Annot_ID_136419 3000 nt of promoter + ATG

SEQ ID NO: 13780 - DNA, 3000 bp, Unknown
  misc_feature (1)..( 3000): cDNA_ID_1033841_gDNA_ID_2214651_Annot_ID_136421 3000 nt of promoter + ATG
ccaccgacaagaagacctacttcgccggatacaaagactgccacgtaaaacccggattccggatcgggtcctgatccaaattttgcgtgagtcaggtcccataccacccgaatatccggctttcgagataacttctttgatccattttttctccagaatgtcaagggtttgatttcgagccggaaggcgaagggaatggagtgacggtaacaatctagagagtgtagatagcaatttgtggagttgcatgagtagaaatgaaggtggagagagcgtcggaggaaggatcgagaccatgaaagaaagaaaacaccaacgttagtgtggtactgacaagttgtggtagcgtcgccggaggtggagatatacgatggatttgatggggatggaagagccgacggtagatcgtcgttgatggcggtggcggaaggatggaaacaggcggacaaaggggaggagccaccgcgaccaagagcagagattttcatttttaggtatagtcaattaatatgactggttgatcttatatacgcacatgcatacaaaaagacactaattatatgtaaggatatgactatttgagtatttatctatacttgagttggcttatgtgtctgaaaatgagttgtcatgttgtgaaaattcaaaagagtgggtcaatgtcgagaaattgaaagcaactttgtggataaattttatagaccgaaactgacgttcattgatattttgtgctggttttcacattatttatatgtagattatgttctagttcaattcttttgaagtcgcttgactttttgtctctttcctagtttccttaatcttttccacttatattagtttttaacgtttgtagtcacagtgaaagctaccaaaattctaaaaatggtaaagagaaatagaactgtatcttgttaaagctcggttttcatgttacttaacattacatatgttgtgtttgatagtataaaataataaatttgttatggataattagatgaaaaaattaaagagttttgcgataagtaagatatttgtttcttgttggtttaagagtcggtttgggtccatgatataacactaattaaccaatagttgtggccttgtgggaggtaaatgatccaacaaactttgctttactaactcacatcttttttcttttgaataactaagaggttttggcctaggccaatacatcctctcgggatgggactaaagcattttatagaattttctttcaaatgttattggaaccagcaacctctaggcttagctaaaatattttaccagttttgagctattgacacttgataactcacagtttttagatgtagtttctctaaatcatgcatataaaataaacatcatagagatcactagtagatgatttcatcaactagttctatattcgatacgattttacacgaaactcgtattttcgaaatgttgtacattgtatgatataaactttagaaagggaagatacaaaattaagttgctgactatatgctaaacctatagacacgtgaacaatgagatgacggcaaacatgtggatttaagtttgcttcggtttgtttcagtttgttctagtttgctacaacaaaactccaaaatattgttgatttggtggctacaaaaaaattataatataaaaatagaagatatgtgtttgattaaatatactaacatagttttgatcgtattaggtagagccatatttagataagtttgtggactgcgatgaagttatgaagccacacaatatgtatttttttttccctcatgcttgattcgttattttctctgtgatttgatatgtatgcaaatttatttattaatggttcctttttggattccagctaacaaaagaaaaggtttgaaaatgtccaactacaaatttaatatggaaacgtacaccaattcattgcgagattggtgcattactcgcttgctttttgtttcataccagacaattcaaaacatgtgattgatttctcaactttcattctctaatcatttagaggatacctaccaaaaattaatatcctccaaaattatttggccattgacattacaaataaagaaatgtctttggatgaaatatttcaaaattatttttattcattaaaacaataatgatttaaatactaagcacacatatagtgtgacaaaaatatgtgatttaaggatctcaggatacaaacatctctaaactagttttacaagcattcgaaaacacagctctaacaaaccaaatcactatgatattctcgaattacttactttctaacaagaaaagattgttggagatttttatttgcgttaaacgattaagttcttaatcgatgtaatcggtgtactagacgacttaaagaataggttagctatgatgttgagtcaatcaaccacatcccctccacaaatccaggagagttaaaatttaatcttttaccattcattttttccttctacaggttcgaaatcgaagtccggtccaatcttgaaaacatcaattatccaacatttttgtgctggaccgaagccaatggcaggccagatattataaccgaaggcctgaaagtaagttacaacgagatagtaagaagatgcttaagtaaatgggcctttgtggcccaatctataaaacctaaccctagcatcgtgtccccatataaaactcacctccatcgctttctacaagtttcttctccagatttagggtttctcagtgtttcggctcggcccagaacaagatcgcaagacttcaagatggtaaatcctttcacatctccttcattcttaatccttatacttttctattatcaattagtatgtaaatgttacggaagttcgagactttgaatcattttgatgatcttctctgcttcaaccttaatcatctacactgaattttatcttaatgttacgaaagtttaagactttgaatcatttttgatgatatcttctttgtatgaaacagccgtcgcacaagtcgttc

SEQ ID NO: 13781 - DNA, 3000 bp, Unknown
  misc_feature (1)..( 3000): cDNA_ID_1812649_gDNA_ID_2214651_Annot_ID_136422 3000 nt of promoter + ATG
caataataagagcatgattaattatttatgtatatgtaaatgacataattacatataaataattaatatgtgatttcagaaaactgcttggagtgaagaagaagatcaaattttgattgaagcacacaaagtacttggtaccaaatgggtcgagatcgcacagcaacttccggggaggagcgataacaatattaagaaccattggaacaccacaaagcgtcgggtgcaaaataaaagaggtggaactgtcaaccctgtcggcaataacatccttgaaaactacataaggtgtatcacaatcaacaacgaagattttcttaagaccgatggatcttatggtgaaccgacaaacattgagagtgatgatgactctaaagatatgttatacggggagatgaatttgagtctagagactataacgacgcagaccaccaaaccattgaccaatgcttctacaacatcaccttatgttcagatgccagaagataattatactatggaggattgtgaatcactggaggacattctagagctgctgcgttggtgggaataatttccagtgaaggaaatttctttgatatatgatattttcttactatcgtgtaagataatatatctatctatctatctattttgttaaaagcgatttataatttacaccgttttggtgtatatttctatctatccttttacaagacctatatatgttatgttatggtggtgtactattttaagtgagcgacatagtattttcttcatatagctaattaatcaacaacaatttcccaacttacaactatttgcgtactttaaacttatattgaaagagaactacaaaattatttttttgtacaagagaattatggtcttcggatcaataatttctctagatataatatgtaaagccaaccctataatttgtaaaatccatgatttgatataattttcttttaaaattgtgaattggcagacaaaaacaacattacattttgatttaaattcataactttgacttgctaaggaaacaccatgattcattttttgtcatttgttacatcatcactagaaatatttgatctaactttattatgataatagactacatactacatatgcagttacgattttaaatactacatatttaagcgtgtttaaactgtaaccatatcatataaaatgacatatctaaaagtgattttcaatattttgatatgatatgtgttgtagcacggataatgatctaatttttaagtaataagcttgttcattacaaaagagaagaaagtagtattgggccatgattatgtaaggacaaaataggaagatgtggaagaagccattcgagggttttattacaaaaacagagtatataattggtcataatgttttattcacttaatttaacattattgcattatattttcatgaacacatatttctttaactaaaaatatacacatatttcttattgtagatgaagtgaaaagaacaatatttgggttcacatctatgggtgaatccttttaatcaccccctaaaataaaaaaggtgccatatttctatttttagagaaagatatagagcaccattggagtggttttgctccaaatatagagtttagagaaatatataatacaccattggagatgctctaaaatgaatttatttatttatttagatggaagattctaattggttagaaaaagaggaagtgaataataggattcacctataagagtgaacccaagtatttttaagagataatgtgtaaagtaaatagatggtcattgtgtgaattatgaatagaaccatggttttccatttttaattgcttaacatagggtaatcaacaatggggtttaatatgtcaatagacaatagtaaagaaagtatttgatctatcccaaatctttcttcgttcgttagttcatcactttctttctttttggttatattaatggtagagaactaaaaattcaactttttattcaaaagctccctttctctttccctcctttatttgccataaaagtgatttcaagaagacagcgagagagaaagtgatagttcgttcactcttcgctttctcaagaatttcaaaacaccaaaaaagtctttagattgaatttcatcaaaaacttttcttttcttagcaaaaaaaacaaaaaaatgagagagcttcttcttcttcttcttcttcattttcagtctctaattcttttgatgatcttcatcactgtctctgcttcttctgcttcaaatccttctttagctcctgtttactcttccatggctacattctctcctcgtattattcctcgttgacttcatttcattttatttttttagtttctgtgtttcttgatttgatctatgcctatgcgttctcgaacttcgaaaaatataaagaaaaaatagtttttaaaacttgataaattaaatgctatttatgagctactcacttcttgtctttttgtttttgtttttaaaaaaaaaaattgaaaatattatatttttcttatcagaattctttcttgaatttcgaaatatgggtttgattcagaatttctaagaaccatacttgacaaatttgacagttgaaaatcattaaaaggatttttttctgtgtcaggaatccaaatgggaagtggtgaagaagatagatttgatgctcataagaaacttctgattggtctcataatcagtttctcttctcttggccttataatcttgttctgttttggcttttgggtttatcgcaagaaccaatctccaaaatccatcaacaactcaggtactttcatcagtaatgagagaatatgcaataagtttcaatcactctatgttttcaatggaagttcaagtttcttgattgttctttgagatttagtagttcattgattcttatcactttcaagtttgtgtgagattatgtgttgatcttggtgcaatgttttatatgaagattctgagagtgggaattcattttccttgttaatg

SEQ ID NO: 13782 - DNA, 3000 bp, Unknown
  misc_feature (1)..( 3000): cDNA_ID_1808945_gDNA_ID_2214651_Annot_ID_136427 3000 nt of promoter + ATG
aacaaactataactatacgatagggtattaataaaacaaagtaagagttctagatatcaaaatagtattatgaaaataaggactgagaatgtaaacgatacgtactcttcctctatatgtgcttgttgaagccattgaacaaaggcccaaggcctatttagaacaacatatccctgcacattatatacaattcatcatcacatgttttttttgtgtaaatatttctttaagaaaatttcatcatccttggaataaaatttacacatattatcatttgttttacgaggttttttcatgtttgttttaaatcttataatttcataaaagatgcttatgtttattaaaaataatgttttaatttttttttgataaagaagaagttttatcctcaacatgatttcgtgaacatgcattacttattttgacaagtcaatcaataatataatacaagatttgagattgtttttttttacgttactattttcaattataaaataaacctctaaatcgaaaaataacatcatgatgattctaaaatctagctataaccaatacacctttcaccaataacaaagaattaagtaagataaagaaccttgtcaacaccggagggaagagggtcagcaacgaaagtagggatctcatccatgagtccatcgggtcgacccgaatgcaagatccgggtatacccgcccatatccgacccgggttcgtccctgaacctgttgtaccaataatacatgacccgacactgccacgtgctgtacacggaatccgtggctgtcaccgccgtgtgaaacagtctctttgtcttctttgacggagtcttgacggtatatgtgatgtcatctccggaagaagctgatcggcgaccggggagttcttgccggagaggaggatcatcggagactatgtagttgtatctgattattagaaataacgatagagtcatgagaattgggaagaagtacttcccacggaatcccattttctctctttttctgtatcaaaaattcattcatgtgcatatgcatttgctaatgtgtatatattatatatttttgatgtttgtgacaaggaagaaggcataagacagtttcaagttgtatgaaaagtcgtcgcttattgtgttattttgaaatgaggagtagttgtcagaaagtggctggtcccacaacgttctggtcttcgtttcattttctatacatgtatgagttatcaattcagttttcctatgatttgatgttataatagtattgcttttgttgttcaatatgattctacttgtttttatttgttttctcactttgttcttgtcggggaatatttcataagcacgaaaggggtttgggttctggacaaaagatggctaattcggctactacgaaccaaatgtttggtgttggatccgaccatcggattttgggtaataaaagcccaaggaaaagaaagctcatcttaacaatgaagataaatcaaggattataaaaaaaataatcatttcatacttcttaaagaggtaattgatcgtttgtaaggaaaattacaagagtcaaaatgtatggttaaatctctaggaagctgttgtgaatagatgttctccattaatgttttctgcttagtgtaactcgtattgatttaattgttagttactttcatggcttatgtgatacaagccacttgtaagattaatcaaaagttgtgaatttagtagataactcatatcaatcgagtatttaagactagtacaacaattgtctcacgcatcaaaataaggtggcatgcttagttaaacgcaatgcacatgtcttttcagtttaatatttctttagtttctataccaagttaatagtatcgacttacattgtactcggtttccacttgtgatcttcaaattgatcttcattgttttggtttaaccaggaagttgctgctacctcaatgaacatgaaaatgattgagcatatgatttgctaaaccataaataaaccaaacaatttatttcggtttggtttggttcggttttcggttattttactcacccactacagaacaaaactgacatatagaacttacacaaaatttctaataaaaatttttggtttcataatcttaaaatacaaaataaataaataactaaaacagtttttatataaccaaactgaactgaatctaacaaactaaaattcattaaaatttattttagttgtatgagagatataaccatattatataaatataatattgagtgaattattatttgtttctatttttagacatttttttgaaacaaaaaatgtaacccttatttaccactacatatactttaatctagttagataatatatacacatttaagacaacaaatctaaatttctaatacacataatctaataattttcttatacatttatgttataaaatacatctattctaatatcacacataaaaggattacgtgtcctaaacctgaaaaaaaacacataaatgtctatataggagaatctgctgtacattaatatttttattttatccttgtttttcttttcaattttgtttgtcttctttcttgtatctgttccattgcataactataattacctaaaaagttaataataacatatgttaataccgtaaaacattaaaagttcaattattttctttgtgtgattaaaacaaacatgtaaatttcctaaatcataactgtactaatatttaaagtttagaacaataacaattaattaactcacgcggtaaaagtgaaatctacaaagattccattgtccaataattcacttcagaaattgtaagagaaaacctggttttgtgtgtatcatcaaagtctaaactcattacagaaaaactgcaaaaagtcttttgtgggtcatagattttctaaaaagacacatttaagtttattgtcctccttctctctctctctctccactgcaactctttctcactttcactcaagattgcgtcactgtagtagtagtagta

SEQ ID NO: 13783 - DNA, 3000 bp, Unknown
  misc_feature (1)..( 3000): cDNA_ID_3438027_gDNA_ID_2214651_Annot_ID_136428 3000 nt of promoter + ATG
cgttggattctagtgttgtacttgttagagatgtgattaaggatcggtttcctgctctgaagggttttctgatcaaatatagagactcagagggtgatttggttaccattactacgacggatgagctgaggctggctgcgtctacgagggagaaacttggctcttttagattgtatatagctgaagttagtcccaatcaagaaccaacttatgatgtcattgataatgatgaatcaactgataagtttgccaagggatcgagtagtgttgctgataatggaagcgtcggagactttgtggaatctgagaaagcatctaccagccttgagcactggattttccagtttgcgcaactgtttaagaaccatgttgggtttgattctgattcttacttggaacttcataaccttgggatgaaactgtatacagaagcaatggaagatattgtcactggcgaagatgcgcaagaactctttgatattgctgctgataagtttcaagaaatggctgcacttgcaatgtttaactgggggaatgttcatatgtccaaggcaagaaggcagatctattttcccgaggatggttcaagggaaactatactagagaaagttgaggccggatttgagtgggcgaagaacgagtacaacaaagctgcagaaaagtacgaaggcgcggttaaaattaaatctgatttctatgaagctcttctagcactaggccaacaacagtttgagcaggctaagctttgctggtatcatgcattgagtggcgaggtagatatagaaagcgatgcttctcaggatgttctaaagctctataacaaagctgaggagagcatggaaaagggtatgcaaatatgggaagagatggaagaacgccgtctaaatggaatctccaatttcgataaacataaggaactgctacagaagttaggcttggatggaatctttagtgaagcgtctgatgaagaaagcgcagagcaaacagctaatatgagttcccagattaatcttctgtggggttccttactgtatgaacggtccatcgtggagtataaacttggcctaccgacatgggatgaatgtttggaggttgcagtggagaaatttgaactagctggagcttctgcaaccgatattgctgtaatggtaaagaaccactgctcaagtgacaatgcacttgaaggtaattacgtttatctataaaaactataatctagcgaaattacctgcaaatattggcagtgaatataacaatcaaacaataactgtaggtatgggattcaagatcgatgagatagtacaggcatggaatgagatgtatgatgccaaaagatggcagattggtgtcccatctttccggctagaacctttgttccgaagacggtcaccgaaacttcatgatattttggagaatgtgttttcagggcctcagtgacgaaacagtcatcatatcagccggcatcagttttcagtttttataaaggtttgtctgaaaattcggagtttttcaggttggtgtttgatgaaaaactaatctcttgatctgttccagcaattgttattacaggtatagtattcactattcattgggagttatacgcaagttttcttcgatttttggtttggttctcagcttatggaagcattgaagcaatattttttttaatctcttggcgggtattgctgtgaagaagatgagcgtgatgttattttttttgtgcagatgggttcaacatatttgttaattcattatttcatttttggtgggtttgtaattatatcatagttttgtatttttttttttttttttggacaaaagttttttaacttttttattcatcgattttttggattagtctttgtatctatggattggattggttattaattaataagatggtgaatgtttttggcttgtggcactcagaactgttaaccatcctacaattagaaacgacgtgctgtttctattcttgaagtagaatggcaagttgttaacaggcatggtagattggtagtgtagggtgagctacgatagactcgatgacgttgattccaaagaatagccgttcgttcttgaaaatcgttgattcacgaagaataaccgataacaaggaagatacgaggatagaaaacgatgctcaaaagaagaactcaaagctctatattaattcaataatcaaaagctgtcctacaatagagcatagcggctaacttaaatagaagacacaaaacataaaatcctagcctaacgtcagtgccaaagctcaataaacaatagaaaatcaacatgaaaataaagcccaaaaccataataaagtaaccaaggatctacactacaccacatgggcatatttaaccagcatagaaccgaacagaaccaaaatttgggatttggttcggtttcgggtatttatttcataagaactgaatggttccaatttgtagaacctaatggtttttgatttggttcgtgtaaaacccacagttctttagttcggttcagattctagtggtttgatcatattattatggttttgtatgggtattttggttaaatcgggtagtttggttactcttggttacacaacaaccaatcgaaaccgaaaccttttcgagtcttatttgcttcaaatttgaataatccatatggaaccgaatattaatcggttccaaatagatttaccaaatttacataccagaattacctgaaaaccgaaagaaccgatccaaacgaaaaaccgaagcccaggtacttgttgtcatgcgtatctgtaaagagtgtagtaaggaaaaacagcacgaatgtttataggaaaaaataaacacggcacacagttttgcactgagtttcttccccgagttggcgaagaaacccagagaagtaacacaacacagaagtagaatcttctttagtcatctcccgcaagtttaggaaagctctgaaattagggtttttcgtctgcgatcacgatccttcaattactttgcgataatg

SEQ ID NO: 13784 - DNA, 3000 bp, Unknown
  misc_feature (1)..( 3000): cDNA_ID_2704102_gDNA_ID_2214651_Annot_ID_136432 3000 nt of promoter + ATG
ctccatcagcatctaccttcagatcattgaccctcgtggaaccagttcatctctgtgggactgtttcgctagctaccaactctctatcatcaaccatgtcgatgattctctcacaatccgtaagaattcttggcatagattctctaataagaagagatctcatggatggtgcgatttcactttaaactctagtgttttggatcctaagatggggtttttgtttaacaatgattccttgcttatcacggctgatattatgattctcaatgagtctgtgagctttagtattgataataacaatgagtccgtagttggatcaatgactgatgtgttgagtggaactttcacttggacggttgaaaattttagcatgtttaaggaaatgataaagacacagaagataacgagtcctgttttcgtagctggggagtgttttttgaggattggtgtttaccagagtgtggttaatgcgcaagagtacttctccatgtgtttggacagtacagataccgaaaagagtgttttatcggacaagagcagttggtgtttatttagcatgtcagctttgaatcagaagcatggttgcactaacatgaataaagagtcttatgggaggtttgctgctgataataagagtggggacaatacaggattgggatggaacgattacatgaagatgtctgactttgtgaacccggacgcggggtatttactcgatgacaaggctgtctttagcacctcatttgatgttatcaaagagttcagtagctttactaagaatgggactggaaatggatacatgggaaagttcagttggagaattgaaaatttcacaagcttagttgatcttcttgagaagaggaagataaccggtctttacatcaaaagtaagaggtttcaaattgggaaccgggattgtcgacttattgtttatccccgaggtatgtaagttcacactagatttctcattgcatcttatgttatgctgttttatatggtagagactataatgtcggttttatattgttgttgtaccttactcttgatggtctcagggcagtcgcagccaccaagccatctttctatatttcttgaagtgacagattcacgaagctctagtagtgattggagttgttttgttagccaccgactatcagttgtgaaccagagatcagaggagaagtcggtgacaaaggaatctcagaatcgattctcgaaagccgaaaaagattggggttggcgtgagtttgtgacacttactagtttgtttgatcaggactctggatttcttgttcaagactctgttgtattctccgttgaggttcttatgttgaaagaaacatctctaacaaaagactacacggaggcagaatctgctagttcagtttcacaaattgataaaaccgtgaaaagttcatttacttggaaagtggagaatttcttggccttcaagggaataatggaaaaacgaaagatatttagcaaattctttcaagctggtggatgtgaacttcggattggtgtatatgagtcctttgacaccatatgcatatatttagagagtggtcaatctgcgggtaacgatgtggataataatttatgggttaagtacaagatgggtattctgaaccaaaagaatccggccaaaagtgtgtggaaggagtcatctctatgtaccaagacatggaataattctgttctactgtttatgaaggtgtctgatatgttagaggctgatgctgggtttcttgtgcgtgacactcttgtgtttgtgtgtgaaatattggattgttgtccttggtttgagttttcagacctagaggttagttcatactttatttctttcttaaacattgtaattatgttactaaacattacattatggaactattgttttggcctttatttttaggtcttggcttcagatgatgttcaagatgccttgaccacgaatcctgatgaagttattggttctgagaaaagtgaggaagacacattccgtaagtgatttcgtgtctctatcagtttctcgtctttgttgcgattagagatatagtttgctaatcttggctaattaacctaagaattttcctcatgcaggtcaggtcagtccgtgagaggcttaaaagtctaggtgctgatattgccgaaaatgagacttaggacatcaacggtgacttcgttcgtgggtctttgatttaggccattttgtttagattttgaataaggcttggttttatattctactttttggagactagtgtgtttaagttttaaggcttaatgttggttgaaaataaaaaagaagcttaaagtttagaattgacatttaaaagatttattaatttatccaatttagttaaaaccatgatttacaaaattgtttattacaattccttacctttataacaacaatacatccataatcaattaaaaaaaaaacaaattaggaaaatgaagcttcatcaaatagtgattttctactttttctatggggtcggagatagattgtgaaataaaaacacatatgttttataaaaaaaccatgaacttatgactctattgttaaccaccataaataaatatgtttggtttattaaacaatgtatatctcttaggaatggatacttctagattttgatatttctaatttcttacaaaatttgtgagatgagatgataactacatcaaacttttttcaggtctaaaaaatgaaataaagcatgaaatatgttaccaaaaaaggaattttattttttgtgataaaagcattttggacaacgaaaatcaaattgaaaagaaaatgaaacaaaaggcattgggagaagtcgaggaggcgcatgttaacacaccatgcgcacgttaaatcctgtctttgccctctctctgtagcgaaacaaaaaaaagaaaattgatcaacctagataaaatagcagaagagaagaagctgtgagaggaaaaaaaaaaaaattgaagacaaaaaccgccattgaaatgatg

SEQ ID NO: 13785 - DNA, 3000 bp, Unknown; identical to SEQ ID NO: 13783
  misc_feature (1)..( 3000): cDNA_ID_3438027_gDNA_ID_2214651_Annot_ID_188645 3000 nt of promoter + ATG

SEQ ID NO: 13786 - DNA, 3000 bp, Unknown; identical to SEQ ID NO: 13782
  misc_feature (1)..( 3000): cDNA_ID_3031892_gDNA_ID_2214651_Annot_ID_188644 3000 nt of promoter + ATG

SEQ ID NO: 13787 - DNA, 3000 bp, Unknown
  misc_feature (1)..( 3000): cDNA_ID_3031896_gDNA_ID_2214651_Annot_ID_188643 3000 nt of promoter + ATG
agaactcaaaatgctaagcagtgaaaacaacaaagccaaatcataacttgtaatattttctcttaactcacattgcaataacagtgaagatgaggaggaagatgagggagacaacataagcaactttagagtatccaacagaattggttctatggcaaatgtgacacatacagatgactaataaacagatgccaaacccaagaaaccaaacagcagcaagaacaaagagaggaacagctgtatagctcactgactgcaatatcaaaacacataatcaacaaatcacagcaacacacaaagaaaaaacaacaatctaattgaagtggagagaatcttacagcccagtaatgttggttgctgatattccatcctccagtatatttctcaaaaccattgagaggatcttttctatatgttctttgagcagctaaagctactgaagcaacttcaattacttgagggttgttgaaacctgcaggtcctaataatggtgcctctgctactataaatttcattacagaaccggttttctccgaagaagctgaaaagagacgaatcagattgaaattcaagaaacaaaaaaattgtagtaaagactgaaactttttttctgttatctcaaaccctagaaattgcatatagatgatgttcaagagtcatcaagttctagaagctactgagaaaattcagattatagacaacccccattgtgaaattagtcgaaaatctgtaaagaattaagcaaagttttgaactttttgagcattttcatggaaacaagaaacagagaatgtagaagaagagagaaagatttttttttcttttttggtaaaaaagagagaaagttttatcaagaaagaacctaagagaggaaacacaaacctgcgggaggctgagtaggagaaatgtgaatagtggaagctccatgagaatgagaaatagaaagagaggtaaagaagcaacagaagagaagaagaagagacattactactactactacagtgacgcaatcttgagtgaaagtgagaaagagttgcagtggagagagagagagagaaggaggacaataaacttaaatgtgtctttttagaaaatctatgacccacaaaagactttttgcagtttttctgtaatgagtttagactttgatgatacacacaaaaccaggttttctcttacaatttctgaagtgaattattggacaatggaatctttgtagatttcacttttaccgcgtgagttaattaattgttattgttctaaactttaaatattagtacagttatgatttaggaaatttacatgtttgttttaatcacacaaagaaaataattgaacttttaatgttttacggtattaacatatgttattattaactttttaggtaattatagttatgcaatggaacagatacaagaaagaagacaaacaaaattgaaaagaaaaacaaggataaaataaaaatattaatgtacagcagattctcctatatagacatttatgtgttttttttcaggtttaggacacgtaatccttttatgtgtgatattagaatagatgtattttataacataaatgtataagaaaattattagattatgtgtattagaaatttagatttgttgtcttaaatgtgtatatattatctaactagattaaagtatatgtagtggtaaataagggttacattttttgtttcaaaaaaatgtctaaaaatagaaacaaataataattcactcaatattatatttatataatatggttatatctctcatacaactaaaataaattttaatgaattttagtttgttagattcagttcagtttggttatataaaaactgttttagttatttatttattttgtattttaagattatgaaaccaaaaatttttattagaaattttgtgtaagttctatatgtcagttttgttctgtagtgggtgagtaaaataaccgaaaaccgaaccaaaccaaaccgaaataaattgtttggtttatttatggtttagcaaatcatatgctcaatcattttcatgttcattgaggtagcagcaacttcctggttaaaccaaaacaatgaagatcaatttgaagatcacaagtggaaaccgagtacaatgtaagtcgatactattaacttggtatagaaactaaagaaatattaaactgaaaagacatgtgcattgcgtttaactaagcatgccaccttattttgatgcgtgagacaattgttgtactagtcttaaatactcgattgatatgagttatctactaaattcacaacttttgattaatcttacaagtggcttgtatcacataagccatgaaagtaactaacaattaaatcaatacgagttacactaagcagaaaacattaatggagaacatctattcacaacagcttcctagagatttaaccatacattttgactcttgtaattttccttacaaacgatcaattacctctttaagaagtatgaaatgattattttttttataatccttgatttatcttcattgttaagatgagctttcttttccttgggcttttattacccaaaatccgatggtcggatccaacaccaaacatttggttcgtagtagccgaattagccatcttttgtccagaacccaaacccctttcgtgcttatgaaatattccccgacaagaacaaagtgagaaaacaaataaaaacaagtagaatcatattgaacaacaaaagcaatactattataacatcaaatcataggaaaactgaattgataactcatacatgtatagaaaatgaaacgaagaccagaacgttgtgggaccagccactttctgacaactactcctcatttcaaaataacacaataagcgacgacttttcatacaacttgaaactgtcttatgccttcttccttgtcacaaacatcaaaaatatataatatatacacattagcaaatgcatatgcacatgaatgaatttttgatacagaaaaagagagaaaatg

SEQ ID NO: 13788 - DNA, 3000 bp, Unknown
  misc_feature (1)..( 3000): cDNA_ID_3031910_gDNA_ID_2214651_Annot_ID_188637 3000 nt of promoter + ATG
aagactcgaatttgggacctctcccatattcagtcgcaaggttaaccaacggagctatcatctactttttcaaaccggtaaaggaatatcatctatttttttgttatgataacgtatgcaccaagtcaaattctaagtaagttactacacaattgtgtaaattgtgagtcatactcttgttgcatacgcgttttttccttcgtcttttgttttttcctctgtataatacttgtatcaagcatctactaaatcatcttataattatctcattggttgtttaagcacaatcatatagggcttattttgcacccttgttctaattctggtggcttttgccttttttctaaactgattaaatctccaatgaggcattgtttgttaagaaattttcacaaaacacacttttttaccctttgcttgttcttactactctactggttcctttgcaacgacgagtttctggtctgttttgaacaaaacaaaaccaaaactctgattcttacacactttcatatatcctcaaagccaattggttgctttatatacaaataaaattttttgataaagataagttgagtgtgtttttacttcctccaagcatagataatcaaagagaaccaactcttagacccgaagctcctctcatcttcttccctacaactagaccactccatcacagaagacatcctagaagaagaccaatgactatacgtactcgcccaaaacgacggtgttcgacaattctccttccgtaaaatgacatcgtctcttacacgcttgttcatcatcaaaacgtcgtttccttcaacctcttggttctcaaaccggagtaagaacacggcgggaatcttatccggtttaaccttatccttgccaccaaacagccagttgaaaacatcccatgatatctgtattgtcacaccatcgatcacgatctttgtgtttcctctgaatttccattgaagctgactaatctttaggacactcttatcgtctacgctaaaccggagactagcatcgtcgttaacaaccttaacgtcgatactaatctctctaagttttccttgaatcatgattttcgtagagtaaactctgtttccaaacagattctctttcttggacaccaagatttgtctcctcggtctctgtttcaagtttcctccaccgacaagaagacctacttcgccggatacaaagactgccacgtaaaacccggattccggatcgggtcctgatccaaattttgcgtgagtcaggtcccataccacccgaatatccggctttcgagataacttctttgatccattttttctccagaatgtcaagggtttgatttcgagccggaaggcgaagggaatggagtgacggtaacaatctagagagtgtagatagcaatttgtggagttgcatgagtagaaatgaaggtggagagagcgtcggaggaaggatcgagaccatgaaagaaagaaaacaccaacgttagtgtggtactgacaagttgtggtagcgtcgccggaggtggagatatacgatggatttgatggggatggaagagccgacggtagatcgtcgttgatggcggtggcggaaggatggaaacaggcggacaaaggggaggagccaccgcgaccaagagcagagattttcatttttaggtatagtcaattaatatgactggttgatcttatatacgcacatgcatacaaaaagacactaattatatgtaaggatatgactatttgagtatttatctatacttgagttggcttatgtgtctgaaaatgagttgtcatgttgtgaaaattcaaaagagtgggtcaatgtcgagaaattgaaagcaactttgtggataaattttatagaccgaaactgacgttcattgatattttgtgctggttttcacattatttatatgtagattatgttctagttcaattcttttgaagtcgcttgactttttgtctctttcctagtttccttaatcttttccacttatattagtttttaacgtttgtagtcacagtgaaagctaccaaaattctaaaaatggtaaagagaaatagaactgtatcttgttaaagctcggttttcatgttacttaacattacatatgttgtgtttgatagtataaaataataaatttgttatggataattagatgaaaaaattaaagagttttgcgataagtaagatatttgtttcttgttggtttaagagtcggtttgggtccatgatataacactaattaaccaatagttgtggccttgtgggaggtaaatgatccaacaaactttgctttactaactcacatcttttttcttttgaataactaagaggttttggcctaggccaatacatcctctcgggatgggactaaagcattttatagaattttctttcaaatgttattggaaccagcaacctctaggcttagctaaaatattttaccagttttgagctattgacacttgataactcacagtttttagatgtagtttctctaaatcatgcatataaaataaacatcatagagatcactagtagatgatttcatcaactagttctatattcgatacgattttacacgaaactcgtattttcgaaatgttgtacattgtatgatataaactttagaaagggaagatacaaaattaagttgctgactatatgctaaacctatagacacgtgaacaatgagatgacggcaaacatgtggatttaagtttgcttcggtttgtttcagtttgttctagtttgctacaacaaaactccaaaatattgttgatttggtggctacaaaaaaattataatataaaaatagaagatatgtgtttgattaaatatactaacatagttttgatcgtattaggtagagccatatttagataagtttgtggactgcgatgaagttatgaagccacacaatatgtatttttttttccctcatgcttgattcgttattttctctgtgatttgatatgtatgcaaatttatttatta

SEQ ID NO: 13789 - DNA, 3000 bp, Unknown; identical to SEQ ID NO: 3112
  misc_feature (1)..( 3000): cDNA_ID_3031914_gDNA_ID_2214651_Annot_ID_188635 3000 nt of promoter + ATG

SEQ ID NO: 13790 - DNA, 2762 bp, Unknown
  misc_feature (1)..( 2762): cDNA_ID_2704491_gDNA_ID_2214652_Annot_ID_136436 3000 nt of promoter + ATG
aagcttgaccattaaacaaacagaaccttcttgataaaatgctcgaattcaaaatttaagtaccgattggtcctagaagaatctgtaaattaaacagctcttggtaagaaccaaacctagctttcaaaacatgaaataacaataagaaacctttttcgattgaacggcgaaatatatccattgaagatgttgagagtgagaatcgaagacgaagaggtgcaattactcgcagtttttttttttttgtaagttaattattaatttttgacttcattaaagttaattatttgctgaaaaaaaaaaaaaaaaaagttaattatttagtatcttcaaatataatatttaaaaaaatctagccatcttaatgcattttaatgaaaatcctacccaagttttttaaaggtcaatttaaaaagtatcagttttgatttttaattatattcaatatttgttaaattttgtttcatatgttaatattaaaaacacaatctatttcctaaacatttatatacagatcttttttaaaaaaggttagtcaaaaactgttggaaaagctaatctttttttaacaaaaatagtaaaatactcatatacgtaactttgggcctttcttaaatggctttgggcctttcgtaaatgggcttatgggcttaagtacttcaaatctgatagtatttggtttattgcaacaaaaacaataaatggaaatagcgatctgagctgaccaaccacagtcgcggacagagctaaaaccaccatttgaagaaggagaagaagaagaagacgattcggtgaaagcgaagatgggtggaggaatggaaacgaacaagaacaagttcatcgaggactggggatctgctagagagaatctcgagcacaatttccgctggactcgtcgtaacttcgctctcatcggaatcttcggcatcgctctcccgatcattgtctacaagggaatcgtcaaagatttcgtgagtttaaatctctctatctctatctcattctcgatcctatttgcatttcgaatcctcccgagttagatatctgttttgtgccctaatttttcatgtatcgtatggaattggatcgtttgatacatttgaaattggggtttaattttagctgtagatgcatttgaattagattagttcttttgctgcaacgattggattcggaactggatttcaattttcacctccatactagtattcttaggtgatgatggttcgatttcagattgattataactcaaaattttcgagaccgaccaatgaaagtctaagattggagttagggcagaagaaatttagttctcttttagcttgtaaaaattggatctttggctaaaaaaatggttttaactgctttctattgttctgagtttgagtctgagctgatttggttatgaaaaattatgtatagtggactttcaaggttcttaatctctcagcagttcattgctacaatccttgaggattcttcctccatagtagtttctactctgtgtccttgaatatagattcttgttaggaccatgtttatgtggttgatgatctatgccatcccttgttagtggaatttgtctatgacgattgagatggaaattttttttatgtgttacttccaatacaattgtgtagttattgtgattaatatactaagttcaatctaatggactctaaactcattttttgatagcatatgcaagatgaagatgcaggcagaccacacagaaagttcctctgaggttgtttgcaagaacactctctgcaataaagtctcagcaatgtgaaatttcaagacgaggatgttaaaacccgcttttgttttttcatttcaatcaacatctggaacccaaggatataatttattttttggaaaagtttgttgtaatgactacactttgttatgcaaataaacaaaactcagttttcccttgagtttgacatacttattgtgtgtgttgattcagcatatgcaggatttaaacacttgttctagaggcacaaaataaaatgaagcattgaaccaaatcaaggtccgaaacaaaataaatggttatcctgaaagcaaacccctgaacttggatatgagtcaaatggtgtatgtgggtaggtgtatagtcttaacaagtaatgctcattgtgaacttgaagcaaaaataccccctcactagtcactatgaaaccatgtctttaactttaacattaagttttgatctatggatcgtcgaatggatttataagttcaacttttgtttacaaatatagttattttcttaagaatttttttaacaaaataaaacaattatgaacaataggtgaaaaaatggcgggaggaggaaacagaaaggaagggcaacaaagttaacggaatatataaaaaaacacaacaacgaacagattgtcttaaccaaaaatagaaagatttctccaatccatccaatatttgtttccctctcaatctcctctcctctcttttaggactttccctctttcttcaaacatacaacagattaacaaatagaaaacgaagcacaaaagatatcagaagaagagagaagtctcctcccaaaaaaaccaaaaaaaaaaaaaaaaagagaaagaaaagaactcgagtgcaaaaagcttctctcttccttcccatggggtgcatttgaactaatctcctccttgaaatcgcttgattgattgttataaatcgattaatcgattcaaaccgttggatattattccaaaacaacccaaaaagagaatcccatg

SEQ ID NO: 13791 - DNA, 3000 bp, Unknown
  misc_feature (1)..( 3000): cDNA_ID_2714082_gDNA_ID_2214652_Annot_ID_136437 3000 nt of promoter + ATG
ttacaccaacacggggtatacgacaaggagatccgttgtcaccatatttattcatcctatgtggagatattcttagtcacctaataaatggaagagcgtcaagtggagatcttcggggagttcgcattggcaatggagcaccagcaataacccatttacaatttgcagatgattctctatttttctgccaagccaacgtacggaattgccaggctctaaaggatgtgtttgatgtttatgaatactattcgggacagaaaataaatgttcaaaaatcaatgataaccttcggatcgcgggtctatggttcaacacaatcaaagctaaaacaaattctggaaattccaaaccagggtggaggagggaaatacttgggcttacctgagcaatttggtcgtaaaaagaaagaaatgttcgaatatataattgaccgagtaaaaaaacgaacgtcaacatggagtgcacgtttcctctcgccagcaggaaaagagattatgctaaagtcggtcgccctggcaatgcccgtctatgcgatgtcatgcttcaaattacctaaaggtatagtttcggagattgaatcattacttatgaatttttggtgggaaaaagcttcaaaccagcgtggaatcccatgggtagcgtggaagagactccaatactcaaaaaaagaaggcggcctgggctttcgagatctcgcaaaatttaatgatgctttacttgccaagcaagcatggcgtctcatacaatatccaaactccctgtttgcacgtgtcatgaaagcccggtatttcaaagatgtttcaattcttgatgctaaggtaagaaaacaacaatcttatggatgggcatcgcttttagatggcattgcacttttaaaaaaaggaacaagacatttgattggtgatggacagaatattcgtatcggattggataatattgtggactctcatcctcctagaccgttaaatacagaagaaacatataaggagatgacaattaataacttgttcgaacgtaaaggctcctactacttctgggatgattctaaaatttctcaatttgtcgaccaaagcgatcatggattcatacaccgtatctaccttgctaagagtaaaaaaccagacaaaattatttggaattacaatacaacgggagaatatacggttcgttctggctattggctccttactcatgatccgtccacaaacattcccgccataaaccctcctcatggttcgatcgatttgaaaaccagaatctggaatttgccaatcatgccgaaattaaaacacttcctttggcgagccctatctcaagctcttgctacaactgagaggttaactactagaggaatgcgtatagatcctatttgtcctcgttgccatcgggaaaatgaatcgattaaccatgctctctttacttgccctttcgcaacaatggcttggtggttatcggattcgtcactcattcgtaatcaacttatgtcaaacgactttgaagaaaacatctccaatatcttgaactttgtccaggataccacaatgtcagatttccataagcttctcccggtttggctcatatggcgaatatggaaggcaagaaataatgtagtattcaataagttcagagaaagcccgtcaaaaactgttttaagtgcaaaggctgaaacacatgattggctcaatgcaacacaaagccataagaaaacaccatcaccgactcgacaaattgcagagaataaaatagaatggaggaatccacctgccacatatgtaaagtgtaattttgatgctggtttcgatgtacagaagttggaagctacaggaggctggatcatcagaaatcattacgggacaccaatttcatggggttcaatgaagttggctcatacgagtaatccgcttgaggcagaaaccaaagctcttttggcggctttacaacaaacctggattcgaggatacacacaagtattcatggaaggcgattgtcagacgctaattaacttgattaatgggatttcgtttcacagttccttagcaaatcacctggaggacatcagtttttgggcaaataaatttgcaagcattcagtttggttttattaggagaaagggaaacaaattagctcatgtcttagcgaaatatggttgtacttattctaccttttattctggttctggttctttacctatttggcttgatcgatacttttgtaatgactctaattgattaatataattgttttgacgtaaaaaaaaaaaccaactctaatttttcaacatcatgctattgtagtattatcaatcacataaataaagaattagattcctacaaaaacaaagattttaataaataatttagaaaaaaaattctattaatacaattcagttatacttctttttaatatatatatatatatatatttatttatttgttgatactaaatcaccatctgaattgagtacaaaataaatgtcatggttgatcatataaataaaaatactattgagttttaatgaaaatactaagatctaatataataagtgacaaaaaaatattatagatatttaggcgatataaaattgattactttctccaagaagtaaaggaaaaaagaaaaacaataatcttcctccaaaatcataatcatttccatttgttgagaggcatgttagattttttggtactaactttatgaaaatgataaatgtgatgtagtaagtgatacaagtctacactctattccagttatcgcaaacccaaccgatccagtctctttagattccctttctcctagatcagaccacaaccatttggccacttctgtcctaatttattctctcatcaaaacctctattttgcttctccctttccttacaagctgttcactatatcccctgcgatttgtgtttcccacaaaccctaattttgcaagaagaggggtttcttctaatttatataaatctcggttctttttgccatttcgttttctctgatcatg

SEQ ID NO: 13792 - DNA, 3000 bp, Unknown
  misc_feature (1)..( 3000): cDNA_ID_2704136_gDNA_ID_2214652_Annot_ID_136439 3000 nt of promoter + ATG
taatgattcgacccgggataaaagcagcttgagaatccgaaacaatcgagtttagatgagattttaaacgattcactaagcatttggagatgaccttgtataaaacattgcaaagtgctataggtctatagtcggagagtgttgtagggttagtgatttttggaatcatacatatgttagtatgatttatgctgggtttcataaatgatgtttcaaagaattttttgacttctaatataacatcgtatccgactatatcccaacaattcttataaaatcttgctgttaacccatcaggccctggggctttatcatctcctatttggcagatagcatcatatatttcggtgtcactaaactcttttgtaagatctaaattgactgtattagtgactgtggatttgaagtccgcaaagtctattggtgatacctttataccattggtgctaaagatatttgtaaaaaagtcctgagcgtggtttccaatttctttatctcctgtgaacatccttccttgatcgtccatgattgtgttcactcgattttgagaatatcttgtttttgtacaggcatgaaaatagccggtgttttgatcgccttccttcatccattgattacgactcttctgcttccaataaatctcttcgtcactaaaggccttcgctagtgactcttgaagttgtggaattagttgtctgtcaaccctccttgtactctccattgctctgtttaggctgctttgaagttttttgattcgttgttctgagtttaaattagaagcgtgtttcagtcttgccatggcttgtcgacaactactgatccgttccgtgataggtgtagaacgtgaattccggtttgtcctccagcttgtttgaacaatacgtttgaatgtcggtatgtcaattaagcggttatcaaaacggaaaagctttgatcgacggggaaatgactcgttgaagtgaactaggaccggtttgtggtcagagcccgtgaagtccaggaattctgtttcagcatatggaaatgttgcagtccaggctgaattaataaaaactctgtcaaggcaacatttgactgtgtgtgtatgtctttcccctacccaactgaatctatctccttttgatctcatatcttcaatgtcacaatgagaaaccatgtttctgaaatttctaaaagtccattcctctctcatgggaccaccaattttttcagcgttcgaaagtatctcattgaagtcacccactagcaaccattcagcatttcgattatctgagatatgttcaagagtttgccatagttgatgacgttcagattgagtagggtgaccatacacacaagacaagtagaagctcttattattaaatgttacatgagaatcaatgagtctttcatcctgagaaatcaaggataaagagacattgtttttccacataagagctaagccaccactccttccattagggggctgagttattacattagggaagcctaaatcatatgctagtttacatactttatcacactggtttaaggtttcaactaaaaataaaatatcatagttatacatacggaataagcgaaacaaccgcgattgagtcagcggcataccgatgccctgacagttccatgagatgatcctcatattggatcccttaggggtaccgggccccccgcgcctccgtcacgtccatcatgtatcgaacacgatcctgcagattcagtctttcttcctttcttgcaaagttgactcagaacgcccatttcatctgcagcttccacctgttggtacatttcttctaatcgaaccctctttctcttcatgaagacaaactcattttgtgcattgtcagaggactcaaggagcagatctttctcaaccggtgcgtcagttttaactcctgcaagtttggcgtgaaggtagcggagtctttcaactgtgaggtctgtgtcctcaatgacgcatggaaccgaataaccatctgaaagtttttgtacctggcgttgattcccctttgaaagcgaagattgaaggccgggaataagagtcgctggatccactgtctgaagagtatcagtgtcgcttatgtcatgttctttgttgtcgtcgtgatgatcgtcatcatcatcagcatcatcatcatcacttgtctccaccggatctgcccaataggagactaatattattttggggttctttttgtcagaaattacttggatttgttttttttttcaaaccacacagtaattaaaaataaaactttttacattggcattttggtcttaacagcattgtgattcttctcctgccaacaaaaattcatctaataccatcatcaattatatggattattacaattttgttttgtcatttcattctaaaaaatatgagtgatctaattcttgtaaaattttgatgtgtaacctgaaatattgatacactaatctatagccaattaaaaatgacaaaacataacattgggtaaatagtaacataaaaatatacatgaatcataaattttaaaagtatgctaagtatgtataagatttaaaaaaaaaaagattttaagagagttataacagtaacacacttgaaagccgaagttttgttcttccttgtctcagcgccgcgttttttctctcctcatcctctcgatgaattcctctcaagcttgcttcttccatttttctcttagaccaatctcgctttcgcatccctcctatgccttcctctcgaaacgtaagttttccttccccaaattaagtgcttgggaatcgaaattttaagagattgttgttacctagactagttcaggatacaatcgttagagtttcgttgcttcgaattgattaaaccctaatttcaaaagcacagacctgggtttttcactgttcctgcaaagttgataactttttcactgatactatctcttagactagttctcttaacccggaaattctctcaaagtatccaactttatgaacagaaacaattgttgaggc

SEQ ID NO: 13793 - DNA, 3000 bp, Unknown
  misc_feature (1)..( 3000): cDNA_ID_2714080_gDNA_ID_2214652_Annot_ID_136442 3000 nt of promoter + ATG
ttaatggcaaatatttaaggccaaactttccggtcttatttgtatcctccttgatgtattaatgaatttttatttcaagactatatagttaaagatcacaatgagtgacgaaagattgttttagatgttaaaaaaaaagtgaaatcaattcatttacttgtggcatatttggctaatttgaaagcacaaatatgagccaaagtacatttgatttaaaaacaaaagtcgacaaatagttgcattaagaaacaagaaaaaaacattgtttcagttttgcaaatcgtgatgatcacttaagcctgaaacttcccacgaatcagaggatccagacgattgcctatgacattataggtagcttccgatggatgaatcgagtcaaagaacataaactccgaccgattttgacacacaggagaaaagacattacacatgaagctcgtctccaagaaccctgttccacaacatcctctcttcgtctctttgaaccctgtttcgattccacacacacgaatcatatatatataaacaaataagataacttgtggagcaagaaaaatctttatgtacataccgtatttgctagggttttggatcatctccatcataggattatagacatcggcgtaaaggaatttgcttcctggaagagatgcttcgatttggggcaagagcttctgaagtttctcattgtacaaaacagagtctttgttatggtgttccaagcagaatctaaaaatgttgcggaatttagcagtcatatggatcggtaaacaccccattggcggtaaacctccaaccaaaacattccggacacctaaactgtaaagctcctgcatatacaccggagagattaacaaaacaaacaaattatcataaaactttcagtcactatagtctgttccaaaaccctaattgtggtaatatatatatgaagaaatattttagacgttacccgcacgaaattttcaagcctcttaagaataaaatcttggtaaccagaaatgaaaggatactcgagacgccttgagggaatatcgtaatagttcaaaatgaaatcattaggccctgcactcacaaccacgaaagcattgtttatgatctccatcgctttcttgtctcccacgatacctttgagacgagcaatgtaactcttgaacatgtttggttgttccgagacacgaatggcttgtgtcgagagactggttaggtcgtcgtaaccgcaccagctgatgcgaaacagactccggttagaatgtcttggtcggagagatttggttgtaagaaaggaggaataaactctttgatgttgagtttggttgcgattatgtcggagataagttttccgtttgagaatcttccgttagcttttccgtctggaagatccatgccgtaaggaaagtgttcagctctgaagattgttggtaaagggtagttgttgttgcctgtgtcgacggttgaatcgccgaagattagaatcgctgggaagagcggtttcgttgttgcatttgcggctgcgtcgcaggacgctagtaatgttgttgtgatgaagagagttaaggttatggctttagaagtcgacattttttgttttggtttttgttttttagtagatttgaagaaatgtgttgtttttgtggtgtatttataaggtgactttttttttgttaccaagctggctttgtgaggttgtttttcttttaaagtgtgtaacaaatggatgaagtcaagagctttgaaccttatagtctaaataaagattttgttaagatattgatgagcttttcacaaaactgaaaaacaatgtggtcaaaagaaaataaatttcgttggtcgagcaaaggaaaatagaaaagcaaacgtttttgtttagcgtttaagaattgataatgtgaaaaaacaaatcgataaagaaacaaacaaattaaaccaacatatcttgattccaactgaactccaattctgaattctggtttaagaaaatgacctaaacttaagctgagagtgttttgtcgttttcttgctaacaagtcatattaagattgctatatttattaaaatttaacattaacccaaaagaaaaaaagattaacatgtttataaatacctgaaccacaaaaaaaaactaataaattctgttctttcatatgatatggataacatttaacaacatactataacatgttccagcatgagatacttaacttactaaacacgaatctagagacagttagaacaagtgtctagaaaaataatttataccaatatctgaaaccaaaatcaaactctctgaagtaggccatacttcttctgttcgtgtggccagcggcgactccgtgcatagttttctttagataaatccaatattgataagttgaaaaaaaaacaatttgaaaatttacactttttaagtttttataaattaatgggacgattttaacatttcttgatgaccaatgacaacattgcttgatgttgtaaacaatgttatgaagaagatgtcaacttcatgtcttctcaggtcgcaattcaattttatatcatgtaaataaatgggattactagtgatctcttctgcaatacactttttaatatcagaatataatttctcatgttcatttgaatacactttgttttctccttccaattaagtagtatacaaattttcacaacaatactttatgtttctcgatgtgattcaatgtttatgcaacattattattagtaaaatagatgtccataaattaaatagaagttgaaacttgaaagacaaaccgagacgaatcccaaaatggaaacccaatgtttctcgaacacacgtttcatggaatcattgattcgtttgcatatggccccacaacaaagatggcatatatgcaataattgatgcttctacgtcgccacttttctaagaaagaaaccatctcctttatataataatctttcctcaccactcaatatgttatatccgataacaaaaaacaatcacagagagaaaaacca

SEQ ID NO: 13794 - DNA, 3000 bp, Unknown
  misc_feature (1)..( 3000): cDNA_ID_1808682_gDNA_ID_2214652_Annot_ID_136443 3000 nt of promoter + ATG
acaaattgttacctttaacttgggtcgtggttaggattgatggctgtcactttcacaggtaattgtctatagcttacctttatttcgtaaaagtttgtcagtctttttactgcattgaagccttagactagtaaaatccttgcgctccataggattcagctaggctagcctgttcagttttattatgttctgttgtggttgcatttgtctagggaatattctgattattgaatctgaacttgcattttcagaaagaagtcattttgttagtgattactagtcttctgtgttgcaaattacgactcatggagcttgcttggattttgatagattttctgacgttcatgaatttgagaagccaaatgatgagcaagctctgaaacttatgaattcatgtgcagtggctgttctcgaggagtttgaggatattcactttgcctatggtgtcagtgatgagtataggtgtccatctcgcaacctgtttatctcagctttacataatttagatattaattaagttcatcatcgattacagctttgttttgaagaaagaatctgagctctacaaaagacaatccaggttaaactaaatttctctttttccttacacttttggccgtatctccctgatatccttagtcttaatacttagtattgcattacagtaagataatatctgcagtcgcatccttctttacatccacatatgtgttacaatggggagaatttttccctcacaaagaattgaagtaccctccatcattcgatggacgagctgtatgctatccaacatacaatattctcttggattatctggcgtggagacaagttgactgttagtataataacactgtgataaattatttggaatcgtctatatctttgcaaaattttagatgagtagtcttatgttttctttgtttttcgtttggcaggccacatcaataatcagtacaatacatgtttctggatgcttgttaagtctggaaaaaacaaaactcaatcccaagattacttaaaggtactttgttataatggattgaaaaaaattattctcaagtagtcaatgcttagaatggttcttatcttactctttgtgaatgacattcccagggtacacaaacacgagagaaaaatgagctgcttagccgtcaatttggaattgagtacaactcattacctgtaatctttcgaatgggttcttcggttttccgtctaaaggttagtattgccttaactttaaatctatgcatagaaagattatgatacagtggactggctgagaaactttataagtgccaaactggttctgctcttatcgtatcgtatgaatcaattaagttactcaaacctttggctgttaactcgtaaatggctaaatccatataccaaacctgaaatgtaactacctgccgaggtttcttactgtttctatcaaactcatcaagcagtcgtgaagatcttcttccgttgcagaacttgatatttgtagagctgtctgaatattctttttcaggaagctgagaatggagtagtttcagggaagaaactggaaggagaagtggtcgtggatcattgcaacatcatcgaacgctgtttctgggaagaacacctacacattcttagctactcataaacagctgcattttagtattttacttcacttgtaagactaatttattgcaaattcttaatctccaattagcacagctttacttcttttcaacatgtgttataccttagtttttcacatgtatgtcaaccattgttaagattttagaaaagttattggttttgtatgttaaatacatttgtggaagacgagagaagggagatagatagatatgtaaaacattaaattcacaccatacctgtgcaccgaccaactgctaacttctcttgcgttacgtaaaagtaactttatcctctccatttattttgttaatgtataatcactagagaccagtattattaataattttctatcatgttgttgaatagtactagtaattcaaatgtctattaagtcggtccaactacttgataagacctatagactaaaattttcaggtccggtggttagattctgagatatgtttttgttctcattccattttaaattccgactttatgtacttgtatatatttggtgaaaaatttgtatataacttttaaattattcaaccgagcaaaagtatacttttttgtttgtttgccacacattgattgatttattacttttaagtatatcaatttaacagggaaatataactgaatctagtaaatataataactttcttgatttgggtctcaagtctgagaaccaaaaacccaatgatattttgataaaatactattttttacgtgacaacttgcagtaaatcagtatctataaattctagatgttttcctataattttcttgctttttgaacaagctataattaagaaaaatcaggtcaaacattggaaagcataattggcagcgaatcctattacagattttttccattaatcatatcgttaatatctaaaatgaaagtcaattgtagtggtcgttttggaaaatatgaaaggtggcaatttgatatgtttttttttgtagtgaaatttatttccaattacgttaatatttaaataaattccgtgtaaatattgatactcgacacaacacgcaaaaaaaaaaagaaaaaaaaaaaaagagttatatatttgagatttcttgattttaaataaggaattgagttcatgtaccaactaatcaatgaaagacagaaataagaaaaatataaaaatgagaagggtaagcaatcaatatgaagtcgtggatgcttaccccaccattcgtcacaagagattcgtcatttaaagcattctgatcttataacatttatcaaccatatatatacacacaaaatatttgttaacaaaaagatttatatttcttctcttctttgttcataactaagaactcagaaagagaccaacgacactgcaaatg

SEQ ID NO: 13795 - DNA, 3000 bp, Unknown
  misc_feature (1)..( 3000): cDNA_ID_2714076_gDNA_ID_2214652_Annot_ID_136444 3000 nt of promoter + ATG
tcatcaagacgtgttgaggatagggattccaacaataacctgcaccttggcgactcatccaaacgcaaaaacatgataatcctacaacgtgaaaaggattcagaacagaacaagcaacaagaaacatatctaaacatgggaggtattctgaaacctcctaaaaaaacgttaacatcactcgtttgattctgtcaattttttatttacaactgacatggtttcatgttacagttgaagttaacagtttgaataagagttcagatatggtctcagtatcactttttggaacatgacatatctcaattttttatttttttttcacaagagtgtccattttattataaggtcatttgcaagaataacacttttctactaaaaaattaagaatatagcatactatatgtatcaattaagaaactaacatgaagggtataaaaaatgaccaacggtggtggtggtatgagttccggcgaaggtttccggcgacggagctccggcgagggttttccggcaagggagttccggtggtgggtttcggcgatggaattccggcaaaaatttccggcgagagttttccggtgaagaagttcaggtggtgattttccgacaacgtagttccggcgagggtttcccggcgagggagttccgacggtgatttttccggtgagggagttccggcggtggtttccggcgagggagttccggcggtggtttccggcgagggagttccagcggtgatttttccggtgagggagttctggcggtggtttccggcgagggagttccggcggtggtttccggcgagggagttccggcggtggtttccggcggtaattttccggcgagtgagttccagcggtggtggcaaaggttccggtggtggtggtggtggtggttctgggctgggatggtggtgtgaatagttatggtggtgaggatattattgtattattacactttatacacttaatatcattgtatttttttgcataggttagtttctcaatttataattttttgatggttataaatgtgaatttccctttattatatcaacataagccaaaatttgagacaaacaacagagccaaattcaactaaacataagtgtaagacttttcaaacccaactatgaagcccaagtaggaaaccgcatcaggaagaaagaagaatcattgaaacagaacctaaaacacgtgtcatgagaaggttaggtgctgaagacacgtgagaagaagaagatcggagaatcactggtcgccgccgaagaagattgttgactccatagaaacccagaacaccgcgatatgcatgttgaatccggtgatagcaattgtcaattccaaagctctaaaaacaaatcttcaacttcatgaaaattcaacttcaaaatcttcccgattaaacgtcaacggttcaggaactcaagcatcatattcatcaatcttatgttggagagaattgtgtttaggcaaaaacgaatcgcctaaaaccacaacactaatatagatcgcataatttattcaacagaaaaaacaaaaagcggcaacagatagccgaaacaaagccgaacctcgccgtagacaaagctggaccataccagagacaaaaccagtaaacaaactggatggagaaacaaagatcatgtttcctctctctgaataatcgtagagagagaagagagagaaattgatcttttgccttggttgactctcttaaattatagtaattaaaataaatctaaactgataaaaaaccacagagccgactctcttcagagagttttaagagggtgagagagccgtatacgtggcaacatgtgatagggtgattaattttaacaaaggaaaaaaaaaatcaagttttatttttttcttcacaacatctctcacaccacgacggctatgaaaccaaatgatcaattccgtcggcgttgttagaaaggaagctgagaattgcaactgcttacaaggtaagaatcactcactatccatttccatatttcttcatcaatcgagcttaattcagctttgttgccttttaattttgtcaattcgaagtgtttagagttgtggatttgatgttcttgttattgattcaaacgtttgaacaaattatagtatttggtagtgtatgatgagaaacatacagatctatttattatgtgaccgtggcattgagatgattttagattttcgattgtcaataggaatactaaattgtatctttcataaacatcgttggctcttatgttagttccactaatctctctcaccttattgccactgatttcatcttccaaaatcaaatttagctcagagatcactaaatagacaatggtgatagataaatgaacctaaacaatgatctaaagcttcgttgcttgtttttcttcttaagctcctctttgctgtcttactttcgcctctcctctgtgtggtagtaagagttaatgtagatatagaagaactatcttcgtgctcttattatttattttccgctttgacacaaaagttttatgatttcacacgaacccttcacttgttgatgttgtcgcttctctcgaaccatatttgtcttaaggtattaaaacttgtcctaattctccttgtcttactggtgaggatttgaaattctgtactttcctgcacacgattccctagctaagaattcattgtttttgaacttgagaaaatgatcttattggaaagttttatatgttcctgaattgattgtgatctttattggtactgcattaagaatcttatatgctcctgaactagtattggtaaggaatactgccatttttttatctccttatgtgaagtaaaccgtctttgctcatatagtttggtttctctttcacagagcaatgtcgactcagctttcggtttaatatcctgttcgattgcagttttttttgtgtctggtagtttcaaagtcgatagcgtagaagcaaagaagaaagaagaaaactttcgtgaaaccttgagggatatg

SEQ ID NO: 13796 - DNA, 3000 bp, Unknown
  misc_feature (1)..( 3000): cDNA_ID_1663221_gDNA_ID_2214652_Annot_ID_136447 3000 nt of promoter + ATG
aaagtgttattcttgcaaatgaccttataataaaatggacactcttgtgaaaaaaaaataaaaaattgagatatgtcatgttccaaaaagtgatactgagaccatatctgaactcttattcaaactgttaacttcaactgtaacatgaaaccatgtcagttgtaaataaaaaattgacagaatcaaacgagtgatgttaacgtttttttaggaggtttcagaatacctcccatgtttagatatgtttcttgttgcttgttctgttctgaatccttttcacgttgtaggattatcatgtttttgcgtttggatgagtcgccaaggtgcaggttattgttggaatccctatcctcaacacgtcttgatgattctcctgtttcataaacccgtctgactcctggtgtgggcgcagcaacagaggattgaagtctgccaataccactttgagtagtaggatgagtgtaaggctggaaggctgcagttcttgaagatgagaagtagggagtagcagcagctaacctgattacatctaaaccggccaaatttggttcctttttacttttttagtatccggtcgctacttttggttgtgactattccggttcctcttgaaattagtttcctaaattaaaacgttcggaaaaattctaaaccggatagccaaaaatcgaagtatgccaagttttggccacccataatttcgaaaatacaatttgtcaattgcaaagcatcgttgcctgagtctcccattagccattagaccatttcgattttgcatacgcttttcacaagtaaattttagaaatgaacaaaattgcaactaaactgaaatggacatctccaaatgttagaatgagttccaacttccaacacactagtttttgtgcttatggatctgttatcttcttattaagcctaataaactaccactatctaaactactataccctaccggacactgtaacaaaacctctcttaatagctcagggcagataaacatccgatacctacactgtaacaaaatctgtagacgattaagagcgcaacataatacgttttatgtcacttcttagaatgatatagtaaggcagagatcctcaccttttcccttctgggacatacacaaaaataacttctggcaacgctaacagctcaactcagcttgtattttcttcttttactacacttttaagtttacactccttctgtggattttttcgtttcgcttgaatatgatgcacaaacgcagctactataacatggagctttgggggaggcttgcttgttgaagagacattatgaccagcatcctttaaagctttagccacatgcttttgggctttctggaagtgtatattacacagtgcaggaacagtcgacgcaagtgttggttttccacaaagtaatggtcctgctggggctctgaatgtacaatggaaacaatgcagagttaggtgagaattgcttaaattatcattatatgctaattacaaaccagcatacaaacttacctatatatgaaatctaggttgtaaaaactcaaatctgaaacttggtttatgttttaatactaccacaatgggactattctaacacaaatacattttcaaagggtgatatagttatgctaatactcatatcctgactattttacaaatacacatcaaaacagacaacttcaagcatctgcgtcagttatgtgtatcaaccagaacaacaaagcacatagagcaatattttaacacaaggcaactactgaatctataaatgattaccgacgatcactatctcgatgtccaaagctaagacttctcccaaaccctatgaaaaactttgaaaaaaagtcaagtgtcaatcccaaatcctttctgcaaacttgaaaaaaaaagagaaacaatctcttggctcactacataacacaaaacagctttgcagtttcaattcatcatcactacaacatcttcaccaactataatatgcaaagaacacaacttgaagcatcaattactttggtttatacgagaattttaaaaccaaataaagggaaagtgaaacaaaccgtttaatgacgtttgtgcaaccagtgtagagcttctgcttactatccttgagaatatgcaattgacagtatttcgtaagcgccatagctttagctttgcatccatacatacaactcccacaattactattcgcatactgatcactcttaacaccatcattgttagtaacattgtctccactaccttcaacagcatcaccaccatctccgatatctccctcttgaccaagcctccgtctcttattcgattgattattttcgtctttaaactgactaatcccatacttccaccaataatccctgtgttgtgccttgacatcctccattaaagcccaataattgtctctataacacttggccagctgcttcaggttgtgtgatcggcgtttgagaagctccgaccgggttatgtgactggagcgtgcgaggatttcatcttcttgtgacatcgtaatcggtgaattcgatgtcgacggtaagccgctggtgctagggttaggatttaaggtagagtttcgaattaggggctcggctgaggtggaagccactgcggttgttgatgcagcgccggaggaatacggaggccgtggtggtttcgaggagaaagggttttgctgaatgttcttggaagctgacgccattgccgtcgtcggaaaatgacagagcttcaaaatcagatgttcttgtcgggaatgaaattattaatttttaaaaaataatattagtacttaaattttaaaatatattaaagcccataaaatgtccattgggctgacatattcaacaaataggcccaaactcaattggatgtgagacctaagtttctgaattaggtcaatataaatactaaaatcatatctgataacgaacacgagcttaccgattctcttcgtctcaacatttagggtttcagagatcggctgattttcacatccacaagt

SEQ ID NO: 13797 - DNA, 3000 bp, Unknown
  misc_feature (1)..( 3000): cDNA_ID_2704128_gDNA_ID_2214652_Annot_ID_188675 3000 nt of promoter + ATG
tcatagatgctacaaggacaggaagcattgctcacctgattaatcattcatgtgtggtatgaatatatctgttaatctaattcaatttagttagcatctgcaaaaactgagcatttttgtctaactttaatgcagcccaattgctattctcgagtcatcactgttaatggagatgagcacattatcatattcgcaaagaggcatatccctaaatgggaagagctgacctatgactataggtttcactttgatgccctttgaatcatctgagatattctatgatcattttctgcctctgatcttgtaatgtttacaggttcttttcaatcggggagcgcctttcatgttcgtgtggcttcccagggtgtcgaggtgttgttaatgatacagaagctgaagaacaacatgcaaaaatatgtgttcctcgttgtgatctaatagactggaccgcagaataagcgactaaaactgtagttagtaacaatcatccctttataatgttgtagctccttataatgagagagcatctgttgtttagttttgccacaatccatttttttgtacagatactaattagtgagtagtaaactacacggatcacagagtggtaaagcaacagtacaattctctttttctttcctgatttgagtgtgccttaggttttatcctgatggtgtcaatttttagcaattgggatgcagagcataatgtttttaaccttactgtctagtatctctacctgaaacagaggttttgcaaggatttaaatcattgatttgtccaaagcaatatccctttggtaccaaaaactgcatttacacaaagtatttatagtttcgtacatttataaaggcagagcaactaattgcattttgagttatttgtgctatgactacttttctttgacaattactacaagacagataaccacagggtttttcacagagaatactatagttttggcacaaggtgaaatgcataacggtatctttcaggtaaaatagagctgccaagggtggcacattcataggttgtacagttttcaatcgattgttgttcattgtaaaatacacttttggtaaaggtgattgcatgcggattccctcctttagaaaacagggataaaagatacattctgaaaacgactttttcggatgtggctcgccaacaaaagacgagatggtaatccctgagtcgtcgtttgttcttcttggttgagaaagttgtaaatgtcaagtccgactccttacctaggaaattcacagcagagtctttttgcgtctgaccgcagattagacttgcagacttggaaaaacaagtggtgaacgacacctttgtcatattgtctgacatatggctggatggtgaagaggtgatttggagtactaatttactgtattttagcttcaatctttgtgcttagagaacattgcttgattggccaaaatgtgttgtccataatgaaggttcttgggaagctggaaacgttattgatggttttgaaaatgtaaagatagtgccctctttgtttgttttcatgggaaacttttgttctcgcccatgcaacttatcttttggctcttattcaagcatttggtaagggatcattaatgtgcttagaatctcctcgattgtcatcaaaactttaatcttatataattgttgagtacatgcatccattcatttttcaggcagcagtttgataaacttggaagaatgattggaaatcatccacggctaatagcaaacatgagtccatgacgcatgtacaatctccttcactatccaataaataaagccagggtccatgaggagacatgactaataaaaactcattatctgtgacaggtctctcgacagtcttgccaagatgcggtttaccagagtatttaaccgaagagcttcgagatgttattaccaatccagagagttttctatactgcatgtgaactctccattgttcatctatatggttattagtcttatgaacacaaaagctgcagctatgatcttgtatttgtaaaatgcagagtaaagttctacaacaaggagattgtgttcttccgacacgagcttctatacagaatgagccgttcatgcttaataaccccttcctgaaaagaaactaatgacccattttattttccaacttctgattttacagtttttcgaattaatctgaaacttgtgaaatgtgtttgttcagcttgtctccacattaattcatcagagccatctatgttatctaactctcttggttcaacacatcatttggaactatgaccactgtccactgccttcgactatatccaactccacacacggtacattcttaaatcttcttaataaagattgaatgccacctagtttggaagcatgaaacccgccttaaaaagaaaaaggattgttaaagttgttgttgtttggaaaacagatattattaggtgacaagagtgagcaaaacgtatgcaaatttgggggagaaatatgtttcaatccaggctccttttcaactgatagcaccttcgtagcttatcgaccttccactcaagaagtcgaactctctgctctgtgatcagataaaaagccattagcttaaaacataacttcatgtcttcttctttgcttctctgttttcttcttatcatctccatcatgatgtctatattaaaccaaaattagtcacaatcatcataaaatcaagtatatcaccataagctccactatacatttggctggtacgttatttttgatgtatattgattttcatggaggcatatagctaacgtgtaacaaatttgaaattttaatgtagagtaaattcagattttaaaagtttcaaaacttttcaactttgaccttttcatgggtccttcttttccctcgccgtaaataccaagtctcacacccaaacactcctctctcttgtcatttaaaagactagagtcattcttttctacaaactgaaatgagcaaatataaaaacactctaacacaatg

SEQ ID NO: 13798 - DNA, 3000 bp, Unknown; identical to SEQ ID NO: 13796
  misc_feature (1)..( 3000): cDNA_ID_1663221_gDNA_ID_2214652_Annot_ID_188674 3000 nt of promoter + ATG

SEQ ID NO: 13799 - DNA, 3000 bp, Unknown; identical to SEQ ID NO: 13794
  misc_feature (1)..( 3000): cDNA_ID_1808682_gDNA_ID_2214652_Annot_ID_188669 3000 nt of promoter + ATG

SEQ ID NO: 13800 - DNA, 3000 bp, Unknown
  misc_feature (1)..( 3000): cDNA_ID_3031975_gDNA_ID_2214652_Annot_ID_188665 3000 nt of promoter + ATG
ctataggtctatagtcggagagtgttgtagggttagtgatttttggaatcatacatatgttagtatgatttatgctgggtttcataaatgatgtttcaaagaattttttgacttctaatataacatcgtatccgactatatcccaacaattcttataaaatcttgctgttaacccatcaggccctggggctttatcatctcctatttggcagatagcatcatatatttcggtgtcactaaactcttttgtaagatctaaattgactgtattagtgactgtggatttgaagtccgcaaagtctattggtgatacctttataccattggtgctaaagatatttgtaaaaaagtcctgagcgtggtttccaatttctttatctcctgtgaacatccttccttgatcgtccatgattgtgttcactcgattttgagaatatcttgtttttgtacaggcatgaaaatagccggtgttttgatcgccttccttcatccattgattacgactcttctgcttccaataaatctcttcgtcactaaaggccttcgctagtgactcttgaagttgtggaattagttgtctgtcaaccctccttgtactctccattgctctgtttaggctgctttgaagttttttgattcgttgttctgagtttaaattagaagcgtgtttcagtcttgccatggcttgtcgacaactactgatccgttccgtgataggtgtagaacgtgaattccggtttgtcctccagcttgtttgaacaatacgtttgaatgtcggtatgtcaattaagcggttatcaaaacggaaaagctttgatcgacggggaaatgactcgttgaagtgaactaggaccggtttgtggtcagagcccgtgaagtccaggaattctgtttcagcatatggaaatgttgcagtccaggctgaattaataaaaactctgtcaaggcaacatttgactgtgtgtgtatgtctttcccctacccaactgaatctatctccttttgatctcatatcttcaatgtcacaatgagaaaccatgtttctgaaatttctaaaagtccattcctctctcatgggaccaccaattttttcagcgttcgaaagtatctcattgaagtcacccactagcaaccattcagcatttcgattatctgagatatgttcaagagtttgccatagttgatgacgttcagattgagtagggtgaccatacacacaagacaagtagaagctcttattattaaatgttacatgagaatcaatgagtctttcatcctgagaaatcaaggataaagagacattgtttttccacataagagctaagccaccactccttccattagggggctgagttattacattagggaagcctaaatcatatgctagtttacatactttatcacactggtttaaggtttcaactaaaaataaaatatcatagttatacatacggaataagcgaaacaaccgcgattgagtcagcggcataccgatgccctgacagttccatgagatgatcctcatattggatcccttaggggtaccgggccccccgcgcctccgtcacgtccatcatgtatcgaacacgatcctgcagattcagtctttcttcctttcttgcaaagttgactcagaacgcccatttcatctgcagcttccacctgttggtacatttcttctaatcgaaccctctttctcttcatgaagacaaactcattttgtgcattgtcagaggactcaaggagcagatctttctcaaccggtgcgtcagttttaactcctgcaagtttggcgtgaaggtagcggagtctttcaactgtgaggtctgtgtcctcaatgacgcatggaaccgaataaccatctgaaagtttttgtacctggcgttgattcccctttgaaagcgaagattgaaggccgggaataagagtcgctggatccactgtctgaagagtatcagtgtcgcttatgtcatgttctttgttgtcgtcgtgatgatcgtcatcatcatcagcatcatcatcatcacttgtctccaccggatctgcccaataggagactaatattattttggggttctttttgtcagaaattacttggatttgttttttttttcaaaccacacagtaattaaaaataaaactttttacattggcattttggtcttaacagcattgtgattcttctcctgccaacaaaaattcatctaataccatcatcaattatatggattattacaattttgttttgtcatttcattctaaaaaatatgagtgatctaattcttgtaaaattttgatgtgtaacctgaaatattgatacactaatctatagccaattaaaaatgacaaaacataacattgggtaaatagtaacataaaaatatacatgaatcataaattttaaaagtatgctaagtatgtataagatttaaaaaaaaaaagattttaagagagttataacagtaacacacttgaaagccgaagttttgttcttccttgtctcagcgccgcgttttttctctcctcatcctctcgatgaattcctctcaagcttgcttcttccatttttctcttagaccaatctcgctttcgcatccctcctatgccttcctctcgaaacgtaagttttccttccccaaattaagtgcttgggaatcgaaattttaagagattgttgttacctagactagttcaggatacaatcgttagagtttcgttgcttcgaattgattaaaccctaatttcaaaagcacagacctgggtttttcactgttcctgcaaagttgataactttttcactgatactatctcttagactagttctcttaacccggaaattctctcaaagtatccaactttatgaacagaaacaattgttgaggcatgtgttttgaccttgataatgtttttgcaggagacccatttctgtgttctcaacccagaaaatgccttactacgaatttgaatatgtcaagaacgagacaagggcattctatacaa

SEQ ID NO: 13801 - DNA, 2762 bp, Unknown; identical to SEQ ID NO: 13790
  misc_feature (1)..( 2762): cDNA_ID_2704491_gDNA_ID_2214652_Annot_ID_188662 3000 nt of promoter + ATG

SEQ ID NO: 13802 - DNA, 3000 bp, Unknown; identical to SEQ ID NO: 13797
  misc_feature (1)..( 3000): cDNA_ID_2704128_gDNA_ID_2214652_Annot_ID_136448 3000 nt of promoter + ATG

SEQ ID NO: 13803 - DNA, 3000 bp, Unknown
  misc_feature (1)..( 3000): cDNA_ID_2714060_gDNA_ID_2214652_Annot_ID_136451 3000 nt of promoter + ATG
tttgtcactctcaaatatctgctgctgccttactgcaggacctgcaccatcaaatatgcaaattaatctaaagatcttccaaacgctaagccgagacaagataattagaatacaaaattattaccacaatcctcaggtgaccagttcttagcaattaaatttttgaactgaatactagcaatttgacgcactgccatgtcacaatttccatccacggctatctgcaataacctcaccaaatgctggggcgtgtgctccaactgcaagacaaaagaataacgagaaactcaggcatcagaaactgcataactttaattgatcattagaaatagtaaacaccactgaaatctggctacagtgaattaaagcaaataacgatttgttcaaaaagagtgggaatctttgaactatcttcagtaaaaccagaaagtgaacttataaggaaactctatacatgaactcagctcaaactttaagatactactagcagaataagaacaatcaaactcgcgaccaagcaaccgtgtaaatacatcgaaagagaaattgaagtggaaactgagaaacctgattgagttgctgctcagaaactttacgctcatcgggaatagggctaagagcggcggttcggaggatcaaagcgaggctatgcagatccattctccgtggagtttgagaatccggacactaaacagagtaaaccttgatgacgatcagaggcagtggttgatattcgatttgaaattcccaaccaagagagagagctgaattagaggaggggagaatctcagaagagcatgatagggtttaagagggacaagaatggcggagaagaaggagaagaagatttgattgatagttggcgagagtggaggagagggacaaatagagctggacgatttacagtatttaaatccctagggttgtttaactaaccaaaaccacccaattttgattctgattgacccgggtcttctttagccggtttattccgaaccgggtcttctcttactaaatgacgtcactgattctcttactaattaagttcaggtgaatttgaggggaaaacaaatatttttggacatgtatgtgtctgaaaatgtgattttccctctttttttttgatgaatatatagtttaaaataaaaactaacaaagacataaaaaaatgtttttctccttttaatcaagtatgtattattttatttgttctggtcataatcctaagtgagtgtggttggtattttgatgaaaatttaaaattgttcattccataatatttatgtccaagtatatatggacgtaaatcatgtaagcgatgatgaatcccaatgttagatgacatcaaagaattttgtgaccataggccatatgtgttgtgtaaattttgtgggtatctagagaaagccaaccaacaaacgctatatggatactttgacaataagttccatccatcagctgccagtttgtccaagtatcaaaatttcatccgaaaagctgataagccgccaatctgccccaagtatctaggaaacgacatattctaatgcctagttgatgggaagaactttggaggtacacacatcacctatcttgaagctcatgaaagcaagtattttaaccttacttacttttaaatatatatgtctctagcgtgtatagcatccctatgtggatcaatttagagcactagtgagcattgtatgctaccgcataagaaaatgcaactactgttaaccatgatgattacatccttattaacatatatgacacactgcaaaagtcactggatgcgatcaagttagcagcggtattttccatgtgtcaaaagcatactaatatactacagtcaaccgtatattgttctttagttaagttaagtaaagactactcctactagacagatattcggtttatgaatccaaatcaagtaattgctatgaatagccgttcatttaagaatgaagataagggaagtgagttgaaatgtttcttttaacctcatatctttacttcaacttatcacaccttaaaaactggattagagttccacttgtccgattcatagaaaaaatcttgtatctatcacaaaaatctttaacatatgtttgattatttatccacaaactaagctttttaggttgaaatattatattattctagaaaacttcagaacaatccaaaacaagtaataccaagggagcaaatcgttggaatttcctcacaagaaaattctctagctcatttgagaaaataggtagtattacttgaagaaccccattcaataattgaatttatgagcaattcggttgatttctaccttcattcaaattctagtcaatcttgtctttttgttccaatggaatttaatttggattaaccagaaaaatatgtcttatacactatacttaacagactaaaaacccaaaaatatacgtatgaactgaaaaaaaacaaaacaaattccatgtagtgaagattacacaaaaactggtaaacaacaattatctgaaaacaaaactatataaaagaatcagagactcttgttgaattttgcccaaaaaaaaaagactcttgttgaaaataaaatacatgacaaccgggattttttttttctacaagtggaatttttatttattttatttttagttttatatgtttttattaaccagatattaatttttatatacatacacacacacactatatatgaatgtatgtatgcggagatatataaggagacagagcaatagatctgaaagacttgtcatcatcttaataaacccggcgggaaacgtaaaaaagccttttagcttctccctccaaaggatctgtttttttccctttttctctgattcttcttcctaaaccctaatttctccaatccacgaaattccctagcaatttttttgggggtttagtgaaagaaggatagagagagtgagcaaaggtgtctcctttacgaagccctgtgctttctccctccgaataatctccatg

SEQ ID NO: 13804 - DNA, 3000 bp, Unknown
  misc_feature (1)..( 3000): cDNA_ID_2714056_gDNA_ID_2214652_Annot_ID_136452 3000 nt of promoter + ATG
catcagtgcaaaacaacagcgcaacagtttcaaagtccatgaatttcaacagttaaagagatgataggtagaccctaacctgacccatttcttagctgaacgagaagccagagtcgccttgtcctgattcttgctagaagaccccttccttcgggatgacccattttgcttattcccactaaacgcattgttttccttacaccttcttaaaccaatcgactccatacccgatttcaccaactcacaattaccaatcttccttctcttcttctcctcaaaacaatcaatttcatcaagctccacactttcagtcttcacagccaccgcctgatctagtaaacactcccgtagcggcctcttacggcgacgatagtagacgcgaacaatctcaggacgctgaatccgcaacttataatcatccgaacgacaacaatcgtcactagcactaacaccgctaccttcaatctcgaattgctcaatcatcggaagcttctgggccttaaccttcttagacatcagactgtgagaaccaacggcattaacacagcacaatgccgatgaaggaatagagtagatactctcaatagaatcgtagcgaatcggagcttccactagatcgtggacatcaatttcgatctgggtttcgttagaaaaacacgccatggagattattcggagggagaaagcacagggcttcgtaaaggagacacctttgctcactctctctatccttctttcactaaacccccaaaaaaattgctagggaatttcgtggattggagaaattagggtttaggaagaagaatcagagaaaaagggaaaaaaacagatcctttggagggagaagctaaaaggcttttttacgtttcccgccgggtttattaagatgatgacaagtctttcagatctattgctctgtctccttatatatctccgcatacatacattcatatatagtgtgtgtgtgtatgtatataaaaattaatatctggttaataaaaacatataaaactaaaaataaaataaataaaaattccacttgtagaaaaaaaaaatcccggttgtcatgtattttattttcaacaagagtcttttttttttgggcaaaattcaacaagagtctctgattcttttatatagttttgttttcagataattgttgtttaccagtttttgtgtaatcttcactacatggaatttgttttgttttttttcagttcatacgtatatttttgggtttttagtctgttaagtatagtgtataagacatatttttctggttaatccaaattaaattccattggaacaaaaagacaagattgactagaatttgaatgaaggtagaaatcaaccgaattgctcataaattcaattattgaatggggttcttcaagtaatactacctattttctcaaatgagctagagaattttcttgtgaggaaattccaacgatttgctcccttggtattacttgttttggattgttctgaagttttctagaataatataatatttcaacctaaaaagcttagtttgtggataaataatcaaacatatgttaaagatttttgtgatagatacaagattttttctatgaatcggacaagtggaactctaatccagtttttaaggtgtgataagttgaagtaaagatatgaggttaaaagaaacatttcaactcacttcccttatcttcattcttaaatgaacggctattcatagcaattacttgatttggattcataaaccgaatatctgtctagtaggagtagtctttacttaacttaactaaagaacaatatacggttgactgtagtatattagtatgcttttgacacatggaaaataccgctgctaacttgatcgcatccagtgacttttgcagtgtgtcatatatgttaataaggatgtaatcatcatggttaacagtagttgcattttcttatgcggtagcatacaatgctcactagtgctctaaattgatccacatagggatgctatacacgctagagacatatatatttaaaagtaagtaaggttaaaatacttgctttcatgagcttcaagataggtgatgtgtgtacctccaaagttcttcccatcaactaggcattagaatatgtcgtttcctagatacttggggcagattggcggcttatcagcttttcggatgaaattttgatacttggacaaactggcagctgatggatggaacttattgtcaaagtatccatatagcgtttgttggttggctttctctagatacccacaaaatttacacaacacatatggcctatggtcacaaaattctttgatgtcatctaacattgggattcatcatcgcttacatgatttacgtccatatatacttggacataaatattatggaatgaacaattttaaattttcatcaaaataccaaccacactcacttaggattatgaccagaacaaataaaataatacatacttgattaaaaggagaaaaacatttttttatgtctttgttagtttttattttaaactatatattcatcaaaaaaaaagagggaaaatcacattttcagacacatacatgtccaaaaatatttgttttcccctcaaattcacctgaacttaattagtaagagaatcagtgacgtcatttagtaagagaagacccggttcggaataaaccggctaaagaagacccgggtcaatcagaatcaaaattgggtggttttggttagttaaacaaccctagggatttaaatactgtaaatcgtccagctctatttgtccctctcctccactctcgccaactatcaatcaaatcttcttctccttcttctccgccattcttgtccctcttaaaccctatcatgctcttctgagattctcccctcctctaattcagctctctctcttggttgggaatttcaaatcgaatatcaaccactgcctctgatcgtcatcaaggtttactctgtttagtgtccggattctcaaactccacggaga

SEQ ID NO: 13805 - DNA, 497 bp, Unknown
  misc_feature (1)..( 497): cDNA_ID_2994569_gDNA_ID_2214653_Annot_ID_136458 3000 nt of promoter + ATG
taccgttgatttcttcgattcgattttttgggacgtgttttgaggattcttctatctctgggtttacgctgattgatttcgagagctgtagctagggttatctgctactctttgttgcaaattttgtttttgttattcctttttgaggtgaacattgttcttctctttgcgtgattctgttggcatttgtcttgttatattcttcgtttgattatatgctcttctccgaagactggacttttgttattcggtcgattcgattatgatgttttttgaggttttgatagggcttcgttatttaaagatgttcctagctgcttgctattgatatccgtggagtgctattgttctaactgaaacccatcttgtaactttccaggtttttgtattctattgaagattataaactaaagggaggagctttgagaatttgattgttgatatccaaggatttgcaagctagttttttttttacgacgttatacttttcgattatg

SEQ ID NO: 13806 - DNA, 3000 bp, Unknown
  misc_feature (1)..( 3000): cDNA_ID_1808014_gDNA_ID_2214653_Annot_ID_136460 3000 nt of promoter + ATG
agcgggaggggtgcttggggcaatcggcgagactatagctgagattgcacagacgacaaagaacatagtgattggtgatgcgcctgtgaggacacatgagcatggaactactgatcctgactatatgagacgggaacatggacaacgttgaaaagtaatgtataatggagaaatgttttggtgtgtttttgctttacttaaaaaggtcttttgtttttttgtatgtaaataacaagaagctctgtttgacagagttttgtggtaaataacaaaaaaagttctgtttctgttaagaagtttgaagaatatattagtggtttcctttgaaatgaaactgtaccaacctttatctactctacaaaactaagttgtagtgatccttgtaatatacgactcatattggtattaaaggactctctcaggcattgtaacaaacaaattgactgctacaaataattatcccaatgtcccacatatagagacccaaactttgttgcagacaaagaagaattgatgataggcaaagcatagagaagcaagaatggtatttggtattcaaaaaggaatgagcttttctgcatatatgagtgtacgaaacgaaattattcaagcaaaactgtatttcatagttaatggtgtaacacacattgtgaattgagatctacattttggtaacattatgtaacttgatctacaattctaaactaagaaacagatacgaattttcaacagactattgaacagaaacgaaactagaagctggaggcttcaaaggcataatcttcaacttcaagggtttaatcccacctttcttaaactgtgggggctttggtgggataatctttagcttcaagggcttcttcgaaacattcgtcggtttctccggtgctagtttaatcttcaacttcaacggcggaagcgagaagccggagaccacttcaccacgcaagaactgatgagacaataaatccgaagcacttcctctctccttagggttccttgaaaaacacgtctctagaaacttccttgcatcacacggtaaactctttggaatctccggcgctttaccttttgatagagcaggcgcaagatcctcaaattcaacctccgaccatggaatcacaccggtatacatctccaatactatgcaccctaacgaccacaaatctagggctttctcagccacgccgctacggactgattctggcgacatgtaaacaggcgttccaacaaacggcaaatcaacatcccagcaatcagaatattctccgacttttctcgaagacccgaaatctgaaatcttcaattcgtaagattgtctacatggaaagacaagtagattatcgggttttagatcgcaatgaacataaccgagtctatgaacagagactaatccttgaagaatcatacgagtaaagtctttaatcatcgtttccggtaactttctatctttgtaactgtccatgaaactgaataaactccctgcagctgcgtactccataaccatcttgtagactcggaatccaccgacatcgaagtcctcttctaaagtataattcccatagcattgcacgatccttcgacatccttcaagtttggatagaatctgaatttctctttcgagagagttgtagtcttcacattcggcggttttcacggcggcgtaaagaggcaaagcgttatcgtcgcgtttgatgtacttgacgagatcgactgatccatacgcaccttttctcaagaacttcacgaactctgtttttggttgcatcttcggaacaacaacaagagttattatgcttcgaatctcttagtatctctcaaggtttttggtaactttgaactgtaattaaaaaccctagaaaaaaacgaatctcttgaaaagttgcagcgacagatagagagagttaaaaaggaaactttggtagctttagggttttttcaagtctgtgacttataaacgtcgagagagtgtaagcacgctccataatctaccgctgttcacaagtaataatagatcttgtccgttgaatttattttagactttttttttaatggacttcattttaaatttttacaaaattaaattattgcattttctatttcatattgaattaggagatgttactgtccgtcagattctctagacttttttttttaaagactgatctatgatcagaattccaattttttttttctttaaggaaatacatcagagagaaaaattattacgaaacgattctattacaagtaatgattttaacctttttttttttacaattgacaatcttttcacaacaaaaatccacaagaaacgttagacaatggcataaatttatttaaattaatccgtatatattcgccttctatgagaattgaattctataccactgtaaaattcttaaacgagataagattattttcagcatgtaaaaaatggtttgtggtttcaactcatttgggctattagttttacatttaggcttgcaaccttgtcggtttattttgtgtaggcttttggtagatttgggcttgcaaacccaaattaacttgttggccgacatacatttgtttctattacaaatttaacaacaaacgtcaataaatacacgtgaaggaaatgagaacgaccctcttaagtagtactggaaattgaaaaaaagaaatctagaaatgctaacatgtaagtttttgttaccaaaaatgcaatttgtatgtagccacaatttcatggccgacctgctttttttttcttcttctttctgaaaaccacaaatatgattacacgtggcctgaaaagaacgaacagaaactcggtaatgtgcaaaaaatatcttactcttaatacgtgtaattttggagtgtaataggtctatcgatctataaaacgatactattggagattagattcttctcatctcactttgttcatctaaaaactcctcctttcatttccaaacaaaaacttctttttattctcacatcttaaagatctctctcatg

SEQ ID NO: 13807 - DNA, 3000 bp, Unknown
  misc_feature (1)..( 3000): cDNA_ID_3032007_gDNA_ID_2214653_Annot_ID_136463 3000 nt of promoter + ATG
agttttaaaaacatctgtgacataataatctaatccatggataaatgggctcaatcctatgtctacaggcccagatagagccttctttggttcttccgttgacgaaaatggacccatctgttatttgcgatagtaccaacaaaaagaagaatccttattttattttctcaatatttaaggaaatcatttaagtcgagagttgaattgaatgatatggcggatgctaggtaggggcataaagtattgtgatagggacaatacaaatgtagatatgtatatgagcctatgacgacatgagtttgctcaattccacactttcttgtcaaatctgccttaaatccattattctcacaagttccggtttgtgtcacttcactaatgaccttcgaattcccaaatctttattagtgagactttatagcccaaattaacctggttctagtattaatttaagtatgtgaatcctcaaactgttcatgcctaaatatttataacgattattagaacaatactagtcataatggtataaattttgcagcaataaataacaaaatatgtacagctgaaatctgatcagaagtttaaagggacataactttttttaatagcatttcaattttttttataaattcaggtctacgaacgaaacgattggcatttttagtatgaaaagttagaataaaatcaaataatgtattaattaacagtttaacacatataacgatcgtattaaaactcatacgaacgagtaaacttgatgaattggctttctttttacagctcataatagtatagtactcaaaaaagtattggtatatcagtgtgtaaagaaacaaacgactatcgccagtatgtttctgtcacttatttagattatcatgagagattgaaaatggcgaaacgtgggtggaccatttttttttttttttataatctccttctcatcaattattgaacaattcaatctccagcagattattattgattggttctatatattgagttattgactaaattattcgcttcgtgttgccttcgaaattggatctcaattaactaacttatatactcatcttacttattttcttgtattttttttttttgataaattgtttgattcacagtcgagactttcgaccatatagatgtgtggtttgtggtactcaaaagctacatgatattgtatgaaaaagaagatataatacaatagtcttatgtctagcggccataacatatacattagttattcgtacaagtcaatgtgttattatccggaaactcataaaaatatgtttttgaaaattaaatgtaaagtaaaacaactggttagatctatggaatcatgaactagtgatatatagtttagattgacgggtgacatattgtgttggttagatcggagaataagtggtttattcataacttgaggtaccttgcaggcttccaaatgttttgtctttgtgtggtatgcattatgaaaacttattttgtttccttgttagctcacgagatctctagttacacaaaagtttactgtattagtatgcattatggtcttgaaaatttcttatttgttttacattatggaagcaaatttgtgcattgcattaaaaaaattaaaaatatcgagttgttcaattgttagtgtctgtttatccggatacatggccacatttaataattaatagggtttataaatagtattttacatttttcacttttcattttcaacacgtctcataattaatataatataaatccaccgattttcatttatacatttaatcttcataatcaaaaaagaagaagaaattctccataatcaccggcgaaaagatgatggtgagacgttgtagatatttttgggtttctctagtattcacactattgcatgagtgcatatatatgagagatctagattatatatctgtaatctaaatttcgatgaaagaagtataacttcattccaaaaaaaaaaagtatgattaaaaaaaaatgacaacaaataattttattttgacacgaattacatataattttatttagacacgaattatacactttctggttcattatgtcaatgataataactataattacacccacacagttatcgaaggtttacgaataataattggacaatatatggctcttactcttgtactatttgtggggcttatgtatactcaaatctacacgtacgtataaatcggtgtaaagtcaaagttggacccgcttgagactctctctcacaaactattttttttatattttttttcgacactcacaaactaaattttatgaaattgtattttcctattttttgcatcctttacctaccaagcgtccaagcctacttttatgagttttttttttctcatccttttaattctttcgtaataatgaatctatactgaaaaagtgtatttattagctggcaattgacacaaaatattaacccataatttaccagcaaattacttatgagcttataccagcaaatcttttaatatttttgtattttttataagactgatagtttttgggtaaaaacgatgatttattattgataacacgaaattaaccaataaacattgttggtttttcaaagtcttggtttcagcttatttgaaccaagctaactaaaaacagtgttgcaaatttcaacattttcttactgttgagataatttaaagaaacgaaaagaactactaatttactacagtaaaaaattctaaaacaagagaagtaaaatattggaaggtacctagtaccaaattaactaatataaatcgaataaagacatataaaggatcttgtttcttgtttcccccttcccatgtgatgtgaacaatctcactctctttctctatctctctttcgagtttctttggagtattatataacaaatcagtccaagacacctcttttctcacaccaatctcgctctcaccacaaaacagagaatctcagatcgaagaagcaaagaaagagagaatg

SEQ ID NO: 13808 - DNA, 3000 bp, Unknown
  misc_feature (1)..( 3000): cDNA_ID_2704179_gDNA_ID_2214653_Annot_ID_136464 3000 nt of promoter + ATG
aattcgtgtagtattttgactaaggaattgtcttaatagaattaagcagttacaaagttttatttacacaaatattttttcctctcggcacaccttgaatcaaatcaagcatcgtttaaattaaattactgtaatggattagataagtactagtaataagtaaagtatgtttgccgacgggtgaaattgtaaaaaagattggatactttcttttgtttgatatgaaactcgaatctcgtgattaaaaagatggcccgacagtgatttaatgagagtcaacaaaaaagatgtaaaacacattattagcaactaattgtactttatttttataattttcacacgtttcctcttttgtctattttgattggggtcattcatgctcaaacattacagcctgcgcattgtattatgttttgtatgtctccggcggaacaaacaatgtgacatgcgtttgaataatcagtctaattgtatgattggtgtgttcattcgctattaatgcaaatggtgtccaaattattaaattttgagttaaatccgtggagaaataatattcctttcattttaaagcaagtgtcgttttagactgattttttttatttatgtcgtttatgaattaagataataaagaagtattaataaaaatgtgagacataaatatataattctgaaagccaatcttatcttcaaatgcacatttcacttatacgtattcagtattctgccattcaacaaacccataatttattttgtctatggtaaaaaaaacgcatatagtcagtcatattagaattattttacgaatgtaatttttattgctacttatcatgtatgcttaagtgaaaatagtgagtcactatcgtcattcgtcacccatctcatgcttggcgttggcgggctcgaggtcagttttcgaataatccgtcggtgttaacagaataatccgttattgaaaaactaaacgccgttaacggaaactgtgtgcttagctggcagacacagcagagaagtcaataaccagctggcatgatcaccgttttgcaattatccccataattaccgcaacacccttctatttttttatccttttttttctttaattagtatttactatttattatcgttatgttcttaattatcctattattgttttaaatatttttatatagcgaaataatttatttaagaaaaagtcaagagaaaattaattgactatatatggaaaataatttgagggtgcgaggcatgacctagctagagaaaaataaaataaaatgaaggcatgcatggtgcttggttcaatgtaattagtggttccgtaggtctgaacggtacggactggccatgatctactagaaacagtaaatagttaatacaaagtaattaattatgagtttcagcaaattaactactctatatcgaatgaattaaacagtaatccccagaaaagaaaaaaagagaactatgacagccttttcaaaggacacccgaaaaccaaaatgaagattttaaaaatgccagctctgcaatagatattgaactttcatttgtaattttctttatttttgttgcattacacacatttgttatttacatttaaattggctattgcaataaaagattactttatatgcttataatagtacaatatatatggtggcttaaacaaaagtttggctggcttgataaatacatcttacatcgaatgacgattttaccctctatcttgctgtctctgagtacgagggttgaaatccttacgtggcattttttctcatttttcttggtcaaatagtttaaccaaactccaaaagtctgtgatttgttgacatacttctaactaatttttttttataataaaaatctattgtatctgtagaaataatcattagatttactttctagaatataacttcttatttcttagtaatttgtccagatttttttttacaactaactaaacactagttaaaatgttaatgtctaaaaaataccattacaattattcaatttaataaaaattgagtcggccaatttaatgcgagacttctgtacaacgaccctaaaagtgggtttgataaatgaaacatattgcaacaaaaaaatactagtaataatgataaaatagtaacatgtcgtggcgcattgaatatcctacgaaggtttagtgtttacttttaaaaaatcctaatatgatactagtacatatagctagcttgccttgcttatgctattgcatagtctgtattaataaatgatgttatacatttcgatagagtaacattttgggaacatgagtgaacgtgcttgaatcttcgtgcccttgacgtcagaagctagtaattttaaatactaattaacattcatacaaattaacagatacaatgtactatatcataattcgtttccgtaacacaacgcaacaatttgaaagtagatgtactttagtacttagttagtgtgcaccaaaaaaaaaagatgtagttagttagtaaggggttaaatgttttaatttattaagaaaacttaaattcattaaatgttagaaaaagtctaattagtttatattcgaacactgtgctcaaaattaaaaagtcaactattttagactatagagtttattaattaataataaattcgataaatcaccgtattattttcttcaacgacaagtagccgtgaagacacgggagcgaagagagataaacagaagatgaagaagaagatcaatgtcataatcttcagggagataaatccgtaatctttattaatcaaggttaatccttttttttttcttcatcttaattctttgcgtcttccttttctatttatcacgagatctgtctttctttttcctcttctttctctctcttctctctgaagacagtacttgtttctgtccggcgttaaaagcttcggtggtggtctcttgacttctctgagaagaagaaaaggaagctgagtctcattttagattcagctcacgaggaagtgacgacg

SEQ ID NO: 13809 - DNA, 3000 bp, Unknown
  misc_feature (1)..( 3000): cDNA_ID_2704183_gDNA_ID_2214653_Annot_ID_136466 3000 nt of promoter + ATG
gcacggataacgtttggtttgaccttttgggtttgtcataggtcgttttatttggtcggtacactcgtaatctctaaacaaaaatatatcactttagtcacacctttttatttggggtcattgtgcatgtgtgtaataataagtgaatactgaatcatcattctagtctctaatacatcatatacaactacataatagttaactaaatgctaactcgtgtgcgtaaattactgtattactatagtgttactgttatgcatttttgtctgagacgatgcaaatcttgatcatatactatatacagggtaattttagcatgcacaagtttatatttgcatataaatatccgaagaatatccgtagaacagttagaatatattcccactagccaccactatctcaaatttcattttcagatctaaagttatgcttttattgtttcttttctatataactcaatcatataccattaatatcaaacatcacccatcacataagttacgaatgtccatttccgcaccggacttaacttgtttggagaaaatgtaatatcactcatggcaataatcaaccatgtatgcacattgattaaaatgtgttttcccgatggagagcaaatatatcttattcgagtgatcaagttcataaagagctcgaattagttatgcttttattcaaagtagagcaatttcataaaactataatatatcttaactgtaataacagatcagctggctaaatactatgatgctactactgaagatgagattgcaaaacataaaacttgtggcttgatgagttcatatagaagatataataattatgcaaaccaaaatatgtatacgtacgaatcttcttttaccatacggatcgtcgtcggatactgcttgtctttttctctgtttttttctcctaaatatcacatatatattcaatgtgagaaagtatgagaaacaggacaaaatatagatattggttcgtaaagtttttagtggctagagttaaataaggaattaaatgagagcaaatctctttgatatacacctcatatcaatgaaaaaacttaatattggtgtatttgtttctttcgtccgactcttgaagaattaaaaggttatatacaaaaaaaaatttgccctttcacattttctaaagatcatatcatctttgatataatcgtttgatgcatgtttactcattcataaacattttataaaatcttctatattattttgattcgaaatttcacactcaaaacataaaatttccaaggataaccaatgaaatgaatacacaagatataatataagttatcaccataaattacataatcagtatagataaagaaaatgttctgaataccaatttagtttataaatttatttttttcgtttatgatttatcaatggttcagttgagtggtttttaattaaaaaaataatattttgttcaacaaaaattcagaacgatggttggaaaaaataaattaaaacaatgcgtatattggattaaaaataaatcatattatatgattctatttgtccgggatttataaattgatatgatacgataaggtcagtgataaaataaattgataagataaggactttatatgattctatttccacccgttggaatctttggttggctatttattcttagattcgagaatcaattagcgaaaacaaatactagtttaaaaaagaaaaaaactatatgataagagaccgtaatagacgtggtacgttttaagtcaaaggtcaaaaagccgaattatatatttctggctccttccacaacttttggaaaatttccttcgtagttttcacttgaacccattttttaacaacaattcttctacttggattgataattcaaaaggaaactaactctcccatagttaaaactgaatcactgttaaaaaaaaaaaaaagtaaagtaaatatactaaatcaatgtttttttctctggaagtaaatatacaagtttaaaattaaaggagaagagaagctatatattgctttgcctcaccatttaggagataattcatatgaagcaaagaaagcatatcctttggcatattcgataatatatggcatctaatcatctgtataagcttttcatatttttgttagatgctttttcgtacaaatgcattaagataaaattaaacaaaaaaacaagatatgatattcagtttcgtgaaatattaaaagaagtcaaaaaaagggaaaaatgaaaagtcgaattggtggacagtggactcattggtccacttaaaagtcatcagaaccgtacacatgcaagcttggtccattttcgtatgacgacgtacaagttacaacattcaaaaaacttcctaatttacaagtttttgcttatgtttatgggaaatatttttctgcaacgaaaaatcattaagactatatttttctgttggcaaagacttgactcagtccctttttactgcccattagtaatctttggagtgaaaatacgaatttaactaattttctaaaatttgattaaagtctaagagagaaaaaaagatttcggctataaataagttacaactacacatcgaatggactagaaaattttcgcttcttatatttttttaaaaagaaaaaccaaaaaatcctttgaaacttttttagcctgtcgcttctctttccatcgtcttcctcgtgaacgaaacttctcgatcttcttttcttttttttcacctgtttttcggtatcacgagaatactacacttcccactccagtaatacgccactccttctttttttttttgtctcgtttaaatttttataaactccataattttatcttaaagtgaatcttttttgttttttttgttccagctttatcggatatatttccttgattttctccgattgtggtcaatctggaaaattattgagaatctctccctcacttaaccaaaagcgtttttaatcagatagagagagaggaaaaagcatcaaccaaaccatg

SEQ ID NO: 13810 - DNA, 3000 bp, Unknown
  misc_feature (1)..( 3000): cDNA_ID_2704191_gDNA_ID_2214653_Annot_ID_188709 3000 nt of promoter + ATG
ccaattttagtttcattgttttggttgtaatttcttcataaaaccattcaagttctaattgttgttgtccaacaaaaaaaataaaaaaatcaagttctaacgaaatagtaatattatgattcttgagtagcaagaacgatcaaaaactcaattttaaaatgtttttgtacgtgagatgaaagaatatttgaacttttggagatctaagttgattcgttatgtgttttgatgtccgtcagttatataatatgtgggtattatgagctatgaagtgcgtttgatgtccaaagtctaaaagaaaaggtgagcaaaaataagacattcttactttataatctgataatatatatataatgtagtcacttatccatacattatatataggattagtaccccctcatcatgcttcaacgtgtgatctctttctccacaaactattttttaagggaccgtgtcttcgtatgtggtttttctgctcgtctaaaaagtcaaaatttctgatggatttattttaccatccattgtttcacgttttccatttcatgatttcatgcgtgctaagtaaaaggtaacttaaagtatgctatataaataattacatattattataatgatcattctagggatttatctaaccaagcatgaattctgataaagtcaattaccttttctgtgaagaaaaaaattactcaactacaagtgcttatagttcatggtttctcgatggtgcaagtgtcactcaagacatcttccttcacaattccctactcacaactaagtgcctttgatccaggaccatgagacgtcttttagtttagcaagtacaaattgtacaacttattccttttttctaataatttaaaatcattctttatggatgtttttgaatatttatatcaactagaaattaatctgtaaaatttttagaaaatattttaatgcatttgacatgacctctaaatagtttgaaacggttgaattgtatacatggttcattgaattatattcactttgataagataatattgtattacattaaccaaatatatgcccaagttaattcagccagtctataagcatgggcacaaaaacatggtataggtcagtggatttgaatatatttagtacatagtcgcgtttatatgttgacgcatgtgtaatcacatgtatatgtatgcgtgtatgtgtttttgtgaccggcaagatgagtaggcaagagataatgcatgccctacaaatcttaaatttctcactttgtaaggaaaaagagaaaaacgaaaaataaaatttagttgcaaatttctcactattgctttcgtgattatgctcactgagttatccattaagctttttaaaagttaaacactattttgaaaatataaattgtatttacgttggagaaataatcaaaacctatattttatttaatttgtaacatgactgagcgccgcttattaagcgggaaacgtatctaattaaatactctttgaactgaatcgattcactgtattggatctatatttctcttaaaatggaaatgaagttcagcttatcttttagttgttgcatgcattcttacgtgattccaattatgaatttggaaaagactcgatattcttacatatatgttatgggtttgggatttatctagatcctgatcttatagtaaaattatctgcagtttaaatacatttctgtacatgacacaaatcagtgtttttgatgctgttttattccgacttcatctcttgttgcagtcagtaacttaatattgggggttttcttaatattttaaggttattgaattctaaatcttgcaaaatagttgtgtttagttttagttattttcctattaaagctcatgtctatcaacaaagaaggttggtattattcttgagggacataaacaaatgttagatgcatgcacgggaaaaaggtggattgttctttacaggaaaaatatgcaattcaagtgggaacataagggagagagagggataggttgattttgactcttgcaatttgattatataatatcaaatatgtatatttgtttaatgattaagaacaattgtcaagttacggcgattccataataatacgaatgatctcacaaacaaaatttgctgtgcctctaccaaatgaagtattggtcaacttgtgacaatggcgatgattcaaatctattatctcatacaatttttttaaagataaggtattttttgtaaaacatttgaaaggagcttaagtaactatgacacatactgcatgtacagtaaagcatacatgtacccgtaattaccaaattcgaagatcaaagtttcgaaatcttttgagtcggttaatgtgtaaatctctctttatcataccaaagtacatgcatagattacaactaaaagctgatgagaacacacgaacgaaatgaaatagtcaggacattacatgcaagcatgcaacttcgtatatcctaaacctttcattttgattagtgatataatgatatttacattcatagagaaaaaagggtatgcaactatgattttggtttctccaaaatagtatatcatcgtataagtacgcataacaatctttttgaccaatgacaacacaatcccattatctattggttatgagtattttgataaagtaaggatttataaagtacaatttgaggatgaatattttgtaggcttaattaaagaatgtatgttctattttttttttttttttttttgacatcgtatgttcttatataattaacctcaaagataatttagatttaatcatttaaatacatatgatttttcaatcaaattacctcaaaaaaggaaagaattatagtactatctatattaaaaagaaaaaaaacataaaagaagagagaagaagaatgtcagtatcatcacgtggctctctctctgcccaacacaaatctcttcttcttccttcttccctctttcttcttctaaaatctcctctcttgtagatttgccgcttctc

SEQ ID NO: 13811 - DNA, 3000 bp, Unknown; identical to SEQ ID NO: 13809
  misc_feature (1)..( 3000): cDNA_ID_3031995_gDNA_ID_2214653_Annot_ID_188706 3000 nt of promoter + ATG

SEQ ID NO: 13812 - DNA, 3000 bp, Unknown
  misc_feature (1)..( 3000): cDNA_ID_3031999_gDNA_ID_2214653_Annot_ID_188705 3000 nt of promoter + ATG
aaatcctttgaaacttttttagcctgtcgcttctctttccatcgtcttcctcgtgaacgaaacttctcgatcttcttttcttttttttcacctgtttttcggtatcacgagaatactacacttcccactccagtaatacgccactccttctttttttttttgtctcgtttaaatttttataaactccataattttatcttaaagtgaatcttttttgttttttttgttccagctttatcggatatatttccttgattttctccgattgtggtcaatctggaaaattattgagaatctctccctcacttaaccaaaagcgtttttaatcagatagagagagaggaaaaagcatcaaccaaaccatggctgcgagaaatttggagaagatggcttctattgatgctcagctcaggcttcttgctcctggcaaggtttctgaagacgacaagcttatcgagtacgatgctctgttactggatcgatttctcgatattcttcaggatttgcatggcgaggatgtcagagaattcgtatgttttcctccttttctcactctttcttctttcttaaatactggatttttgctaaaattttgaacttttagttacatagtgggttacccatcagtgaatcatcatgtgggtttgttgtttctgcttagattatccataaagttgaatccttttcagtgatatcgagcagatcagatcacactgtgttaagattgttcatgttattctctgtttttgttgggtttgtgagtatatttgtttgcttcagtggctcattgagtttgcatctgtgattgtttctgatgattttcagtttactgaatcatataatgtcttttgttttgtctaaaaggttcaagaatgctacgaagttgcagctgattacgatggaaaccgcaacactgagaagcttgaggagcttggaaatatgctgacgagtttggatccaggggattcaattgttgtcactaaatcattctccaacatgcttagcttggctaatctggctgaggaagtccagattgcttaccggcgtaggattaagaaactcaagaaaggtgatttcgctgatgaggcctctgcaacaacggaatctgacattgaagagactctcaagaggcttttgcagcttaacaagactcctgaagaggtctttgatgctcttaagaatcagactgttgacttggttttaactgctcatcccactcaatctgttcgtcggtctttgctccaaaagtttggaaggtttgtttaacttttttagtgtcttgacattttggattccttgtgtgtgtgacttgactgatgtatttttttgtctcaaatgttttcaggattcgtgattgtttgacgcagttatatgcaaaggacattactcctgatgacaaacaagaactcgatgaagctctgcaacgagaggtaagcgaaactaaagaactcaataaagcttcttttgcatgaattctactaaaactctgtttttgttgcaccagattcaagctgcttttcgcacagatgaaatccgaagaactcctcctacaccgcaagatgaaatgagagcagggatgagctacttccatgagacaatctggaaaggagttccaaagttcttaagacgtgttgacacagctttaaagaacattggaatcaacgagcgtgttccttacaatgcgcctctcattcagttctcttcttggatgggcggagaccgtgatggtacactcttgcttctttcttatctcaaaccattaaaacatgaattggttcttatgagtgaaaacattttctgaatctaggaaacccgcgagtaactcctgaagttacaagagatgtatgcttattagctagaatgatggctgctaatctctacttctcccagatagaagatcttatgtttgaggtagcaaaaattttattcacatcacagcaatttagtttattggttaatgttaaggacagagatcttattttttttggtttgatgtgtttgtttgcagatgtctatgtggcgttgcaatgaggaacttcgggttcgtgcagaacgtcaaagatgtgcgaagagggatgcaaaacactatataggtgtgtgttacattcttgacatttttttatgtgtccgacatgttaacagtttgttatattatgtttgatgtatgatcgatttttggatggatgtagaattctggaaacaaatccctgcgaatgagccataccgagctattcttggagatgtgagggacaagctgtacaacacacgtgagcgtgcacgtcagttattgtcaagcggagtttcggacgttcccgaagacgcggttttcacaagtgtggatcaggtgtgttttcgtgctgtttgcagatcaactagagatgtttaagccatataactgcaacttcaattcctttgaaaattagaatcgtatttgattaaacatggaagctataccatactgatgcatagtttatttggtaactatttttctaaatttgaaaatcccaaaccaaaagagaaccaaaatatggattgaaccactctaagatcaaagctgttgtttgtttcttgtttgattgattttataattttctaacctttgattgtttctgtttctatccaaagtttttggagccacttgagctttgttacaggtcgctctgtgattgcggtgacagacctattgctgatggaagcctgcttgatttcttacgccaagtgtcaacatttggccttgctcttgtgaaacttgatatccgtcaagaatctgaaagacactctgatgtcttggatgccatcacgacgcacttaggtattggttcttacaaagaatggtcggaggataaaagacaggaatggctgttatctgagctaagcgggaaacgccctctctttggaccggatcttcccaaaaccgaagaggttgcagatgtgttggacactttcaaagtcatttctgagcttccttcggatagttttggtgcttatattatctcaatg

SEQ ID NO: 13813 - DNA, 3000 bp, Unknown; identical to SEQ ID NO: 13808
  misc_feature (1)..( 3000): cDNA_ID_3032003_gDNA_ID_2214653_Annot_ID_188703 3000 nt of promoter + ATG

SEQ ID NO: 13814 - DNA, 3000 bp, Unknown; identical to SEQ ID NO: 13807
  misc_feature (1)..( 3000): cDNA_ID_3032007_gDNA_ID_2214653_Annot_ID_188702 3000 nt of promoter + ATG

SEQ ID NO: 13815 - DNA, 3000 bp, Unknown; identical to SEQ ID NO: 13806
  misc_feature (1)..( 3000): cDNA_ID_1808014_gDNA_ID_2214653_Annot_ID_188699 3000 nt of promoter + ATG

SEQ ID NO: 13816 - DNA, 497 bp, Unknown; identical to SEQ ID NO: 13805
  misc_feature (1)..( 497): cDNA_ID_2994569_gDNA_ID_2214653_Annot_ID_188697 3000 nt of promoter + ATG

SEQ ID NO: 13817 - DNA, 3000 bp, Unknown; identical to SEQ ID NO: 13810
  misc_feature (1)..( 3000): cDNA_ID_2704191_gDNA_ID_2214653_Annot_ID_136468 3000 nt of promoter + ATG

SEQ ID NO: 13818 - DNA, 1224 bp, Unknown
  misc_feature (1)..( 1224): cDNA_ID_2704198_gDNA_ID_2214653_Annot_ID_136470 3000 nt of promoter + ATG
tttttcgaagattgaatacattcgttgattttctattatactcttttcaaaaaaagttcatcctcatttttcatcaaactcttgttagattcttgttcatttacatcatcctcttttaagaaatctatctcatatgcatgaacaatctgataatatattgtcattcatagtgtaatgactatcaaatatgtatcttgtttcgaagatctttgagatagaaatggatgacaaaaacaatccatgtaggtagaggacaaaattgtacttatgaaatatatcctgtgaataagtgcttctcggcacgtgactcataatccctcgcacgtgacttgcttcgtcactttcgtaaaaccccttgactgtgtttttgcttcttccgccatcaaaatcaaaactttcaaaacctccaaaatccaatttttatctcatgaatctctgttgcaaatctctatgcatatacgtacacatactctatatgtgtgtacgtttagctctttgttgcttgatcatggcaatcttcagatctctcttctgtctttctcttgtttcgcagtgcgatttaagcagattgattgctggattttggaattggaaggacgtttatctgctttctgtgagttttttcataaacccttattcttcttttgctctttagccttttcttatatgattttagaccgtttggtttatgggttcttgtgtgtttgaatccatcgaagttggtgggattttattttgaaatgggttttgaaatctatgcaggaatttgaaattttgcaaccgaggacttgaaaatgggagctaagtgttgcagaggtcaccgaggatcagtggtggaatcaaatggttccgtgatcttgtcgtaagttctgaggctgaattattgaagtgaatctcttctataagtatcgaaaagtccaacactttgaataagttttgtagccagtctttgagaattgtctactagttaaatgctttgataaggaatatatggaatgcaacttagtatgtcactgaaacatttatttctgcaacagtatatccgagtctatatttacttaaccattctgcttttgcctatgtaggttagctgacctagaggtccaagctactggtaagcgaagtttgattcttaatattttggtacctacgttattcgtcttttcttgagtgaaacctatgggctaaggagacactcttgtgattttagaccttagggagatg

SEQ ID NO: 13819 - DNA, 3000 bp, Unknown
  misc_feature (1)..( 3000): cDNA_ID_1029952_gDNA_ID_2214654_Annot_ID_136474 3000 nt of promoter + ATG
cagaacctttcaagaaaatttctggccggcaatgaacaatcttctgatcaaaaactgtattagtatatgtttgatatataaagtcgtcgagtagaagttttgagcaaatctttattgcttattactattagcctgcaagaaacacacaacaacaccatctgcattagtataactgtatatcatattatatcttccccaagttatagtgatagtgaaagaaacctttttcaggaatttttcatggatcttcaacgcttctttacatgcttttttggcgtcaagattacccgcaatgtctcctagtatctgcataccaactttaactttgaagttccagagtttgatttttccttgtttggctttgagagaaacgagtgaaaagatacagagacagacctgaacaacatcgtctaagcctttggcctccttcaagagacgtttgttctttgtctgtagaacgcttgcgaccacaaaaacagcaagcgtgttgcgatgttgctcgttctgcccactgtttatgtatttcctttcaaacttgccataccgttttagtaacttgggatcggatgctgcgttgtttcggttttctagttcctcgtacgttgcaaacatggttggattgtactccatcgcccacatcagctgcaaccataatccatctcacattattctcattacccaaacagcagataacgcaaaaaagaagaagataataaacacacagcaagatcttacggcttcataaacaatcacggcaagtaaaaccaggaaccaagaaaagaaatgcagaaagtttgtcattacctcccaaaggtacaaagcgtcaaggaaagagaattctctcctgaaaagtaccatcagcatccgaatagcaaatagatactccccaccatcgagatcctctgtcacattaacacgttttagcccaccacaagaagagtttttatgataggaaaacactcttacctagatgttgatggagacgaggatccactgtcttaatgacctgtgagagcacacccagttgagtctggacacccattgatgttgctgttgccctgaaattttctctctgaaattcaaagaaaacaataaaccgtgaatacaatggtctggtaatgacatgaaacatgagaagttatgtcataggctattagttattactagtctccgcattgcccgctcaaagcaccagaaagcgtcgccttcatcatcaaagaggattatcattggggaacatatatcattcattcctacatgaatagacaaagtggatcagttctgtttcttatatagtttcaaaagattaatcgttaacagcaagtacacttaccctgaacataaccaatatcaagattcaaccacgtatatatggcaagaacgtcccatagttttgattgattacgatcattctcataaaaacagagataccgatctgttctagcaacatcaaggcctgaaacaaaatatacaagaatatgtaaaaagaggttataagaagataatcagatagaactaaacttatttatatgtaaaggcataccgatctggtgtagtgagagcatccattgtagcactctctcatctgtaacagtgtttttcacgatccatccttggttttctacagaagattcgtctattgggttcccattttcttgaacgactgccattgtgacgtacttgccactaccaatgacaggaaccattttcttacattcttctttccatgcaccgtactgctcccttagatgatcaataacatttaaagttagccatgacgtgcatctacaaaactagtaaatgatcaaccaattctatagtaccttctgcgattcctcagtatgttcctttcctcaaaagtgctgtctggatcgtagcatcctaacaaaaactcccaaacagcgcctttgatggaaggatgaattccctagcaaagaaaccaagtgaacaacaacaaaaagagcatatagatagaaacaagatcaggaaaagaaagtagactcactccgcgctgtatacgtctaagcactttttccatatccaaatggccatcttcagtaaaggcagcgtgccatcttctagcacttagagtctttccagcctgacaaattacatatcaagatgaatcatttcatcagctacaaacaaacaaacaagaacctaatgtatcatcaattcatcaagacatgaaacaggtgattgagaagaagaatggtacccttgatttaaaacgggtcctgggaacatctggttgacattcaggtctaactggatagaaaccttgcaaatcttctcctccggatttccacataaatccgcagcaaaacattcaaccttccttcttcttgttcaaaccaaacttatagtttcatccatctcccacataaatcattcatggattcatcagaccactgttcaagaaataaaacccaggatcagaatggagaaaaaatgaaaactttacaaatatgtaaacgaaaacacaaggaagatatattctttttgcaacgacgaagctcccattgctcaataatatatataaccttaaaatcagtatcagaacaccatcatcattatcatttggataatccagaaaccgattagacccaacaatttgaaattgtctacagagagaatacgaacaaaagaaaaatacatacagattgagatcctaaacagccggaatcttcagagacatgcccgtcttcttcttccatctttcatctttcatctttctatttctagcagagtactttcctttttaaccgaaccaagccgattttattagctccgatttcaaacattaaaccgatcggtttcggtattcttaaacgacgtcatgtaatctctccacatttaatgggcctttaaaattgttagtgggcttctatatgcttatgtgcctaattcttttatatcaaaaaccctaataatctcttgggcacataaaaatctcttcgccgcacaattgctccaatctgtttcttctagccggccaaa

SEQ ID NO: 13820 - DNA, 3000 bp, Unknown
  misc_feature (1)..( 3000): cDNA_ID_2704240_gDNA_ID_2214654_Annot_ID_136476 3000 nt of promoter + ATG
acaatagagtttaattcatgagtaagaatataaaataacaacacagtttttttaacggaaacagtgacttttgagagtccacaagcaaaaccaaattcacagaaaaagtatcaacaagcaagcatatagtcttattctttttaacttctacaagagatgaaacatggaaatttaatagtaaggtgtcaaaaccaagcgcaatgtatatgaaacggaacttatatctgctaaaatgaagattaaacaagcaaaaccaaactcaatgtgtccgaaagaacttctatcttccttagcttaagatatatcaaacagcaaattttaagattaagcaaacataacaaagcttcagtgtatctacgaaatttaaccttcaagaactattgaattgaatgtatatgaaactacctataacaaagtcggtaactctcctcaagaacaaaaacagagatttatttccgaatcacagaaacacatgaacgaagttataaaatacgaattaagaatactgaagaagaagaagaagatatgaacagtgtgaaggtaccttagttgtgtaaaccttctcacccttctcgttgatatagcactgaagatacatcttcgtttagtctctgtggagataattcaagttagagctgacgacaagagaaaaaaaaagtaacaaagctgattaagaaattggcaaaccaagatggtacctcagagatgtttcttggttctgaatttatggagacgagaagctgattagggtttttctggagcagaagtagcagaggttttacggcgaccctcgtcaatgtgtatataaagttctagaagagaaaacaaaatgggcttttttgatataaaaaattgtaaccccaatcaatgggcctactatattcagagcccaactaatgcacgtgagtggttccgtcacgtgtgaaaatcgccactaaatcccctaaaagtgaaatttccgatatttcgattcgccggcgaaaaagaaagagaaaacgatgaagaaatctacagagactccggcgagaccgaacgcaactgttaaaactcagaaacctcctttcagacctgccgttgatgacaccaaacctgttcttcaggaccctgtaaggatctctctctctctctctctctattttccgtacattgtgtgtgtttcgatgtccttaacgatgtcatttgagctaaagatcactaatttcgttttccatgtcatatgaatcgatgtatctccattttgtcaattttcttatgtttaggtctgaaatgtgaaagttaattgagagatcatgaagaatcatttgttcttctagaaagccatagaactagagcttcagatcaaacaaaaactttttttaagtatagataagaattttaaagccaaatggtgaaagttcacttcatttagtagccattagcaatttccatttgaatacattctagttacaaagaggaactatttcaccggtggatcaatgtttttccataatgaaattctgacttctttcgtgtgcgggtcaaaactgttttgtgccaattgtttgacgtgttgatgtaatatctagttgtaccattcttccaagaatatactgactctggattccaatggttctggttagggtttatcttctcaatacatgttatcttgaatgatttagtggatcttaatgcagtttgtaacatttatttttattagattctgagatcggatccaatggagacagaagaagctgtgctgagattgccttctttcccaatgatcagaccatctgaatcgtagctacctggattaacaaggttttttatctgatttgttttacattttgagcttgttgttgcttgtaaaaaccaatggggatttttttgtatgcttgataagcttaaattacaatcccatgttgattaataaagacacagctttaagagcagacgagtgatttagtagtagagcatctttgtgcctggctgcaacagagtgaatttcaataggagtctaatgcattactcatcacatgtatatgcacgcaacatttagtgacgtaaatggctttgaagggtaaagtttctttagctttgtcgtctatgttttcatatgtttgtttgttttatagttttgaggacttttgaatcttttgatgctgttgttgttggcccattgattcttcagcttgatgaacagagaagtgttgcaaccttttgatttaattgagagttttgtattcatcacgtgagaatcacgtggggtcggttaaatggttgttgcaacgactcagggttatagtggtcttactaattggaaatggggaatatttcgtttcttaaacaaaatattattgattttgtagacttttgaatcatttgtataaataaattcttgcgatatagtaacaaatattgtaaatttgatttgtttattgttgaacaaaactagttattaaggttttttttttcatagataaaaaatcaacacatattaaacttgatttttctataaaatatataaccaacaaaaagagagagagaaaaagtctgcatgtaagcatcagagaaaattacgctgagaacgaaggcagatattgatcctttcttcatcaacatgtaaatgcaccaatcttcatatatacacacatgcttatctgattaatggtaataccatacaattcatgcgaaataggtgctatgctctagagagtttcacgctcattcaattcctcttttcttctctttctcctttcctgatttttgttttttttttccctgctttgctttgaatctgtcacgttaaggttgttacaatcgcagattaatctagctttgttattttgactgagattttcaaagatcgtaatgtattttttgattccaattcgtaaggttatgttttgattgtagtgatgatgtgtgttgatttcgaaattattgtttgctatgcagaacgattcggtgatgagaagatgatcaatcatcagtgaaatttgtgtgtattgttaaagagttatg

SEQ ID NO: 13821 - DNA, 3000 bp, Unknown
  misc_feature (1)..( 3000): cDNA_ID_2704230_gDNA_ID_2214654_Annot_ID_136481 3000 nt of promoter + ATG
cggtgaatggcgggggaggtgtatgttccaggaacttttttctagatgggttcccacgtaactcatccttcacaatgtcaagtgcttgctttactatatcaaagggtttggcttccttcagcctgtaaaacacctcggatacctttggtgaagaaagacttgacttgaattttgcaaaaaatgtatgtagttcctccgtagaacctgattgctgtttttctccttgagaggctcttgtgcctgatgaactcgctgactctgcattctcctccttcccgagcttgaatgactccttgacctcttcactggctgctgagagcttgtctttcacacttgaagagacctgcaccgtcaaagctgttttgtaagggacgattgttagccttttacaatgtacaattttggctactcatacacataaacactgacttctaattcactaaagcaatttcatcagtaaactattttgttaccaaaactaaaagagaagaaagcatattcttaacataggaagcatcaaatctacgaaacaagcgaagacagatagcgtgccaattcgaggctcgtgaacaagaaccatacctttttggccgcagattcagcctcagtccacacaccatcagcttgcttgtaaagcttttcagtcgtttgtttcgttctgcaatagccaattcattcataagcttccattgacatacaagtgtataactcttaagtaaattcaaattacaaatgtttaacttacctcactttcaggtcctctgttacacctttaaactcttctgttctttccttgagctcctttactgttctttcaaattcaggattgctgcaacatcaaccatgttaacaaaaattgaactaagaacatcaaccactgattacaaatttcatatgcctcacatacataacaaatacacattacctatgagcttctcctctaatattcttcgagaactcggtgaaaacgctgaaccggcgatgactcgtatacccaatagcaggaagaaactctgatcttgcgtttgctctctaaatcaaacacagagttactaaatcaatcatcctaatcacaaaaactagttagaagaaaaagaacaaaatattcaccagaactcgttggtggaatagttgacgtaaaagaggctgctttgtgatcagtaaatctcgaattatctttctaatcgccattagaacaaccttcttcgtagtgaattgtacaaacaagatttgaagaaacagagcagcaaaagccctaagaatcggtcctcgagaatgattaagatacaaaaacatatttctggttatattgtttggaagaaaatggaaagttcaaaaaaattacttgacaaacaaacaaaagaagaggggattagattcgaatctgtaccatattttaaagatttgtttggaaagtcggatatacatatcctgagtcgggttaataagtaaatagagagtatataagaagagtcgttcccaaacactacaaagcgctcaaggtctgtgtttaatttgggcctttcggaggcccataatctagtagcaaactgatcggaatcaaactttggttacacgacaaaaagcttaaattcaaaacctaaagacgacaaaagtaactgtctcagtgtttttagtcacaagcaacgttagcgacggcgaaatgttcggcttgccggcgagccgccgactccgaaaccatggcttggatcagcatcgtcttcacttcccatggtgcataagagaaactttttctcgcgtaagagttgatcagagctgcgatcccctgtttcagcaatgcaccgtacgcgttcccttcttcgtcattcctagccgttgattccactagcgttagatcagatctccaccgttcttttgctaccatcactccgaatattttctccacggttgatctctcaggtaccatcctcggccatgcttccctctggctgctccaatacctgctcaaaaacaccaccaacgagttgagatatgactcagctaaagatttttgtaaagaaaatgaaattcaagattgattgatttactgcggcgtgcatcgtcctctgtgtctggtgtagatgaaaccaggcctcgtcgccgatgaatctccggcaaagaagcagaggaggaagaaggtgaccagaacgagtcgactcggagaacaaagtgtgtccatgatatgcatatggttaaaacagcattaattaatcagcccttggtcttgggactcttgggtcttcattaaatcgctatcaagaatctgagtttgcttgagttatcggtctcctctagttgcctattgctattacctcggaaaaagagacatactttgacgcttttacccttagaattcaaattaacgtgatctttttgtcaaagtggatagagtgaatataattattagggggatataaacgtcatttttgaaacgcacatgagtttgtctgaatctgctgctaaatacgtattctttttattatttttgctgcatgtcatcgtcagtcctcacgtgagctacgcacggcgcaccatgtgcccacaaggccacaagaggtccgaacgattttaatcctaaaccagtacaacgctattttgtattaagaaagtcacataattttaacagattagtttcgtcagtcgattatgattccaactttgttaatttttcatgtttttaatgggccttttcttatagtcatgccctacgaggatttttccagttccagcccaaattttgcccatgccaatgtcatgtagagcagtttcgttgttataatatatatgacccccacgttgcctatcaatgccagactatattcgactatatacacgtatccacatcattttaaatacagaaaaatgtaaagatattcatgaaccatgaccagctaacattttcaagttgtttttgttgttgtgtaatctaactggtgaaccatgagtttgtatactatatacgatatatattgccctacaaatctcttatgatcttatcgg

SEQ ID NO: 13822 - DNA, 3000 bp, Unknown
  misc_feature (1)..( 3000): cDNA_ID_1010115_gDNA_ID_2214654_Annot_ID_136482 3000 nt of promoter + ATG
aatattttctccacggttgatctctcaggtaccatcctcggccatgcttccctctggctgctccaatacctgctcaaaaacaccaccaacgagttgagatatgactcagctaaagatttttgtaaagaaaatgaaattcaagattgattgatttactgcggcgtgcatcgtcctctgtgtctggtgtagatgaaaccaggcctcgtcgccgatgaatctccggcaaagaagcagaggaggaagaaggtgaccagaacgagtcgactcggagaacaaagtgtgtccatgatatgcatatggttaaaacagcattaattaatcagcccttggtcttgggactcttgggtcttcattaaatcgctatcaagaatctgagtttgcttgagttatcggtctcctctagttgcctattgctattacctcggaaaaagagacatactttgacgcttttacccttagaattcaaattaacgtgatctttttgtcaaagtggatagagtgaatataattattagggggatataaacgtcatttttgaaacgcacatgagtttgtctgaatctgctgctaaatacgtattctttttattatttttgctgcatgtcatcgtcagtcctcacgtgagctacgcacggcgcaccatgtgcccacaaggccacaagaggtccgaacgattttaatcctaaaccagtacaacgctattttgtattaagaaagtcacataattttaacagattagtttcgtcagtcgattatgattccaactttgttaatttttcatgtttttaatgggccttttcttatagtcatgccctacgaggatttttccagttccagcccaaattttgcccatgccaatgtcatgtagagcagtttcgttgttataatatatatgacccccacgttgcctatcaatgccagactatattcgactatatacacgtatccacatcattttaaatacagaaaaatgtaaagatattcatgaaccatgaccagctaacattttcaagttgtttttgttgttgtgtaatctaactggtgaaccatgagtttgtatactatatacgatatatattgccctacaaatctcttatgatcttatcggatgtgggatacaattctatatatatatatacattttgtcaaccttcttatagtattgttttgcatttcttaattataaacattatcgtaaaatgtagactaagttgttaaaaacaatggatcaacttcttttgcaagtcacgcatacatgtcgtcttaaatctctccttaaaatctttctatataatacctaaagggttagctctagcacaagcacacacagagagatagagaaaaatataacaaattttaagccatgtcctcgtcactattctcttatgttgtcctcttaatcttccttttcaccatcccatacattcaaagccagcccactgctccagctccaaccactgaaaaaagtcccatcaatctcacagcgattcttgaagctggtcaccaatttaccacattaatacaactcctcaacacaactcaagtcgggtttcaggtaagtgtacaactcaatagctctgaccaagggatgactatatttgccccaacagataacgcattcaacaagcttaaacccggaaccctaaacagtctgacatatcaacaacaaatccagctcatgctctaccatatcattccaaaatactactctctaagcgatcttctcttagcaagtaatcccgttagaactcaggctacgggacaagacggaggtgtttttgggttaaatttcacaggacaagcacaaagcaaccaagtgaatgtttccaccggtgttgttgagactcggatcaataatgcattaaggcaacagtttcctctagcagtttacgtggtggacagtgtgttgttgccggaggagttattcggaacaaagaccactcccaccggagctcctgccccgaaatcctcaacttcatcgtctgatgccgattctccagctgctgatgatgagcacaaatctgccggatcaagcgtgaagaggacaagtctagggattgttgttagctttgcattgttttgttgctcggttatatatattgcttgaacctttaactaaaagcgagggaaacgttcccgaaaaacaaacatttatttgcatgattgatttgattcatctatgccttgatatttcttttttgaaatttcctttataaaaatacatgtattatttttttgaatttaaatacatgtattattaaatgatgaccaattttgaaccaaagtaagttatcaacaaaataaccacatcatctatatctcactttatataagttaagaaatttcatttaggtttagtagtaaatcatcaagaagtttagagcctttgcagtttgcaacaaaatatgggtttgaaagttacatttttgaaaagtgataataattaatctactatctattaatcaaaatgagaattatttcttttgtatagaaagtaaggaaatgtcaaatatggccgtttatatattaagaaaaataaataaaaatcgtttactaaaaaaaaaatatattaagaaaaataaataaattagtgaattcactaatgggcctgaatacaaattttgggcccaaagatctctagtaacagaaaatgcgtgatcgaccaaagcgtcaacaaaatcctgatttctgagctttaaaccctaacccctctcttctctcttctccacgccatttccagaattttcaggtacttcctctcgccattttcattatagatcgaattcttagtttaagcgagtaaagcttcagattcttcggcttcaattttgtgatctaagtttttgtttcgtttcagctaatttgcagattatctttgtctctttttcgttgatccaagttttccttgggtctaatctacaaacgcatttcgtttctctatttatctgtttctgccttggattttgattgggttccaaatttgcaggtgttcgtgaaaag

SEQ ID NO: 13823 - DNA, 3000 bp, Unknown
  misc_feature (1)..( 3000): cDNA_ID_1390897_gDNA_ID_2214654_Annot_ID_136485 3000 nt of promoter + ATG
aaaataggctataaaattcagtatccccaaattaaaaggccaaaacttttatttgttacaaaaataatggtaatagatttcaattacaaagacacgaaaagcaatcgatttccaattagttctaacaaaacattccattacgcagtcattaactttggagctggtgttggagcttcaccataaccgtttttgtgtgtgtgtgtgtgtttacgtttgcatgtttatgttataacataaagttaaagcacaaacacaattacaaaaacgtaaagaaaaaaacgaagaagaccaatgctttgttgcggtggcaactggcaagagaccacaaacgcaaccgcgtgagtaaacttcaataattcttgctttgtaaaatttcatgaaaaaaattgtcactgttatcacaaacaattaaaccaatattttgattcaactggtggagtttattttcgttattattttggttaaaatgaaaaatctattttgttgtggatgagcttgtggtgagcaaacttttgtctttgttttcaactactagttgggaccatgaactgaaagctacagtttgaattcatttgctgttcctttctattactgaaaaacatctcttcatttgattttcttaacggtaataaataatgtccgagtttctcgtgggataattgatgatactccaacaatcaagtgcttgccgttttcatcgactcaatggggcacttgtaaagaaaaaaacttgggtcagaaatagtaagcctcataacttaaaataacccaagaataatgaagcttctaaaattttgggccagaaatagtaaaagaccaaatgtttgatgatgaagagactagagagatagactatgatctgcccaaaataaacattttagatctcgtgaataactatggcctcaaagtgaaacggttccaacgtcgttaaccggttttatgtaaaacgaaaatcttcctctttctgatttggttaaccgttcggttcatccaaatcgaaccccatgaaccgaacgaaaccgaaaaccaaaggagatcagaatttgtttttatttttattttacatcaagggaaatcataactgatttggtaatgtttttggatctgcatctgctgcataaatttttatgattgattctttgattattgattttaaaagtcaaacttatcatgaatttcgtgtggtttgttgtgtagctcctggtattgctatggcttaacgaaagtacctatggctatggctatggctaacaagaagcagtggattacaaagctctcgctaatatcattatacaatgcaaccttttttattactagttggtgaggtgttaattaatcccttctcccagcatgaaataaatgtggaatccaaaacagaacattttgaagacaaagttaattacaatgattttaataattttatcttctactgtattttaaactagctatgttaaatcgtggggtacgtatgtatgttcccatcacattttgattccttttggtgcttgtaaatagtttttcatatttcatatgacaaagagttttattctataatattctctaatgttacacccatgtggttgcacaacttgcagttgcatcttcccttttaaaagttgtattcttctctttgaataaattcggtcttagaactcttccacaagccacaagaggagcattcatttgttgacaactttgaaaaaggaaggttccaagacaactcaaaagtcttgtagtttccccaaaataaccccgttgacttcagttaatagatgctaaacaaatagaaaccggaagggtattctcgtatttcagaaaaacccgccgcgtgggttcgacggttacgactctctcaacttcattcattcatttgaaaaaaactcacttttctccttttaattctctcttcctctttctaagaaaccgaaccaaaaaaaaaaaaacccaactaaaaacttagtcttttgtcttcacaaaatgggagattgtagacctctaggtttcttaataggactaccatttgctcttgttgctctcgttctcgccctcgttggtgctgttatctggatcattgggtacgtgtccgtttcttttttctttaatacgtatatacaaaattcatactatcattgggtattatgtctgttttttagatccagttatcttcattttcaatctccaatttcggttcatgtgttatttaaggaaatttcggttgaatatattgttgcattgcgtaaatatagtttataaattttcttcttacattacaatggagaaggaataataaaacattgataaaaatgaataaaacttttgcaggacggtattgagttgtttgtgcccatgttgcttctgtttcgctgcgctggctaacttcgccgttgatctcatcaaacttcctatcaaagtcctccgttggtttacccactccattccttgttaacaaaaccacttgttgtatttctttcttaatttatcactaattatttgttttattccttctcgttttcatgtaattttcttttgtaatccaatttttttttttctttgaaagaagggcttatatgatataagacaaccgattcgttcacaaatccataattaaattgaatctaaaaagccatatactacggatttgggtagaataataaaaagctcactttgagtccaatgttgtaaaatgggctttagcattttaaactccacagcttaacgggctagagagttacggtaacgaagaaaagcctgtgatgcaaacacgcgtcacccaaacaatcagaggttttcagagatttctcgaacgttccacagaattctccacaactctgagaagaaacatcatgaatccgtcgtttttaagaccaaaactcatctaatcttcaacaaaagactatcaaaagaagaaacagagcaaatttcattctctcagaacaaatatatacatattaatcagaatcaggaaaagtgaagaagcgaaagagagaagaagatcggatg

SEQ ID NO: 13824 - DNA, 3000 bp, Unknown; identical to SEQ ID NO: 13822
  misc_feature (1)..( 3000): cDNA_ID_1010115_gDNA_ID_2214654_Annot_ID_188731 3000 nt of promoter + ATG

SEQ ID NO: 13825 - DNA, 3000 bp, Unknown
  misc_feature (1)..( 3000): cDNA_ID_1389401_gDNA_ID_2214654_Annot_ID_188729 3000 nt of promoter + ATG
gctatatgccgcaaacataagattcactagtaatgctaagcctaacctaacttcagctagatgtcacaaccacaagattcattgtcaatatacagattcagaagaaaccaatttttgcagggactaaccttgtctttgataccaacaagccggttaaagacaatggctcgatgacctccatcgacattgtagagagtgtgcgtagcaccgtaaagactgagccccccaataaccaccgcagctataacaccaccaccaggacctttgggaactttgacattcttaaaattcatcttttcacgaacacctgcaaatttggaacccaatcaaaatccaaggcagaaacagataaatagagaaacgaaatgcgtttgtagattagacccaaggaaaacttggatcaacgaaaaagagacaaagataatctgcaaattagctgaaacgaaacaaaaacttagatcacaaaattgaagccgaagaatctgaagctttactcgcttaaactaagaattcgatctataatgaaaatggcgagaggaagtacctgaaaattctggaaatggcgtggagaagagagaagagaggggttagggtttaaagctcagaaatcaggattttgttgacgctttggtcgatcacgcattttctgttactagagatctttgggcccaaaatttgtattcaggcccattagtgaattcactaatttatttatttttcttaatatattttttttttagtaaacgatttttatttatttttcttaatatataaacggccatatttgacatttccttactttctatacaaaagaaataattctcattttgattaatagatagtagattaattattatcacttttcaaaaatgtaactttcaaacccatattttgttgcaaactgcaaaggctctaaacttcttgatgatttactactaaacctaaatgaaatttcttaacttatataaagtgagatatagatgatgtggttattttgttgataacttactttggttcaaaattggtcatcatttaataatacatgtatttaaattcaaaaaaataatacatgtatttttataaaggaaatttcaaaaaagaaatatcaaggcatagatgaatcaaatcaatcatgcaaataaatgtttgtttttcgggaacgtttccctcgcttttagttaaaggttcaagcaatatatataaccgagcaacaaaacaatgcaaagctaacaacaatccctagacttgtcctcttcacgcttgatccggcagatttgtgctcatcatcagcagctggagaatcggcatcagacgatgaagttgaggatttcggggcaggagctccggtgggagtggtctttgttccgaataactcctccggcaacaacacactgtccaccacgtaaactgctagaggaaactgttgccttaatgcattattgatccgagtctcaacaacaccggtggaaacattcacttggttgctttgtgcttgtcctgtgaaatttaacccaaaaacacctccgtcttgtcccgtagcctgagttctaacgggattacttgctaagagaagatcgcttagagagtagtattttggaatgatatggtagagcatgagctggatttgttgttgatatgtcagactgtttagggttccgggtttaagcttgttgaatgcgttatctgttggggcaaatatagtcatcccttggtcagagctattgagttgtacacttacctgaaacccgacttgagttgtgttgaggagttgtattaatgtggtaaattggtgaccagcttcaagaatcgctgtgagattgatgggacttttttcagtggttggagctggagcagtgggctggctttgaatgtatgggatggtgaaaaggaagattaagaggacaacataagagaatagtgacgaggacatggcttaaaatttgttatatttttctctatctctctgtgtgtgcttgtgctagagctaaccctttaggtattatatagaaagattttaaggagagatttaagacgacatgtatgcgtgacttgcaaaagaagttgatccattgtttttaacaacttagtctacattttacgataatgtttataattaagaaatgcaaaacaatactataagaaggttgacaaaatgtatatatatatatagaattgtatcccacatccgataagatcataagagatttgtagggcaatatatatcgtatatagtatacaaactcatggttcaccagttagattacacaacaacaaaaacaacttgaaaatgttagctggtcatggttcatgaatatctttacatttttctgtatttaaaatgatgtggatacgtgtatatagtcgaatatagtctggcattgataggcaacgtgggggtcatatatattataacaacgaaactgctctacatgacattggcatgggcaaaatttgggctggaactggaaaaatcctcgtagggcatgactataagaaaaggcccattaaaaacatgaaaaattaacaaagttggaatcataatcgactgacgaaactaatctgttaaaattatgtgactttcttaatacaaaatagcgttgtactggtttaggattaaaatcgttcggacctcttgtggccttgtgggcacatggtgcgccgtgcgtagctcacgtgaggactgacgatgacatgcagcaaaaataataaaaagaatacgtatttagcagcagattcagacaaactcatgtgcgtttcaaaaatgacgtttatatccccctaataattatattcactctatccactttgacaaaaagatcacgttaatttgaattctaagggtaaaagcgtcaaagtatgtctctttttccgaggtaatagcaataggcaactagaggagaccgataactcaagcaaactcagattcttgatagcgatttaatgaagacccaagagtcccaagaccaagggctgattaattaatgctgttttaaccatatg

SEQ ID NO: 13826 - DNA, 3000 bp, Unknown
  misc_feature (1)..( 3000): cDNA_ID_3032056_gDNA_ID_2214654_Annot_ID_188726 3000 nt of promoter + ATG
tcttttctctacaaactctaacctagagaaacaataacaacaagaacatatccttttaacaactgaaagatttgtaatccttctaacacagatgaactcaggaaatcatacctccccaaatgcacctttcccaatcattgtaagcaaatcaaaatcagcaacacctaacttatggcgttgaaggcgcatgtactctgtctccttcttctctaaaaacttgagaagattattttgatcttcttcagacacgtcagcatctgccagtttctgctctaacatgcttcgcctgtttaagcaaaaaaacactaaatcacgctccatttgcaaagaagagatgtacatttggtagagaaataagataatacctttctttcctctcttgtagaatcttcatctgctctttgtaatgattctcaatgtactgtttagctgctgcaactttctgtttggtagtgtttgaaacagcttcttcatcagtttcgacgttgtgctcatcggcagagccattacttccacctccaccagcaccacctgaagcacctttatatctggatcctccacgcatctgccgcttctgaaaccaaccctttgcagaatccataactctttaacaatacacacaaatttcactgatgattgatcatcttctcatcaccgaatcgttctgcatagcaaacaataatttcgaaatcaacacacatcatcactacaatcaaaacataaccttacgaattggaatcaaaaaatacattacgatctttgaaaatctcagtcaaaataacaaagctagattaatctgcgattgtaacaaccttaacgtgacagattcaaagcaaagcagggaaaaaaaaaacaaaaatcaggaaaggagaaagagaagaaaagaggaattgaatgagcgtgaaactctctagagcatagcacctatttcgcatgaattgtatggtattaccattaatcagataagcatgtgtgtatatatgaagattggtgcatttacatgttgatgaagaaaggatcaatatctgccttcgttctcagcgtaattttctctgatgcttacatgcagactttttctctctctctttttgttggttatatattttatagaaaaatcaagtttaatatgtgttgattttttatctatgaaaaaaaaaaccttaataactagttttgttcaacaataaacaaatcaaatttacaatatttgttactatatcgcaagaatttatttatacaaatgattcaaaagtctacaaaatcaataatattttgtttaagaaacgaaatattccccatttccaattagtaagaccactataaccctgagtcgttgcaacaaccatttaaccgaccccacgtgattctcacgtgatgaatacaaaactctcaattaaatcaaaaggttgcaacacttctctgttcatcaagctgaagaatcaatgggccaacaacaacagcatcaaaagattcaaaagtcctcaaaactataaaacaaacaaacatatgaaaacatagacgacaaagctaaagaaactttacccttcaaagccatttacgtcactaaatgttgcgtgcatatacatgtgatgagtaatgcattagactcctattgaaattcactctgttgcagccaggcacaaagatgctctactactaaatcactcgtctgctcttaaagctgtgtctttattaatcaacatgggattgtaatttaagcttatcaagcatacaaaaaaatccccattggtttttacaagcaacaacaagctcaaaatgtaaaacaaatcagataaaaaaccttgttaatccaggtagctacgattcagatggtctgatcattgggaaagaaggcaatctcagcacagcttcttctgtctccattggatccgatctcagaatctaataaaaataaatgttacaaactgcattaagatccactaaatcattcaagataacatgtattgagaagataaaccctaaccagaaccattggaatccagagtcagtatattcttggaagaatggtacaactagatattacatcaacacgtcaaacaattggcacaaaacagttttgacccgcacacgaaagaagtcagaatttcattatggaaaaacattgatccaccggtgaaatagttcctctttgtaactagaatgtattcaaatggaaattgctaatggctactaaatgaagtgaactttcaccatttggctttaaaattcttatctatacttaaaaaaagtttttgtttgatctgaagctctagttctatggctttctagaagaacaaatgattcttcatgatctctcaattaactttcacatttcagacctaaacataagaaaattgacaaaatggagatacatcgattcatatgacatggaaaacgaaattagtgatctttagctcaaatgacatcgttaaggacatcgaaacacacacaatgtacggaaaatagagagagagagagagagagatccttacagggtcctgaagaacaggtttggtgtcatcaacggcaggtctgaaaggaggtttctgagttttaacagttgcgttcggtctcgccggagtctctgtagatttcttcatcgttttctctttctttttcgccggcgaatcgaaatatcggaaatttcacttttaggggatttagtggcgattttcacacgtgacggaaccactcacgtgcattagttgggctctgaatatagtaggcccattgattggggttacaattttttatatcaaaaaagcccattttgttttctcttctagaactttatatacacattgacgagggtcgccgtaaaacctctgctacttctgctccagaaaaaccctaatcagcttctcgtctccataaattcagaaccaagaaacatctctgaggtaccatcttggtttgccaatttcttaatcagctttgttactttttttttctcttgtcgtcagctctaacttgaattatctccacagagactaaacgaag

SEQ ID NO: 13827 - DNA, 3000 bp, Unknown; identical to SEQ ID NO: 13820
  misc_feature (1)..( 3000): cDNA_ID_2704240_gDNA_ID_2214654_Annot_ID_188724 3000 nt of promoter + ATG

SEQ ID NO: 13828 - DNA, 3000 bp, Unknown; identical to SEQ ID NO: 13819
  misc_feature (1)..( 3000): cDNA_ID_1029952_gDNA_ID_2214654_Annot_ID_188720 3000 nt of promoter + ATG

SEQ ID NO: 13829 - DNA, 3000 bp, Unknown
  misc_feature (1)..( 3000): cDNA_ID_3032131_gDNA_ID_2214655_Annot_ID_188750 3000 nt of promoter + ATG
atgcttctcgacactgcctccaatggaaactttctgaacaaggatgtagaagaaggctgggagttagtcgaaaatctggcacaatctgatgggtgctacaatgaagactatgatcgctcattgagaggaactggaagaaatgaggataaactagcaaagatatgaaggctctgaatgaaaagctagacaagctgttgctggctcatgagaagcagatacactacatcactgatgaagaacacttccaaatgcaagaaggggggaatgatcaaattgaagagctgtgctacattcagaaccaaggagggttcaataagcgctagaacaactacaagcctaacccaaacctctcctacataagcactaatgtagctaacccccaagatcaagtgtatccaccacaacagaatcagtctaaagccttttgttcagtacaaccaaggttatgtccctaaacaacagtttaatggaggctaccaacaacagaatccaccaccagggttcactcaacaaccacaacaagcgccagcaactcaagatcctgaaattaagcaagtcattcaaaaatcattcaaggacaagctactggagctatggcttttgacaagaagatagctgaattacacaataagatcgattgttcttacaacgatctaaatgtcaagttcaaagctctgcattcaaaaatcaagtatgtggagagtcaatttgcatcaacctctgctccgaagcatccttagcaacttccagaaaaagcagtccagaatcctaaggactatgctactgctaatgctatcaccatccaccaagaagatgagtttccaccaagtcatcagactcccaatactgaggattgtatgattcaagattcaagaaggggggattcaactcaaattgttgcacctgccacccagcaattcatctggactatagagcacatacctttgctgaatactcaccattatggaaaaaagctcaaaattgaaaaactcaagaaagatcagaatcaagagatgattagtagagtcatcactcaagaaacgtacaagaagaaagttatccaagaaaagcttgatgatcccggtttattcactttgccatgccctctaggaccattgacattcaatatgtgcctttgtgatttgggagcatctgttagccttatgcctctctctaaagctaaaaggctagggatcatgaaatacaagttctacaacttagctttactcttagctgatggttctgttgcacatcctcatggtctaatagaaaatatgcctgtcaagattggaaatgtcgagatacctacagattttatggtattggacgtagatgaagaaggcaaggatctccgaatcctaggtagaccattcttagcttcagctggagcagtcatagatgtcaggaatggaaaatttgatctaaaccttgaaaaaggtatcaagatgagatttgacatcagaaaagcttcagggaaatcaacaacaggaggtaagaattttgggattcaagacatggatgttgatgaagaaacagaagctggaacccaccaagagttaactatacttctcaactcagcaagttaaagagaacttttgaccataagaagagagtaatagaagggttagctcagactgaagatcctacagaagatgactggtatgagatgagaaaaaaatttaaatggcaaagcagagtcatagagggattataatcaagggtgatgaagctgaaagatcaactatggatgtttgaaaaagagttaataagttttcaatgggtattgaccgagagaagatggaaactgcactagttatcaaggaggacgaagattttacaacagaaatggtttgcaccagaagatcagaaagcagttcacttagaggaaagaagcctagagagcaagttgttgagtgaggaggaaattcctattccgacttattctccaggagtgcctaaacctcccaccaacccctatgctgaagaagaacacttgattcttgattctgttgctaaagaactcctggagctctagattggatataaagctcaggaggatacaattggaaagttaactcataagatggaaaagttaaatagcaccattatggaacttcaagaaatggttaaaggctacccgaactttgaaattgaggattggtgaaagaagcctagtttagaagaagaagactactctgctgatcaaaaagaggtttattgtgaagaaaaatcaaatgagtactcatcataccatacgtcatgagaggatgcagagtatgattcaggcattaaaaattcaaccactgaagatgaggacttctctgtttcgccttcaaccttttttctcactaagctcagtaagagtcaagcttagtaacttaaaacaagctcacgtgggtggaagtcccatgtctatccatgtatataactttctatcttttttgttatttttgatgtttttgtttaagtgtttcaggtttgttttattgaccctaaggaagtcaacagtcgagtaaattcaaaacaagtcaacaatcatctcaaccgttgatcgagtaaagtgcggaagagagctttaagccggtgatttgaatgaccaaatgagagaagcatcactaccgtttgatcgagtgacttcttgaggtttattctggtccgtttgatcgagtgattaaaagcgaagcattctccactgtccgatcaagtgaagaaaccaaagagaccaccttctggactccgacgcctcgtgacccgcctccattgaaacgatgttgtctctttgtcttcttaaccccccatagttgctttggtccccccattgcaattcccgaactcaacaacctcatctctccacctctcataccaaagcaatctcgaattcttatatctctctctctatctctttttcttgcacttccgctttctatcaaaaactcaacataatacatctattttcttcatcactcgatctcttaacctttgagtctctctttctcaatg

SEQ ID NO: 13830 - DNA, 3000 bp, Unknown
  misc_feature (1)..( 3000): cDNA_ID_3032119_gDNA_ID_2214655_Annot_ID_188753 3000 nt of promoter + ATG
attgggagtctgatgacttggtggaaactcatcttcttggtggatggtgatagcattagcagtagcatagtccttaggattctggactgctttttctggaagttgctaaggatgcttcggagcagaggttgatgcaaattgactctccacatacttgatttttgaatgcagagctttgaacttgacatttagatcgttgtaagaacaatcgatcttattgtgtaattcagctatcttcttgtcaaaagccatagctccagtagcttgtccttgaatgatttttgaatgacttgcttaatttcaggatcttgagttgctggcgcttgttgtggttgttgagtgaaccctggtggtggattctgttgttggtagcctccattaaactgttgtttagggacataaccttggttgtactgaacaaaaggctttagactgattctgttgtggtggatacacttgatcttgggggttagctacattagtgcttatgtaggagaggtttgggttaggcttgtagttgttctagcgcttattgaaccctccttggttctgaatgtagcacagctcttcaatttgatcattccccccttcttgcatttggaagtgttcttcatcagtgatgtagtgtatctgcttctcatgagccagcaacagcttgtctagcttttcattcagagccttcatatctttgctagtttatcctcatttcttccagttcctctcaatgagcgatcatagtcttcattgtagcacccatcagattgtgccagattttcgactaactcccagccttcttctacatccttgttcagaaagtttccattggaggcagtgtcgagaagcattctgatatttggtaaagcccctctatagagtgtgcttaataaagaagttttcttgaaaccgtgatgggggcactgagtggtgtagcttttaaacctctcccaagcttcacagaaagtttcattgtttttctgtgtgaagcctgagaatctcgttcctcaatctagctgtgcgagcattagagaagaacttggcaagaaaagctttcttacaatcgtcccatgaggtgatggagttagggggcagagtcttctcccaatggtgtgccttgtctcccaaagagaagggaaatagtctaagctgtcaagatggtccaggggatcttcaataggtaaaccatgaaacttgtttccttggatcattgagatgagaccactcttgatctcaaagttgttgttctgaactagtggaggcactatcctttgtctttggtgatgattccttggggcatcaccaacaccaatgtttcttggttgatcaacattaggtgggtcttgaacatcaactcgtctgttcagttgatccatagcagctggtctttattgatcacaggctgcctttgctttggtttcttgtaatgtaacttgataaatgtaaaagaacttgatcttaactttttctgatatcttgaatgtaacaatgcaacaatgaattggcaacggcgccaaattgataagtaggtttttacgcctacttaatgtgctgaagtgtggtgtgttcagttcaattctgcttaaacactaacatatcgatgcagctatagggggtgtcaatccagtccactgttattactagcaatcaagatgtgtacagaagcaactaagtcaaaccagattatagagatggttggtttctagtaacaatcctaggtcaggattcaaacaacgaaaatgagaactttaaaagcttttctcgatcattgggtcgagtagaaccaacatgtaacaaatttaagaactaaaatgcaatcaacaagtgacacaaataacagttaaatagaagtgcaatgagggggtgaatacaaataaatctaagaagaatagaagtcctaaggatggattcattgataagggcaactctagggctcatccgtggctaacaggtgaaaggcagaaaccctagacgatagattcaaaaaaaccgggtcaatccactctcgtgacagagacccccataactctaatacttcctaatctcaactctcgttgatgaaacatagcagagcagggtttgagcaacaatctaccaaagccaataagcagactagccaatatcttggtctatagcctacaaatctctagaatctctggaaggtctgaagtagagctagaatcgggaggagctgaacaaacataaccgttcaggttactactttgtacccgtttgaccacaaaaccgagcatcaagtcaaaaatgaaagctcgtacctataggagggatgaccaaaggagttggttggacccgtggaacctcttcaactagattctatggagctgctggaagagcttgatatgtctataatttgcatgttttcagtgttcattcatcattatttggagtctagtttcatatcattcatcactgttttatatcatttctcatcattctcgcacactttgcatgattaggatagctgttggagctggattcccctccaggaatccacctgcgaaaataccaagccagcccacaaaagtccactaagcccattaagtagaggacctacgcagctgacgaaatgacctaggaactgacgaagagatattcgtggagcggacctgatatctcggaactgacctgccgaatatccaggaggatctccgcagatcccggacggagctaccacgtgcgtagacctatataagggaggtaggacgacttggaagagacattcaatccaacttacattgatacacacacttttacacttgtaatcccttttcacattgtaaaagctttgtcataattaatacaaaagtccattcgttcttagcaatacaactctcaaggtttcagtgaagatctagccctcctttctcataatcttaaatacaaatatctagtgtggatttcagaacccacatttggcgccgtctgtggggacgacaatatatcattccaacaccaaaactaacacatcaattgtgaccaacgatc

SEQ ID NO: 13831 - DNA, 3000 bp, Unknown
  misc_feature (1)..( 3000): cDNA_ID_3032115_gDNA_ID_2214655_Annot_ID_188754 3000 nt of promoter + ATG
accgaccgtcatagagtagaatcggatcggccagaccgactgtcggacggatcggatcagccagaccgaccgtcggacggatcggatcggcaagaccgactgtcagacagatcggatcggccagatcgatcgttggacggatcagatcagatagaccgatcgtcggatcgaatcaaacataccgtccgttggacggatcggatcggacagatcgatagttggacggatcggatcggacagatcgatcgttggataaacggatcggatctaacaaagagacggattaccgaccgggataggcggatcgggaaaggtgttcgaggaagcacaaagataagtgcatccgaacacacccaagggtcgcccatggatgcaatattaccgataaaaggaagaaagcaccgaagatgggtaaagaacgtgattcacccaatatgatcaatatggtgtccgcctttgtgtatcaatcgccacggccgatggtaaaaccgatccgagattggtgaaagaccaaagggtgactcgacagagaaccaacgggaaagtccatggtgagaaccgatggacaaaacagatgtttgacccgcgagtaaaccaaaggccgacggaagaaggatttcatgggcaagcctacgatgattcaatggttgaatccacggacccttgtgtgtgataaggatatcgttcggatcgtatggatggatcgataagccaaaagttttaccgaccaccatggaccggacgggtaaatggttagtaaactgtgggcagtcgtagtgttaaacgaccgaatcggaaaaatggatggttcgataagctgagggctcaatcgtccaccatgaaacccaaggggcgtacgtttggaggacggatggaccaataagcctagagctagattcggccatcgtgaacaaagggaatcgtacgatccccaatctctatcgttggacttagaccagtggggttggtttgttgtatggctaagtaacgatagagattggtccatcaatatacaagtcttacgaaaggaatatggaacaagaaggctaaggaaaggattaatggacggatcgaagaggaatcgaatccgcatattggccaaggtatgtagacgatctaacttattagttaagatagacgtttggaaattgaccgtgaaaataggataaatgaatatgcgattgttaggcttagaggggttagcgaacaatatgcatgtcttgaccgagtaaagaatcgatctaagtataagggacaaagacgatgaaaccggtacaagggttggttggtattaaaccaaggttagaaagacttccgctgtgtaataagaaagcgattatagaattaggcctcgtaaaggtaattctatgttgaatcgcgaaaaattaagaggttctactgggaataggctcgaatgtgagtccatggtcgtcggacgccgagacgtccgggacggggtctcacatcgacgaggtccgatagtagctctgataataggtttttgggatcaattaatcctatagcactatcatatcgttgtagtgcttaaggttgtcaatccaaatgagtgtgatgcaaacagatgagatgtgatcagaagtcactaattcaagccaagcaataacagttttgaggtttctaacagtcctaagcgaacatgcagaaaacggaaataataacagaattactaaaatcactcgaccacaacaggctgatgccagaagcaggatgtagtcgagtagcaggtcgagtaatagacaggaaatgaaacagctatactcgactgcacagtctgttgccagacactgggtggggtcgagtaagctggtcgagtaattgcaaacactaagaaacaggcaatgagaacgattaagcgataacgataaaacagagaaatcagatagaagagaaattcctaaggatggggtaatcgaatagagtggtatccttgattgttcgaatggttaacaagcgcaatcaatctatccctagacaacatgttcaacaacaaattaattcactcccgtgatagagatcctcaagcaaagctagcccaaactaattcccattaacggaatctacctatgcaggcaataagaacggactgataaagtcaataaacgctctaaacggccaatcccttgggatagacacgaatatctcaggaactagtggatcaagcattccatcgaacaccttctgggtgcgggaatgctttggatcgaattccagttgatcagaaagaaataagcagtaaacacaaatagtcctgaagggattcaatcaattctaaaacttaaccattctacagactacggattccacaactactctatcccatccttaagaattctaagtcactactcagacaacatgctcaaagacataaacgcaggtaaatgataatattgcataagtatagagataaagagtagatgacagatgacagatgaaatcaaatgccgaatctgaataacttggaaaaatctcgaattataggttgcagaagcaaaagcggcacaaccagagtaaaacagaaaataaaactgaagcaaaaactcaatgtcgactagatgtctcaggacagaaccctaaaacaatctatttatacaaaacgaaagaaaatgatagtagacgggccaataacctaatcgccccgcccatagagtgataatgggccgagatgggcttcgtgatccgatggaggtccaagccgcttccaaacacttcgtcttctcctcttctcttccttgtgctcagcttgtctggttgagtgcggatttgagtagactccgaagatgtgatcgagtgcttggtcaagtgatggtattggtggtgagtgatgatactcgaccaggggtcgagtaacgtggtagagtgaacagtcgagtgtggtcaggtggtatggcgaagtgatactcgaccacagggtcgagtggcgtcatcgagtggcctgagctgaggttactcgaccacgcggtcgagtagatgggaagaatg

SEQ ID NO: 13832 - DNA, 3000 bp, Unknown
  misc_feature (1)..( 3000): cDNA_ID_2704294_gDNA_ID_2214656_Annot_ID_136490 3000 nt of promoter + ATG
tgttaaaatttggaccaattttttgacaaatcccactagatttttatgtaagaagtgaattttgtttactaacaccatgatttataaatcaacttttggttgaaaaaatgcaatttcatggagatgcaagtggaataattaagttcaagttgattctttaaccaaaataaaaaaggaagttaaagttgattacacatgcatatgaatctgattttttaaaaattaaacattctcctatcagtaagtcaggacctatacatactacgcagtcgtaaatgcttcagcagcagcagactcaagtaggaccattacatgactttattcacgtaaaatccaaatatcaattatatgagtgaggaaaaaaaaatagtaataattatatcagtgaggacactagcttgtcttttttccgagtagtcgatgccggagaagtaatgtatccttcttcatagccatcggaatcgccgtagcagcaaaagtagccatcgacaaataaagaaggctgcgaaatcagaaagtaaattgactgttggagtagagtgaatcaaaccaaaataatcactttatttgggccgtgactgggcctttcaatgttagtgacacttagaaaaagtatgaggccgagatagcctcacattttaggcccaaggtttggtaagttaacccttaaatagtgtgactgtatgcaattaatagtgcaaggtaaattatctacatatacatttttcagccattttgtgaaataaatcctgtatttgagacttatttactattgctgccactggattttaatgtttgtttttgataattagaaaaaaaatcttcgaattaaatatttgacatttaacaatcttccctaaatctctccatattaactacacgattagttactaaaataaaacttccaaaatatttaatatcattaaattactacaaaattatcatttttgatattgcttttctccatgactataacaattcgattataatcatcaaaccgcagagatatttgatagcatttaattactacaaaattacaaaatatttagacaataattcataaacatatcataaataagatcaacattaataaaataaatagttttttacggacgggttggcgggacgagtttgacaggaagttacttaataaccattgtaaactatattttataaataaatacaatttacaaacttttatatatattaactttgaaaaataaattgttctcgcggtgtaccgcgggttaaaatctattttaactttgattagtggagcaaccacataaaagtatttgttgacctgattttaccaaggttaatttttcttaatttatttctcgaaattgagaaatttttagtattattttacaaaaatgttactttatttaacaaacgagaatacacaatatttttttgaaataagtagtctagtcttatcattaatgtgaatattaaaaagtcaattaatattgggagctggaagcttggggtcattcatgatggtcggtcggtccatatatcaaaatttaaatgagacagtttattgtatttcgctggaagaaataaatgatactactaacttgttgacactaaaaaaaataaaaatgaaaattaatgataactgttttaattttatcaatttctcttaattttatttatttgagaaagccaaaagccatcagccatgccgttcataattatattgtcggaaataaaaaatttagttaacaatttcaaagtaagaaaaccagctctcttcctaatcattaattttcttttttagagtcataaagaaaaaaatacagcatgattctaattttcatttacattctctctttttaagtccttacataagtttgtttgtttatcatttaaaattactgttataaatgtattatataacatatcaaaatatatatctttgtctaatattttttttttatgtccagtatatatattaattagagttagtgaaatagtattaacttcaaaaatattaataaaagctatttaaaaagagaagaaaatctattcatttaagaaaccgaattactagtagttcataatttatttaatttttttgacagttactattagttcataattattgtaaaatattatttagggtggaaaactaaattgggtaccattaggaaaataaaaacatttgaaaacagtagtaataatgttttctcttccatttacaaatatcttaccagaaaaacggcaaaacacgcgcctttcttcttctccctacaaaaatggcttcttctctttctctttctcttaccagggacaagttacaatgtaaataaaggtcaaaccttttttccaataaaacccttttaatggattgtgctaaaactctctctctctttggattttcaaaacaaaggtaaaacctttttgtcaatatccttataagctttctctctcttttagatttgtttctctgaggtttcgcattctaaatctggagccgtcctttttttgggggggtaagagagaaccaaagagaagtatatacacctctctttctcccttctttctcctttccttagcttttgatccttattaggtaaaaatcaagaaccttcttctctataactttttcttcttcatttgtttcctccaccaacctcaatcgctaaatgtttgaatattccgattgtttccaacctccctgattgattatttcaattttctgtttcttataacaaaaaatgtgggtttgattcttattcagatgatcttgaatctctgttttagtcctcaagatttctctgtttgatcaaatgtctaaatgggtgtctctagttcttgtttttatcgattgattgttttccaaggaaactctcttgtaaaactgaaaccttttgtttatttgcatctcttgatgaaattagattggattctgctgtataatctatggattttaacctgtatttatgtgtgtttatgtgacaacagaaatcttaaatccagactttaaccatg

SEQ ID NO: 13833 - DNA, 2962 bp, Unknown
  misc_feature (1)..( 2962): cDNA_ID_2714092_gDNA_ID_2214656_Annot_ID_188777 3000 nt of promoter + ATG
cagaagactaattctataagagtattttattatcaattcacattgtgcaaaaaggttactcttgaggcttcagataacagcttcttcttagccactctgcttgatcttagtagatgtaatatatatccttcacctgcaagtttcattaaaacctaactaagtcttgaaactagagacaatttataaacatctgaattcatcaacaacagtacttaaagaagcataccctgcatgaaaccatcccatatgtatcatatcaaaccgtaacagttccacaaatgtcaacagaagtcgtctttgctggtgtaagcacaaccgccactgattcgaccttcccccaaaatgtaccatcttcctttctttcccaagcaatctctatgcaccaaatctctcttttcctacagtcataccgcctaagccggtgcacatcagcgctcaaaatcaccaacttcccgccaaaattagccattttatatccatccacaaagagaccattagctggaaaaccttgtaaaccttgcaagtaaaaccaagtcttcttctctggatcatatatttttattggccatccaaggaaatacactgatgtattgatgcaaaacagcaaattatcaaccacacaagacgaatcattccaagaagcactcaacggtccatgagtccaagactcccatttactttccttaggatcataaatatgaatattgcgagtaagatccaaacagtaaatcttctccttcatcaccgcatatgtcagaaactctcctcttccaaacgcttcagggtacggacctggcacagaactccaactctgtttctttaaatcgaacacttcaacccaatcagatgttcgtaccttacgacctccgatcacataaatctttccgtcaattacacccgcggctgcgcgacagcgagccatcttcatactcgggagggagcgatactcgtgaaatctgcagtttatgtgagtcacatccgagatgcgtcgttcgcctgcgtgtccacctcttatggatgtctcgccgcggcgtccaccgcttatgggtttattatagcctacgcctacatcttctaaaagtttctcgccgacgcgtccaccaatgacatagatatccgatccgatagtgacgacagtagatccccaaggcatgggagggagggaatcgattttgcacaatttcaacgaaatcgtgttaggcaagtttcgatagggtttacgatggagaatgtaccagctagggttttcaacaggagggaatccaacgtaggcgtaaagaacgttttcggtgtagccgagacgcaagcgatcatcgtagagcttcgacatgagactatggaaggatctgcagacgagggaaagcgacgggtggtgacatctccgaacgagtaggaagcaacgtaagatgagttcttctggaattggtagcgacacctgaaccttttctttcaatttcttgtttcgatcctcttcttttttaggtttcttgatttgatgatcgccgccagtagagccgtcgtcggaagtttcagagattaaaaccatcaccgtgtgagttggtagcgaattaacggaaagtctaagtcaagattttttaaaaagaaatttatgtgtgaaaagaagccgttgtgtatatttatataatttagaaaatgtttcatcattttaattaaaaaattaataatttgtagaagaaagaagcattttttatacataaatcatttaccttctttactgtgtttttcttcacttacttcatttttacttttttacaaaaaagtgaaaagtaaattacgtaattggtaacataaattcactttaaatttgcatatgttttgttttcttcggaaactatatcgaaaagcaaacggaaagaacttcacaaaaaaccctagctaactaaagacgcatgtgttcttcttattcttcatatatcctctgtttcttgtgttctgttttgagtcttacattttcaatatctgactctgattactatatctaaaagggaacatgaagaacttgagaccatgttaaactgtacaatgccttcaaacatggctaactaaagatacattagatggctttacagtgtgtaatgcttattatctttaggttttttaaatcccttgtattaagttatttaccaaattatgttcttgtactgcttattggcttggttgttgtgtgctttgtaaacaacacctttggctttatttcatcctttgtaaacctactggtctttgttcagctcctcttggaagtgagtttgtatgcctggaacgggttttaatggagtgtttatcgacaaaaaaaaaatgtagcttttgaaatcacagagagtagttttatattcaaattacatgcatgcaactaagtagcaacaaagttgatatggccgagttggtctaaggcgccagattaaggttctggtccgaaagggcgtgggttcaaatcccactgtcaacattctctttttctcaaattaatatttttctgcctcaatggttcaggcccaattatactagactactatcgcgactaaaatagggactagccgaattgatccggcccagtatcagttgtgtatcaccacgttatttcaaatttcaaactaagggataaagatgtcatttgacatatgagatatttttttgctccactgagatatttttctttgtcccaagataaaatatcttttctcgcatcgtcgtctttccatttgcgcattaaaccaaaaagtgtcacgtgatatgtccccaaccactacgaattttaactacagatttaaccatggttaaaccagaattcacgtaaaccgactctaaacctagaaaatatctaaaccttggttaatatctcagcccccttataaataacgagacttcgtctacatcgttctacacatctcactgctcactactctcactgtaatcccttagatcttcttttcaaatttcaatg

SEQ ID NO: 13834 - DNA, 3000 bp, Unknown
  misc_feature (1)..( 3000): cDNA_ID_2704289_gDNA_ID_2214656_Annot_ID_188775 3000 nt of promoter + ATG
tttttagagaacaagctattatgagctagttgaacaacaacatacttattccagaaaacagttttatgtattggattgctacaaatgttagacaaaaatcaacaaaagcagtggcagtttactgataaaatcactcttaaaaaaaagaacaaaaacaacagttctatggtaacaatgtcagatgagaagaagattaagatcaattcttaaaagaaaatgattaagatctttttccttatatattctctcatcaaccaataaaaacccctgagcatggagattctccatttcctaagttctttattcaaagattccgagaaacaagaaaataaaaagaactctactgttataggctgctactatggctgattttggaccaggcttgtgtctgtggatacttttttccctcaaatgggactagctcttatggattcctggtgataatatgccatttccttcttttgcgtaaagtttgtccgaatccaattttgtaaagggatcattcttttgttgataataatatctcaccactatcctcgaaaatccttcgaaaacattttgagctacagaaacttccattatagagtgattacttcaggttcgggttcttttccaagttgcaaaaggagagcaaccactaggagaggaatcagaatacttagtttttgtttcttgctagatttggggataagggttccaaatatcaacagtaattttgtaacaaattaaaatgcttactcttttaccttccttttcatacagattccttgtaagctactccgggtaaattctcagcaatgatcactcaagacctggagatatcagaataaaaccctcaagcgtttactgatgcaactattcatagtgagaaagtaaaaataaccatcttgctcaacaacaaaataatcgaccttatgaactcaagattatcgttttcacagctaaagaatttacctaaacttatgacttaaatgtggggaaagtgttccttttttaccatttcaatacctaggcaaagaaggtcgctgtgaagcatcgtgacgatgagaatatcagtagtgccccaatgcctactagcagaatttcttggcaacttgcaatctattatctctctggaatatattgtgccccaaggcctcattattgttaagattctttctctgtttaaagttttccttctcgataagaagtttcgccgcccctaccctgaaaccaaaccatgacatcttagaaacagaaccatccattatcataactagaataaaaatatcttaataatataagtgcttatattggcatatatccagaaagagagcaaattaaagtatcataagacctatacacgtaaaggaatatcatcttacttagcaaaactaataacatttagtgaaatggataaacactattatcaagaaagatccgagaagtatggttcttaaatagctttactttaaaaagtgtgtagacaataactttatatagtcttgtggtcttttgataacaaacctgattcaatagtgataagatatgagtatggtcctccatctcccatgggactttgaatcacctgtgtttccgagagagggaaaatcttgagactttaaatcaaaatgtcaactttattatgaactaaaaatcaaacaacaagtggatcattaatgaacaacctttgttgcatgaaaagaaaatcttcaaatcttttaaagaatgaaacaaaatgctcactttctgagataaaaccaaacaacaagtggaccatttatgcatgttgtctttttgccaagtatgtatattattagtcctattgtgcattatttagcaacctaatttagttatatgacaataatctatttgcccatcccaaccctggattcttaccaaacaaggtaattaaagtgttcatgtgaaacattaatgtttgtattttgtaatacgacaacttttggttcccgcccatattcaataatgcagacactaaagaacagaagaaacaatttgaatatccaccaagaaaagtgattatttaacaaattaacaaccaagaatctacattagacaatatatgaccaagaaaaacacagttgcctaacttcaaggagatggacccaacaagccaaggaaaaaaaaaggtaggtaaacaatgttgacgtttatttttttcaacaacaagaaaacacagaaaaatgtcgatgattgtacggaaagatcatcaatacagctagataaattgatatggttttcatggcagagaatctcaaggtaaagctctgcccccacttttctttaagaattcttcttatacaagagaatatatgacttatggtgaacacacgaaaagctccaactttgtgtttgtggatacaaattaatcctcacaatgtttcaaaatcactgagatttttgataagaaggaaatctgattagtcaatgaaaatcatctgtcaatagagacttgtccctaactttcaaccaaagacttgtaattttccgcgagcacgtgagctttgtgctctgattagagaccagactgttccatgaattaagtaccataggtagagagattttcctaactatttattacctaaactgtttctttttgacaagaagcttaatctagagaatgacgtcataaccactaattgggaaagaaaagtaaacatattagttataacatttatagaaaagtgtgtctagggagcatcatatgccaaatatggatggaaaaacgcaatctttggttgattagtttggatctttgatactgatctccacaaaaaaatttgctcatattcttttctagctatagagacaaagacttaaaattctctttgttttggcaaagatatcttttaacaactggccctaccccacaccaaaacctctttataaagagcaaggactctgcgacatctgtgcaacatatcatttcctcagaatctctttcttttctaggtttattactacacaaaaccaaacatcatcaactttagttactaaaca

SEQ ID NO: 13835 - DNA, 3000 bp, Unknown
  misc_feature (1)..( 3000): cDNA_ID_1393970_gDNA_ID_2214656_Annot_ID_188772 3000 nt of promoter + ATG
ccatgttaaaactatgagaaagttgactcttatctataaatggaacatgtttttttttctctctaagagctggtcatgcatgcatatatcccaaaaatatggaaataaataactctaatcactgggacgatccttaattgatctttagaaatagttgtagaaaaagtgattaaaacatgggatatatcatatatcattattatgtgaagtgtatttttaattggtacaaattatgtaaaatgagttattagtacttacttcatatagagaagaagcgcttccacaaatgaaatcggtggctccttcaatatagcagttcttgaagtaatggtttccattgtcgtcaaggagagtgtcttggtacgacgttatcacgcatccgtagaacgctgccttatccgccgccaccctcagtgcaaccgcacgtcccgccgttccaaacttattctacttacaataaaacgaaacacatcaatattagtaactttctttttttgttaattaataatgattcacttacttatgatattttggtgatctactttgaattggtattttataaaatgaatgtatacgatgtatgatgaagattgacctgaatagtgagaaatcggcatacaaaatcggatgcaaagatagtgagagtgggtgattccaaaatgtcttcgccatcgctccatatgagaaaagtgttggaagcttgtgtcccactcaatgttatgtagggtttctccgcaggtatcaccactttttctctgttatcaatgaaatcgctaattctcaaaactatatactttaaaagcatagaataaactaatcatcaataacatatactatttaggaaaaaaaatcataaatatattagtaggtcaaaaaagcctagtacctaatacccagctgataaatatcaacaaaatctaaaccctaaaccattaaggtctaaaaacctaataaaccttaagacgacttaaatatagaaaatctaacaaaatattttatatgtaccggtaaattccaggcttaacccaaatgaaatagagttgagagttgtttagattgggagggatagattcaattgcttcttgaatcttactgaagtctcctttgcccgattgatcaactcttattagaattgcagtcgaaaaatcaatggaagatggagaagaagaagaagccatggaagaagatgtgattgaagagaggatgaaaatattgatgattatgatatgatgatagttagcaattgaacgtttggacttcgttttataaagtcccatcttggcataacccatgtgaggtttcacgtcttggcgattgtgcagaggacaaaaaaaacaaatacaagatagaaataaaaaatgaaaactattgaattcaattagtgaagcaagagtgtgaaaattagaattttgaaaagtttggtttgcacataaaggagattgttttatatacataccaatggttgactaaaaatcaagatgacgtggtgggattggccagcggtcgaattcttatgatcgaagttgaaagattgcatttcgttgacaagagattttttctatatcagattcaaactttaaactctaagacacaagttctatacacacaagaatatatatttgtatatttaaccatggtacataacctagactactctccaaaacttgtataaaaaggattttattgtcatcctacaagactacaacgtgtcaacgtctacaatgacctaattaaacagaaccaaaccagtttttaataatgttgggctgaaattcgatttctaacctcttgaccaacaaaacaatcttccatttgaataaactacacgtttttggttcacttgaaaagtttttatcatcgatacgtcaatttatctacatttatcttacgtatgtttggtaaatggtaattgaatatgaacattaaaaaaaaaaaaatcaaacattaaactatgagttacgtcgttaatatgtaattgcttaccaattttttttttgttaaatttaagtcattagagaatacttaagatatactttacgtgtagggttggcggcttgcatgcttcgtgcattagttttagcaatcaaaaagagatctataatgagtatttttgtatgtttgaatgtaagaactaaggaaaaaaaagcgtgtatctatgttttccgtcaaaggccgaatatatatcccgatatagtaatgggccgaaacccaaaactaaaggcacatactaacaaaactacttctatagaaaattatagatgcactcaacacttttgtctatatactattcccaatagtttgttttttatcactaatggtagtagacatgttgatttgcacattgcagctacaaaactacaaaaaaaaaaacgagccatatggatgcttgtcagattgttactgtcacatgaagaaaaccaaagtcttatcttttatttttatacatccaagtagaacacgacacgattggtaaacgaaacctatatagtcaaaaaactcaaaatcaacggattttgtttactgtttgaattatgttcttgttagttagatttattcttttgtatgcatatgtaacaattttgtgtagggaagaaattatagtcataataactcattaactaaaaataaaatatggtctaatgattagactctaatccgaacaataacaaacaattattttcgtttagtgtctctcttattttatccaagaaaaaagaagtgtcaatttataatatcttctggaaagcagccgacagaaaattgtgggctcacatgaaaaaaatttcaatgatgcgtcaaaaagcaaccaaacgactccaaaataaaatcaaatcaaaaatcaaattctctacacgcaactttctttcaaatacaaaaccaatcatctcgattcatccaacccgcgaagacccagaaaccaaaatcgaagacccaacaaaacccacaagtcgaaatctcgaaatccgttgagagtttgttcctttttttgtttgctcggag

SEQ ID NO: 13836 - DNA, 3000 bp, Unknown
  misc_feature (1)..( 3000): cDNA_ID_3032197_gDNA_ID_2214656_Annot_ID_188771 3000 nt of promoter + ATG
aaagatgaaaaacaaaacagtcttcgtggaaacaacacttgaactttttcttcagggtttaggatcttctgagcgtgtccagtccacgatcgactcgtctccagcttctgcattacaatcaaaaggtttctagttatatacaaatgaatgtgatgatcactccggttttaccatgattgattagtaatgtaccttttccaggaacgattatgacaggagcagatttgcaattgtggaaacaatactcgcttacgctcccctgtagcacgctgcacaagtatccaaaagagaatcatcgacttaggaaaggcaaaagagaagaaaaacaagacatagatcacacaactagtagttgtttttgtattataagttataaccaaccttcttactaagctcctgcctcgtgtgcctacaatcacagcagcaggcttcactttctctgcttccttgcagattactttaccagcatcgccttcaacaacacgagccacactctttacctaaacataacaaaatcagtatcaagttatgtcatcgaattcaaagaatatatctataaagtgtgtaccaaactcatttttctgattattctcatctaaaatcatcacaatattgatttccaagaatacatacaccagaggttttgtctctacgcagttggtagcaaatgcgacaaatgaatagactagaactagtgtttggattcaagagaagaactaagcaacgatctcaattctaagaactagtagttgttaggaaatgctactaatgaaacatctgattgaattggattctcagaccctaacttagcaatcaagaaacaacattatcaggcaaaccaaaaagagataatacaatataaaggttaccatggcaacttgatacgcctcaacagcaagtttctccatgagggcttggctcgtctcatacacaacatcgttcttaacacctgcgaagaaaatcaaaaaccagctttagaatctccgattccagatctggaaatgcaaatgaacacgaaatcggactatatactattcacattgaagagagaacgaacttgagacggcgtggacaagatggagagtatcggcgagacgacagaaatgaacaagagcccaatcaaaagcgtgtttgctattgggaccatgatcaacggctacgataacatctcttcctcttctcctctctccgctctctctctcaagttccggctccggcactaccggaatcaaagacggcaacactacttccctgaaactgtactcttcatcctccggcaaagcctccatctccgagcaaacaaaaaaaggaacaaactctcaacggatttcgagatttcgacttgtgggttttgttgggtcttcgattttggtttctgggtcttcgcgggttggatgaatcgagatgattggttttgtatttgaaagaaagttgcgtgtagagaatttgatttttgatttgattttattttggagtcgtttggttgctttttgacgcatcattgaaatttttttcatgtgagcccacaattttctgtcggctgctttccagaagatattataaattgacacttcttttttcttggataaaataagagagacactaaacgaaaataattgtttgttattgttcggattagagtctaatcattagaccatattttatttttagttaatgagttattatgactataatttcttccctacacaaaattgttacatatgcatacaaaagaataaatctaactaacaagaacataattcaaacagtaaacaaaatccgttgattttgagttttttgactatataggtttcgtttaccaatcgtgtcgtgttctacttggatgtataaaaataaaagataagactttggttttcttcatgtgacagtaacaatctgacaagcatccatatggctcgtttttttttttgtagttttgtagctgcaatgtgcaaatcaacatgtctactaccattagtgataaaaaacaaactattgggaatagtatatagacaaaagtgttgagtgcatctataattttctatagaagtagttttgttagtatgtgcctttagttttgggtttcggcccattactatatcgggatatatattcggcctttgacggaaaacatagatacacgcttttttttccttagttcttacattcaaacatacaaaaatactcattatagatctctttttgattgctaaaactaatgcacgaagcatgcaagccgccaaccctacacgtaaagtatatcttaagtattctctaatgacttaaatttaacaaaaaaaaaattggtaagcaattacatattaacgacgtaactcatagtttaatgtttgatttttttttttttaatgttcatattcaattaccatttaccaaacatacgtaagataaatgtagataaattgacgtatcgatgataaaaacttttcaagtgaaccaaaaacgtgtagtttattcaaatggaagattgttttgttggtcaagaggttagaaatcgaatttcagcccaacattattaaaaactggtttggttctgtttaattaggtcattgtagacgttgacacgttgtagtcttgtaggatgacaataaaatcctttttatacaagttttggagagtagtctaggttatgtaccatggttaaatatacaaatatatattcttgtgtgtatagaacttgtgtcttagagtttaaagtttgaatctgatatagaaaaaatctcttgtcaacgaaatgcaatctttcaacttcgatcataagaattcgaccgctggccaatcccaccacgtcatcttgatttttagtcaaccattggtatgtatataaaacaatctcctttatgtgcaaaccaaacttttcaaaattctaattttcacactcttgcttcactaattgaattcaatagttttcattttttatttctatcttgtatttgttttttttgtcctctgcacaatcgccaagacgtgaaacctcacatg

SEQ ID NO: 13837 - DNA, 3000 bp, Unknown; identical to SEQ ID NO: 13832
  misc_feature (1)..( 3000): cDNA_ID_3032205_gDNA_ID_2214656_Annot_ID_188765 3000 nt of promoter + ATG

SEQ ID NO: 13838 - DNA, 3000 bp, Unknown
  misc_feature (1)..( 3000): cDNA_ID_3032197_gDNA_ID_2214656_Annot_ID_136496 3000 nt of promoter + ATG
aacagtcttcgtggaaacaacacttgaactttttcttcagggtttaggatcttctgagcgtgtccagtccacgatcgactcgtctccagcttctgcattacaatcaaaaggtttctagttatatacaaatgaatgtgatgatcactccggttttaccatgattgattagtaatgtaccttttccaggaacgattatgacaggagcagatttgcaattgtggaaacaatactcgcttacgctcccctgtagcacgctgcacaagtatccaaaagagaatcatcgacttaggaaaggcaaaagagaagaaaaacaagacatagatcacacaactagtagttgtttttgtattataagttataaccaaccttcttactaagctcctgcctcgtgtgcctacaatcacagcagcaggcttcactttctctgcttccttgcagattactttaccagcatcgccttcaacaacacgagccacactctttacctaaacataacaaaatcagtatcaagttatgtcatcgaattcaaagaatatatctataaagtgtgtaccaaactcatttttctgattattctcatctaaaatcatcacaatattgatttccaagaatacatacaccagaggttttgtctctacgcagttggtagcaaatgcgacaaatgaatagactagaactagtgtttggattcaagagaagaactaagcaacgatctcaattctaagaactagtagttgttaggaaatgctactaatgaaacatctgattgaattggattctcagaccctaacttagcaatcaagaaacaacattatcaggcaaaccaaaaagagataatacaatataaaggttaccatggcaacttgatacgcctcaacagcaagtttctccatgagggcttggctcgtctcatacacaacatcgttcttaacacctgcgaagaaaatcaaaaaccagctttagaatctccgattccagatctggaaatgcaaatgaacacgaaatcggactatatactattcacattgaagagagaacgaacttgagacggcgtggacaagatggagagtatcggcgagacgacagaaatgaacaagagcccaatcaaaagcgtgtttgctattgggaccatgatcaacggctacgataacatctcttcctcttctcctctctccgctctctctctcaagttccggctccggcactaccggaatcaaagacggcaacactacttccctgaaactgtactcttcatcctccggcaaagcctccatctccgagcaaacaaaaaaaggaacaaactctcaacggatttcgagatttcgacttgtgggttttgttgggtcttcgattttggtttctgggtcttcgcgggttggatgaatcgagatgattggttttgtatttgaaagaaagttgcgtgtagagaatttgatttttgatttgattttattttggagtcgtttggttgctttttgacgcatcattgaaatttttttcatgtgagcccacaattttctgtcggctgctttccagaagatattataaattgacacttcttttttcttggataaaataagagagacactaaacgaaaataattgtttgttattgttcggattagagtctaatcattagaccatattttatttttagttaatgagttattatgactataatttcttccctacacaaaattgttacatatgcatacaaaagaataaatctaactaacaagaacataattcaaacagtaaacaaaatccgttgattttgagttttttgactatataggtttcgtttaccaatcgtgtcgtgttctacttggatgtataaaaataaaagataagactttggttttcttcatgtgacagtaacaatctgacaagcatccatatggctcgtttttttttttgtagttttgtagctgcaatgtgcaaatcaacatgtctactaccattagtgataaaaaacaaactattgggaatagtatatagacaaaagtgttgagtgcatctataattttctatagaagtagttttgttagtatgtgcctttagttttgggtttcggcccattactatatcgggatatatattcggcctttgacggaaaacatagatacacgcttttttttccttagttcttacattcaaacatacaaaaatactcattatagatctctttttgattgctaaaactaatgcacgaagcatgcaagccgccaaccctacacgtaaagtatatcttaagtattctctaatgacttaaatttaacaaaaaaaaaattggtaagcaattacatattaacgacgtaactcatagtttaatgtttgatttttttttttttaatgttcatattcaattaccatttaccaaacatacgtaagataaatgtagataaattgacgtatcgatgataaaaacttttcaagtgaaccaaaaacgtgtagtttattcaaatggaagattgttttgttggtcaagaggttagaaatcgaatttcagcccaacattattaaaaactggtttggttctgtttaattaggtcattgtagacgttgacacgttgtagtcttgtaggatgacaataaaatcctttttatacaagttttggagagtagtctaggttatgtaccatggttaaatatacaaatatatattcttgtgtgtatagaacttgtgtcttagagtttaaagtttgaatctgatatagaaaaaatctcttgtcaacgaaatgcaatctttcaacttcgatcataagaattcgaccgctggccaatcccaccacgtcatcttgatttttagtcaaccattggtatgtatataaaacaatctcctttatgtgcaaaccaaacttttcaaaattctaattttcacactcttgcttcactaattgaattcaatagttttcattttttatttctatcttgtatttgttttttttgtcctctgcacaatcgccaagacgtgaaacctcacatgggttatgccaagatg

SEQ ID NO: 13839 - DNA, 3000 bp, Unknown
  misc_feature (1)..( 3000): cDNA_ID_2704281_gDNA_ID_2214656_Annot_ID_136498 3000 nt of promoter + ATG
ctatacacacaagaatatatatttgtatatttaaccatggtacataacctagactactctccaaaacttgtataaaaaggattttattgtcatcctacaagactacaacgtgtcaacgtctacaatgacctaattaaacagaaccaaaccagtttttaataatgttgggctgaaattcgatttctaacctcttgaccaacaaaacaatcttccatttgaataaactacacgtttttggttcacttgaaaagtttttatcatcgatacgtcaatttatctacatttatcttacgtatgtttggtaaatggtaattgaatatgaacattaaaaaaaaaaaaatcaaacattaaactatgagttacgtcgttaatatgtaattgcttaccaattttttttttgttaaatttaagtcattagagaatacttaagatatactttacgtgtagggttggcggcttgcatgcttcgtgcattagttttagcaatcaaaaagagatctataatgagtatttttgtatgtttgaatgtaagaactaaggaaaaaaaagcgtgtatctatgttttccgtcaaaggccgaatatatatcccgatatagtaatgggccgaaacccaaaactaaaggcacatactaacaaaactacttctatagaaaattatagatgcactcaacacttttgtctatatactattcccaatagtttgttttttatcactaatggtagtagacatgttgatttgcacattgcagctacaaaactacaaaaaaaaaaacgagccatatggatgcttgtcagattgttactgtcacatgaagaaaaccaaagtcttatcttttatttttatacatccaagtagaacacgacacgattggtaaacgaaacctatatagtcaaaaaactcaaaatcaacggattttgtttactgtttgaattatgttcttgttagttagatttattcttttgtatgcatatgtaacaattttgtgtagggaagaaattatagtcataataactcattaactaaaaataaaatatggtctaatgattagactctaatccgaacaataacaaacaattattttcgtttagtgtctctcttattttatccaagaaaaaagaagtgtcaatttataatatcttctggaaagcagccgacagaaaattgtgggctcacatgaaaaaaatttcaatgatgcgtcaaaaagcaaccaaacgactccaaaataaaatcaaatcaaaaatcaaattctctacacgcaactttctttcaaatacaaaaccaatcatctcgattcatccaacccgcgaagacccagaaaccaaaatcgaagacccaacaaaacccacaagtcgaaatctcgaaatccgttgagagtttgttcctttttttgtttgctcggagatggaggctttgccggaggatgaagagtacagtttcagggaagtagtgttgccgtctttgattccggtagtgccggagccggaacttgagagagagagcggagagaggagaagaggaagagatgttatcgtagccgttgatcatggtcccaatagcaaacacgcttttgattgggctcttgttcatttctgtcgtctcgccgatactctccatcttgtccacgccgtctcaagttcgttctctcttcaatgtgaatagtatatagtccgatttcgtgttcatttgcatttccagatctggaatcggagattctaaagctggtttttgattttcttcgcaggtgttaagaacgatgttgtgtatgagacgagccaagccctcatggagaaacttgctgttgaggcgtatcaagttgccatggtaacctttatattgtattatctctttttggtttgcctgataatgttgtttcttgattgctaagttagggtctgagaatccaattcaatcagatgtttcattagtagcatttcctaacaactactagttcttagaattgagatcgttgcttagttcttctcttgaatccaaacactagttctagtctattcatttgtcgcatttgctaccaactgcgtagagacaaaacctctggtgtatgtattcttggaaatcaatattgtgatgattttagatgagaataatcagaaaaatgagtttggtacacactttatagatatattctttgaattcgatgacataacttgatactgattttgttatgtttaggtaaagagtgtggctcgtgttgttgaaggcgatgctggtaaagtaatctgcaaggaagcagagaaagtgaagcctgctgctgtgattgtaggcacacgaggcaggagcttagtaagaaggttggttataacttataatacaaaaacaactactagttgtgtgatctatgtcttgtttttcttctcttttgcctttcctaagtcgatgattctcttttggatacttgtgcagcgtgctacaggggagcgtaagcgagtattgtttccacaattgcaaatctgctcctgtcataatcgttcctggaaaaggtacattactaatcaatcatggtaaaaccggagtgatcatcacattcatttgtatataactagaaaccttttgattgtaatgcagaagctggagacgagtcgatcgtggactggacacgctcagaagatcctaaaccctgaagaaaaagttcaagtgttgtttccacgaagactgttttgtttttcatctttctgtcgctactgttgcagtctttgtttctgtatgtccctaaaaatcttagattgcttcttcttcgtctctctgtgtgtgtatgtgttttgatttgggtttttgtagtttcaaaatttctgtataaaacctttgctcaggaatgaatgtattgtatgcaatggtgtgatgtgtttcagacttttcagtaaacaagcctatagcagacactatttcttttacgcagttgatcgaacacttggtgtgcgtcttggtgaaatatagaaagattacagatttgtttgttgtttactagagaggttagtcaacc

SEQ ID NO: 13840 - DNA, 3000 bp, Unknown; identical to SEQ ID NO: 13834
  misc_feature (1)..( 3000): cDNA_ID_2704289_gDNA_ID_2214656_Annot_ID_136500 3000 nt of promoter + ATG

SEQ ID NO: 13841 - DNA, 3000 bp, Unknown
  misc_feature (1)..( 3000): cDNA_ID_3100736_gDNA_ID_2214656_Annot_ID_136501 3000 nt of promoter + ATG
tgtaatatatatccttcacctgcaagtttcattaaaacctaactaagtcttgaaactagagacaatttataaacatctgaattcatcaacaacagtacttaaagaagcataccctgcatgaaaccatcccatatgtatcatatcaaaccgtaacagttccacaaatgtcaacagaagtcgtctttgctggtgtaagcacaaccgccactgattcgaccttcccccaaaatgtaccatcttcctttctttcccaagcaatctctatgcaccaaatctctcttttcctacagtcataccgcctaagccggtgcacatcagcgctcaaaatcaccaacttcccgccaaaattagccattttatatccatccacaaagagaccattagctggaaaaccttgtaaaccttgcaagtaaaaccaagtcttcttctctggatcatatatttttattggccatccaaggaaatacactgatgtattgatgcaaaacagcaaattatcaaccacacaagacgaatcattccaagaagcactcaacggtccatgagtccaagactcccatttactttccttaggatcataaatatgaatattgcgagtaagatccaaacagtaaatcttctccttcatcaccgcatatgtcagaaactctcctcttccaaacgcttcagggtacggacctggcacagaactccaactctgtttctttaaatcgaacacttcaacccaatcagatgttcgtaccttacgacctccgatcacataaatctttccgtcaattacacccgcggctgcgcgacagcgagccatcttcatactcgggagggagcgatactcgtgaaatctgcagtttatgtgagtcacatccgagatgcgtcgttcgcctgcgtgtccacctcttatggatgtctcgccgcggcgtccaccgcttatgggtttattatagcctacgcctacatcttctaaaagtttctcgccgacgcgtccaccaatgacatagatatccgatccgatagtgacgacagtagatccccaaggcatgggagggagggaatcgattttgcacaatttcaacgaaatcgtgttaggcaagtttcgatagggtttacgatggagaatgtaccagctagggttttcaacaggagggaatccaacgtaggcgtaaagaacgttttcggtgtagccgagacgcaagcgatcatcgtagagcttcgacatgagactatggaaggatctgcagacgagggaaagcgacgggtggtgacatctccgaacgagtaggaagcaacgtaagatgagttcttctggaattggtagcgacacctgaaccttttctttcaatttcttgtttcgatcctcttcttttttaggtttcttgatttgatgatcgccgccagtagagccgtcgtcggaagtttcagagattaaaaccatcaccgtgtgagttggtagcgaattaacggaaagtctaagtcaagattttttaaaaagaaatttatgtgtgaaaagaagccgttgtgtatatttatataatttagaaaatgtttcatcattttaattaaaaaattaataatttgtagaagaaagaagcattttttatacataaatcatttaccttctttactgtgtttttcttcacttacttcatttttacttttttacaaaaaagtgaaaagtaaattacgtaattggtaacataaattcactttaaatttgcatatgttttgttttcttcggaaactatatcgaaaagcaaacggaaagaacttcacaaaaaaccctagctaactaaagacgcatgtgttcttcttattcttcatatatcctctgtttcttgtgttctgttttgagtcttacattttcaatatctgactctgattactatatctaaaagggaacatgaagaacttgagaccatgttaaactgtacaatgccttcaaacatggctaactaaagatacattagatggctttacagtgtgtaatgcttattatctttaggttttttaaatcccttgtattaagttatttaccaaattatgttcttgtactgcttattggcttggttgttgtgtgctttgtaaacaacacctttggctttatttcatcctttgtaaacctactggtctttgttcagctcctcttggaagtgagtttgtatgcctggaacgggttttaatggagtgtttatcgacaaaaaaaaaatgtagcttttgaaatcacagagagtagttttatattcaaattacatgcatgcaactaagtagcaacaaagttgatatggccgagttggtctaaggcgccagattaaggttctggtccgaaagggcgtgggttcaaatcccactgtcaacattctctttttctcaaattaatatttttctgcctcaatggttcaggcccaattatactagactactatcgcgactaaaatagggactagccgaattgatccggcccagtatcagttgtgtatcaccacgttatttcaaatttcaaactaagggataaagatgtcatttgacatatgagatatttttttgctccactgagatatttttctttgtcccaagataaaatatcttttctcgcatcgtcgtctttccatttgcgcattaaaccaaaaagtgtcacgtgatatgtccccaaccactacgaattttaactacagatttaaccatggttaaaccagaattcacgtaaaccgactctaaacctagaaaatatctaaaccttggttaatatctcagcccccttataaataacgagacttcgtctacatcgttctacacatctcactgctcactactctcactgtaatcccttagatcttcttttcaaatttcaatggcgtccggtgatgttgagtatcggtgcttcgttggaggtctagcatgggccactgatgacagagctcttgagactgccttcgctcaatacggcgacgttattgattccaaggtctgttacacgccgagatcggactccgagtgatatcgatg

SEQ ID NO: 13842 - DNA, 2962 bp, Unknown; identical to SEQ ID NO: 13833
  misc_feature (1)..( 2962): cDNA_ID_2714092_gDNA_ID_2214656_Annot_ID_136502 3000 nt of promoter + ATG

SEQ ID NO: 13843 - DNA, 3000 bp, Unknown
  misc_feature (1)..( 3000): cDNA_ID_3032281_gDNA_ID_2214657_Annot_ID_188799 3000 nt of promoter + ATG
cttggtgatctttccccttctctgacaagggtcctattgtgaccagagtatcccgaaacattgtaggccaccaaaagcctgcttgaagaactttggatactgttttgaaagttgcaaaatgaccaccatagctagagctgtgacaatacgatagtatatcagggacctctgttgcagcaatgcatctcctgtaaattccatcagaacaatgcttatatagataaggctcatcccaatgatatcgcctaatctctcgtaggaatctattcttgttgtaatctgtaaaattatcaggctgcacatctgcagctaggtaattaacaatgtcagcataccatgggtaatctttctcgaccgttgtgacggtgcaattctcggttggtgaccaatttcttgtcgatttagaagggtgtcgatcgacaggtgcaagggtgtcgatcgacaccatcgcgcaactacaaatatcaacttcctctgaaatatgagtgtcgatcgtcataatgggtgtgtcgttcgacactgaagcacgatcctgcaacctgtcacgtttgtagtcatcgtcttcagctgtatcaatcatgtatatgttctcttcaggcaagaaatcatttatagggacatcatcatcgatcctaatgcgtgacaaatgatcagatacaccattctcaactcttttcttatctctaacttctatgtcaaattcttgaagaagcaaaatccatctcaaaagtcttggcttagcatccttgttttgcatcaaatacttcaaggcagcatgatctgtgtgaacaataaccttggatccaacgagataagatctgaatttttcgaaagcaaacaccacagctaacaactctttctctgtagttgtataattcctttgagcatcatcaagagttctactttcatagtagattgcatgaagtttcttatccttcctctgtcctagaatagctccaactgcaaaatcacttgcatcacacattacctcaaaaggtaaatcccaatctggtggctgaacaattggtgtgttgatcaaggcctgttttatctgctgaaatgcatcatgacacttctgtgtaaactcgaatttgacttctttacagagtaaagcagtcaatggtcttgcgattctgctgaagtctttgatgaatctcctataaaaaccagcatgtccaaggaaattcctcactgctttgacattatccagcgcttgaagactcgtcatgacctcaatcttagctctatcaacttctataccatgctcagaaatcatgtgtcctagaactattccatcctgtaccatgaagtgacatttctcccaaatcaaaactagatgtttctcctcacatcttgctaacactttgcagagattctctaaacaatcctcaaatgatgatccataaactgaaaagtcatccatgaaaacctccatgatatcctcgatcatatctgtgaagatagacatcattcctctctgaaatgtcgcaggagcattacaaagaccgaagggcattctccgataaacaaatgtaccataggggcaggtgaaagtcgttttctcctggtcatctggatgaatcgggatttgaaagaatccggagtatccatcaaggaagcaatagtacttatgatttgctaacctctccaacatctgaccaataaatggtaaggcgaaatggtctttcctggtagcagcattcagctttctgtaatcaatgcacatccgatgtcatgtgattgtccgagtaggaattagctcgtctttctcattcttgactactgtgacacctccctttttagaaaccacatgaactggactaacccaactcctatctgagattggatagataatccctgcttccaacagtttcataatctctttcgtgaccatttctttcagattcggattcaaccttctcttatgttcgactgaagacttagactcatcctcaaggtgaatcctatgcatgcatacatcttgggatatacctgcaatgtcatcaagagagtagccaagagctttgcaatgattgcgcagcttgcttaggaataaggtgagctctgcgggattaagagaaacattcacaataacaagataagtagaattttcactaagaaaagcgtaccttagccctgctggaagtggtttcaattcgattttaggagctttggctggatcccaatctgaagtaggagtcggcgttgaagtcaaagatggaagagcttcttcaactgtaagttgcatcacatgttcggtctcatctagcagcttagtatatgttgaagtttcacagtccaaatctgcactatcctctatggaagagaccaaaactcgcactagtggtttttttaattccatctctcaaatactatctgaaactgaggaggtgaaaggatctgttaagaaggttttcccttctatgatcggtttcttgaccaaagtgttcatatcgaattgcatagttagatcaccaacattcagccctatgctcccttgtcgaacatctatgattgctccagctgtgtgcaacaaggatctccctaggattaatggatccttagagcaggtccattgggagggccttaacagatccttaaccaaaatctttgagtaattttgagaaaaaataaataaaaattttgattaaatgttaggatcgcacctaattttaggatttttgatgatgttaaggatcggatacgtggcatgttttcattggttgagcttttttgacaaaacaagtttttttcttctttgcctttttttttcatttatcgatttctctctctctcttgaactcggctgtgcaattgaacgattgattatcgccggaagatcttcatgcttttatatgatcaaatcggaagagattatcgcccggaagtcgtctctaatccactgtgctcatcatctcaaccgacggtgctcaacgtcgacgagtttggtgaacctaatcggagaggattgtgaatcatatcggagtcttgtttgaaacc

SEQ ID NO: 13844 - DNA, 3000 bp, Unknown
  misc_feature (1)..( 3000): cDNA_ID_3032229_gDNA_ID_2214657_Annot_ID_188813 3000 nt of promoter + ATG
ttcgtgtttacagtgtcttatgttaacttcgagccaagagacttcagactgagttactccatcatcttagcgtgtttatgctacaaagttgacaaactcggaacaatcatccagttccaaaaagctttgtgttcagccgttggatttggagaaatctgaacctgagtttaatgatgaactcgctattaaggaggtaaagaatgcagagataactgagatggttgaaggtgctggaattacagataaagggaagggtgtgataagcaagttttttaggcctacttatgttaaacgtgtgtgaggttcagttcaattcccctacaaacactaacatgtcgatgcagctatagggggtgtcaatccagtccactgttattgctagcaatcaagacgtgtacagaagcaactaagtcaagccagattataatgatagtgggtttctagtaacaatcctaggtcaggattcaaacaagtaaaaatgagaacttaagagccctactcgatcattgggttgagtagaaccaacaggcagaactaaaatgcaatcaacacgggatacaaataacaggtagataaaagtgcaatcaacaggggatacaaataaatctaatagaagtcctaaggatggattcattgataagggcaactctaggattcatcagatggctaataggcgaaaggtagataccattgacgatagattcaaaaaccgggtcaatccactatcgtgacagagacccccataactctaccacttcctaatctcaactgtcgttgatgaaacatagcagagtagagtttaagaaacaatctaccaaagccaataagcagacaagccaatgtcttggtcgagtatacatatctttggaattcgtagatcagacatccatttgaatgtcttttggacgttggacgtctatgatcgaatctccacattagccagcgaaaactgcataggggccaagcgaatccagaagggttctaacctaatctctaaccacctaactaacctagagattaccctaatctaatccatcctcaagaaccctaatcactactcaagcaacattctcaagaacacaaacccagaaattactaaaatcataccaaaatgtagatctaaacaagctaaacaactctactcaaagaaataaatgcagaaacgaaataaattaagagtaattaagattttaagattcataaacacaaagaaaaactaaaggataaaagatggatcctttggacaaacccctaagtgatctatttatagtaaaatgttgaaaccctagattcactagaagacaagagacttgagccggtttgggcgaatactcgatcttggggatcgagtaaagagggtgctgcaaagtctgcgcctttgtgtctatgctccaagtgatcaattggttgagtagatgcttcttcctctcctatatgtatgctcagatgtctggttgagtggggaatgaggaggatccgaagacgtttttatagctcaacatgttttgtagagttggtcacccttggtcgagtaaatggatcgagtaggaggggcgagtagatcaatctgctgcttcatctgaggctgccttgatcgagtaagagggtcgagtaaactgcagcctcctctgttgcatcctagatcgagtaaagaggtcgagtagaatgatacctcttctgtagctgcctagatcgagtgaagtccttttcagctccttctgcacctgaaaacacaccaaaacatgcaatgcgaatggaggatgatcctagatgcctaagtatgcaaaataagctaaaattgtgcaaaatgatatgctacaatgagcaaatgcacagctgaatgatgataaacatacacctaaaatgagtaaaatacagtgttatcagggtgtgaaatgacacgagacacctcaggtggtagtcaagaaggctccaaataaggtggttactaagcctatacatgttttcaagttgtcttgatccatgactcatgtttttgttggttttagaagttattgctttggttttggtttccaaacaattgtttaagtttattactttttgttctaagatggatttgtttctttatacgttgatattaatatgtttctgtttacttttcttggttttgattattatctaatttataaggttatgcctataatcaagctaatgttagtaaccattagctaatgaaggttatgcctataattaaactaatgtatataaaagttttaacttatgcatgattaatcaatcttatagtaaattaagtatgaatattcatggaaagaggatatttaccttatgctcatagtgaacttcaaatatttgaattcctgaaaacaaatgtaaatagttagtatacacgcagtaataatttgtatagtttttacaaaataatgattgtaatctgaagtcgaaagatatgtaatatatgcaatcattagcacaaagaaagtttctattttttgattggatcaaggatcggttattcataatctcgatattatcattttatttacagtgtttatattatatggaattaggaaatatacataactcaatcgttccgactttcctatcctttcactgtctatatatatgagatacctttggttaaaaaataaaactctctcctctctttagtttctctgtaaccagttttctaaaaaactaaacctaatgggtaccattgactatatccgtgattttaatctcgagaggaccaactgggtcctctacttgaagatcttaagcctctgaaaccatcaggctgtcaacaatggtgaaccgacaaccatgattctctgtgatgagaatgtgagttcataattcaactacttgtgaagttttcattttttttgtttctgaatcctgttcataatctaaagtatgtttgtttatgctgttcagggatgcataattgatgctagagtaccttctcgaaattatttgtataattttagatctaccctacgtgagggaacgtagtattac

SEQ ID NO: 13845 - DNA, 3000 bp, Unknown
  misc_feature (1)..( 3000): cDNA_ID_3032261_gDNA_ID_2214657_Annot_ID_188804 3000 nt of promoter + ATG
ttctacctcctcaaaaccaatgtcctgttgctcctgatgttgacatgaaacaaacgctacaatagctgcttcacgggcaagcctttggctccatggagatggcaaagaagatatctaagttacataacaagctggactgtagctacaatgatctgaatgtcaaggtggaaacactgaataccaaagtcagataattagaaggacattctgtatcttcatctgctccaaaatatataagccaacttccaggcaaagcaatttagaatccaaaagaatatgctcatgctatcactttgcgtagtggaaaagaacttccaacaagagaggaaccaaaaacagtcactgaggacagtgaaggtcaagatggggaggatttcagtgtcggtaaagatcgagctgaaaaactactcgggcagccactcgaccagacactcgagcaacctctcgagcaaccactcgactttgcttcacgacctatcttcccagcagcatcaccatccgctccaaaaccagttgttgtcaagaacaaagaaaaggtctttgttcctcctcaatacaaaccacaacttccatttcctggccatcacaagaaagcattagcagataagtatagagctatgttcgccaagaacatcaaggaagttgagttgcagatacctcttgttgacgctccagcgctaataccagactctcacaggtttctgaaagacttgatcgtggagagaattcaagaagtgcaagggatggtggtattgagtcataaatgcagtgctatcatacagaagaagatcattcctaagaagcttagtgatcctggttcattcagtctaccatgctttttaggtccattggctttcaacagattcctatgtgatttaggagcatcagtcagtctcatgccgctctctgtcgccagaagattggggtttactcaatacaaatcttgcaatatatccctcatcctagctgacaggtcagtaaggatccctcatggtttgcttgaaaatctaccaatcaagattggagctgtggagataccaactgactttgtagtcctggagatggatgaagaacccaaagaccctttgattctagggagacctttcttagcaactgcagaagctatgattgatgtcaagaaagggaagattgatctaaaccatggcaaagactttaggatgacctttgatgtcaaagacgcgatgaagaagcctaccatagaagggctactcttttggatcaaagaaatggatcagttagctgatgagttactggaagagcttgcagaagaagatcatctctgatatgtctataatttgcatgatttaggcattcattcttcaccactttgtcattgtttcatccacatttcatctcattagatgtcgttttagtgtgttttacatagttaggacgattttgcattaggattgcatgtgcatggcatatttggttgttttcaggtactttggatgcttttggagttcaaacagaggaaaaacagaacatgaagtcagaatgcccaatgacgccttcagcaaaagactctatcgcagcctcggagccctgccagggtagaagcaagtagctcagtttcactcaatcgcgaagccggaggaatcaccccatcagaactactcgatcaccactcgaccaccaagaaacctatgtgctcgttctgcactcaaccagacaagttgagaacaaagaagagaagagaagccgaagaaaccactcgatcaccacctcctgacatccactcgatcgcactcgatcacagggtcactggaccattgaatctcgacttcactgcatctcactcgatcgcaagacgaagcccctaaagcccagtttgatcaatgacatactcgatcactgggaagctcatttcagcccgtcagatgccaatgacacattcagtcgaggggtcatgacgtgaagattcgcttaatatttagtttccttatttgtttcgtttctcgcttatataaactgcctcttagggttttccctagggcatccgtttttatctcgcttttatattttcgcaactttcatagccgcagtgtttctcctgcaactttgtattttcactttcaagtatttgattttcagttttcgtctagtctttcatcatatctattatcatgtttttaatcgttgctttgctattgtctttgattatgtctgagtagtgaactgtatttctgaggatgggatagattagttgtggtttacttcgtcgttttaggtggttgagtttagaatactagaatcccttctggattagttgcgcttattgcttgtttcattggctaatgtggaatatgagtccagacgtccagcgctcagaaggcgtttaatgggcgttggatcatattaattccagagatatctgactctaccccaagggattgactgtagagagggtattggctttaacatgttgattcgataatgcctgcttagttagagatcgctaaagggatttaggtcagtgtctagctttgcttgaggatttctatcacgggagtgaattaatctgttgttgaacttgttgtctagggatagcttctgtgaagttttgtcaaccgcttgaatagattaaggagaccacactattcgattaccccatccttaggaatcgtttatccatttgattgccagttatcatttctgctttgttattcacctgcctgctattgccatttctagtcttagtttcatttcatttctgttattgcatactaggactgttagaaccaaccaactctctgcttggcttgacttaaagctttctgatcatatctcatctgtttgcatcacaccggattggattgacatcctaaaatactacaacgacaggatagtgttttaggattaattgagaaaaatcctactatcaatctcaacagtgctttaacaaaaagtggtgaagatgggtttctacatttggaaacattgggataccagaagctgttagactcccataaagcgatg

SEQ ID NO: 13846 - DNA, 3000 bp, Unknown
  misc_feature (1)..( 3000): cDNA_ID_3032265_gDNA_ID_2214657_Annot_ID_188803 3000 nt of promoter + ATG
taattaaaactgaaccatgcctagattgctctactctaccacactgtcatgatctgataccattccctatcaatttgaacctgaatttgatctttaattatcatgtcagcatcaaatttgaactcatggttaccctaaaatacttggattttcttattcattttgatcactcttgttaatccacgtagctgactctccttattagagcagttaacccgaacccaaacctagacattctttcaagccctatatcacttgtgagtgtttgtgaggtcttattccgattaagcttggtagaaagtgttaggttcgtaacgacagagatagtgtctcatgtagttctagtttgcattttttggactagatagaacttggtgggcacttatactttgggttggggtgtgtttaaaataaaaaaaatgggttgattcattgatgagaaaaggtaaaagactctaggtgaagtaagctaaagaagcagaaaaagtctagtaaaggttttgggatttttaaagaaaagaaagagtttttgttagctattgaagatgggaaaaagctctcggttttaaaatgttaaaaacaggaaccttagttgttaaagaaatccaaatccgctagatgtatcaaagtgttgagaaaccttctcctaaagttaagagaaaagaaaagaatgattagaaaaagggcttaaaagattcatgaatgcaaagggtagaattaagttcttatattaagattggagatgggattaccattagagcttcatcagatatactctgggtagatgggatcttatctttgtatgcatagcttgggacttacctttaacattctactaaagcttaatcattttttgagagatcccctgttattgaagcctattctgtatgggaccatctttgtctcttgaccttttacttagccaaatgagttccttgaggatgcattgctttattcacgttccagagctaatgaatgttaaagggattggtagatttgaaaacatgtgtcggtcgagcatatgagtcggattaattgataataaggcatggctaacgtttttgagtagaattcgatcatatcgcagcttagaactatcaacttcgacattgatttcatctggtttatttggtgttttggctctaagtccccgctttcaaacctcacctccaacttgttcttaattgtttgcttgtgggaaagcaaagactaagtttgaggagttgataagtgtgtattttgcatgttttgagcatcaatttgtcatcactttagcatcatatcatcacagttttatatcatttctcatcatttgttatcactttgcatgtttaggatagttttgcatgcatgttgcatatttgtgttgatttcaggtgatttggtgctgttgacgagctaactggaagaagcggacctgatcatgtcaaacccctcgactccctggtcgagtagatgcttcacgacttcaacagaccactcgacctcttggtcgagtagaagacctcagcacttcacgtcaccactcgaccccctggtcgagtacagccaagggagacactcgatcacatcactcgaccccctggtcgagtatcttcacctccaccacctgaccatcactcgatcacatcactctacctggtagttgagtatcaccatcaccaccactcgactacatactcgatggcaagcttcagagtcttctccattctgcactcaacaagacactcgagcacaaggaagaaaagaagactctagcttatcactcgaccactcactcaaccacttgggtcgagtacagttcttaattcgtcccaataatgcgttgttttgagtattagggtttcgggatattttgctataagtagcatgtactttacattttcgagaacaagtttttctaggttttattccgtagacactgtgttcttgaccttttgtaatccggatttctctttatctatttagtattcagtattcagtatttgttcttaacctgagtagtgaataggtttctgaggatgggttagagtagtttagaattctcattatgctaggtggttgagtttgattgatagatcccttctggattagttgttcttaatgcctattgctttccaatcaacttgaatttgagcccagacatttccgcgcccaaaaggtgttcgatgaaatgtctgaaccactaattccagagatttgttggcctgtaccaaggtattggttgcagagagcgttttggctttgacttattgattcgtaatgcctgttaggttagctctcttcaatggtcattgagtctgggactaggttaacttgagggtctctgtaacggtggcacttatatttggttaatgaacttgttgtctagggataatttattgagcatatcaatcacctataaactgaggaaacgaaactactcaattacctcatcctcgggaattctttatctgattgattttattgtttactctactgttgtttactacatcttgtcatctgttgcttagtttctataattctttcctgttactcgacctgatactcaaccacccagttgtctggtaaccgactgtgcagtcgagtgtctttatttcgcttactgcctgttactcgaccacacccaatgctctgcaacgagctgtgttggtcgagtgttttgctgtttctacttgattttctgttttctgcatgttcacttaggactgctagaacacaccaaaacctgttattgcttggcttgacttagtgacttctgatcacatcttgattgttcgcatcccacccatttggattgacaacctaaaatactacaacgacaacgataattgactaaaaaccctattatcaatttggcgccgttgccaattgggtgtatgtttgttacatttaagatttcagacttgcttagatcaagttctttttcaattttcatttcacttactaacagtgtgtttttttgttgtcttcttgatcaaggttcacctctgctatatg

SEQ ID NO: 13847 - DNA, 3000 bp, Unknown
  misc_feature (1)..( 3000): cDNA_ID_2702152_gDNA_ID_2214658_Annot_ID_136504 3000 nt of promoter + ATG
caggagcctaaaaataggaggataacaactcagtaatatgtgtcttgtgtggcaagaaattaaggattactatatcacaactaatttactcagcagaaatgtgacttgtgttgcaaggaattgaaaaagacagattctctaaggattaaagtcacaaagtcaagatgaatggcttacatggtttgaaacagaatggcttacatggcttggaggaattcgctttccagttagcagattcacaatgatatttagtaccaaatcaatgtcacacttttagggttcacgattcctacaataagaatatattatataacatcacattcagatatgaatagtatgaagagacaagcaagaactgattacctcttgttctttgacttcaacatatccattaagcaaataaaaacagttaagcatacttaattagatcattaagaaggcataagcttgaaaatgttgtttcgtataccttatcaaacagaaccgagtaagcacttaagttaccgtacgataaaacatgtattattccaataatccaatgcttctattcgattgtacgggaaattattatatgtatctttgaaaacgccttgtatgcaccaagataaggacataaaatttagttaaatcacaccgttttcattacaaaaatgtgatatcatcttatcatgggcatatatatatattttacaggtttttttttgctcacacaaaaattgttcatacaatcagtaattactttacctcagggtttggtctcctagcttttgtacccatcatactcaatcacgagatggtttgacatcacacgacttacgctatacataacgattaatgaacataatttagtttttctttcttttgtctcggatcgatcaatgatattgatcttatatgatatcaaaatcttatagtactggcagtgagattaaaaacactaattttaaacgacattattgttacatgtgtagataggacctgccgtattcagacgaataacaaatgacaaatctaagaaatagaggaagagagagagagagaaagagacgtcgtgcgcatttatagtataaagtataaacctttgattattattgatacgttatttatgatttacacgaggattcaactattttcaaagagtttgatgacctttggtttggtcatgtcattgtcccggacgcggctaatggggatcggactatggctccccaaatcattgagggccgttttgatcatttaactaagcgtctaagcccgacccgttggatatcaatgtacatattaatatattatatacacaaatattcaagtttaatcattaaatttggttgaatgatgaaacctaagatgaatgatttgtttcttctgttcgctttttttttttgggtttgtttttatatcgatttagataatgtgtaacattgggaagttcacaacctgtctagttagcacccaacttatgacagtaatttttgtcatgaaattaataaaatgacgacattttggaacataaatagcaatttcatgtgtaagaataaatattaccataattgtgtgaatcattatgcctttaatgcaattatttatatatcgatcatatatagattccatcctatatacaaaatgttttaaactttgagactcgagctgatgtcagaaagaatattcatataagagaaatcgaaaataaagtattaaaggtcaaactatattgatgaacgaacgaacctgttcaacacgaaagacatgtcttctctaagaaatgatcttgatccgattgatacagccaagttctaaccaatgaaacatccccgaataaaaaaacacaaagtaccgacgaagaaataaaacaaagtgtacgcatacgtaatcaccacaactgttatagtaataataataataatcttatacgaattaattatgattaggggcaacaaagaggaggtcagaataacaccaatcacacgattaaataagaacatttaaccatcaggctccaaaccaaaacttagaaacttgttttttttttttgtttccttctttgatctttctttcagaagaaaagattgatttaaatttgagaaaccaagcgactgtttgtttactttctttattattacagatttacaggtacagacaaagttgtatgtaagtgtgattagaacagtggatgctcttatcacgggtccacttgctctctaaaaagaatattgaagctcataattacatctttagagactaaaacaatcttaatcattcaccttcaccaagtacttgtgtccagaagaaaaagaaggaaaaaaagaacacaccattcaagaaagagagaagcttcttgtgataagaaatttcacaggttttgtttttgttttgtttatatatattctcagatttgattttgcttaccattatatgtatgaagaaatagagagaccaattactttttacattagacagagtaaaatccagtctgtgcatcttctcaatgttttttttttgtttgttggtgctttctctaagtgttcttgggtataggtcccaaagtgaagctttttctgtttctttgtgcaaacaaatcttgataaagttagtaacttttggtgaaaatcttaccctttcatggacaatcagatttgatttcgtttccatgtccataggtgagaattttgtaattgaaattgatggcactctactttgattgatggataccttcttaagtcaactcttcattgaaagcgaagctacttatatagattatatagcatctctatgatatgattcttctcttgtcttattcttgggtgggtctttgacaatgtttctgcaactttttcagattgggttttaacattccaaggagaggactttgtcttgtctctattcatcttcaagacccttatgagtttcggttcttgagtaaacaacagctaagcacagtctctgagaacttgaggatttggtagtatctgttggaggtataaaaacgaatctttagacatg

SEQ ID NO: 13848 - DNA, 3000 bp, Unknown
  misc_feature (1)..( 3000): cDNA_ID_1808445_gDNA_ID_2214658_Annot_ID_136508 3000 nt of promoter + ATG
tcctgagcttggtcatgtgctcaatgacccaagcatccttcgtcaaactctagaagcggcaagaaacccagagcttatgcgtgaaatgatgcggaatactgatagggctatgagtaatattgagtctatgcctgagggatttaacatgcttaggcgtatgtatgaaaatgtccaggaaccgttaatgaatgctaccactatgtccgggaatgctggaaacaatacaggctccaatccatttgctgctctgttgggaaaccagggggtcactacgcaaggaagtgatgcttctaataattcttcgacaccaaatgctggaacggggactattccgaatgcaaatccacttcctaatccttggggtgctacaggtggtaagtaactgcattttcatcttctaatctcctgtcgattttatttgtcttttgaaggatgcagtaatattttataaatgaaaaagtggcttgtttataagaaatggacgttactgttcactgctctgcttcaggaacaatattgtgtatagtaaattggtgagttagtgtagttaccacaatttgttgttatgtgtagtttttgcatatgattttcttggcttattgtttctaatttaacatttactcataatacactaaatataattgaacatattgtgggctacttgacaggtcagacaactgcccctggaaggacaaatgttggtggggatgcgaggagccctggacttggtggccttggtggtcttggaagccttggaggccttggtggactcggtatgcttggagcggattcacctcttggtgcgactccagatgcttctcaattgagccagttattgcaaaacccagccatatcgcagatgatgcaaagcgtattttccaatccacaatacatgaatcaggtaggcctagaatgatctgaacttaagagccttttaccattgtgaacatatattaattgttttcccttgattccagcttatgagtcttaacccacaactccgaagcatgctagattcgaatcctcagttgagggaaatgatgcagaacccagatttccttcgtcagtttagttctccggagatgatgcaggttagtttgtcccctattgtctgtatgcatatgaatttttaacatggtagtctctcaaaagaaacatttctttgtatctaagctattttcaagtaaagaagtttcttttcttttttttttttgggacaaagtaaagaagtttcttaaacctaatgttttctattgttttttggtcttcagcaaatgatgactctacagcaatcactatctcagaatagaaatacagccagccagtaagttttgttaaaacccttcgttgtttggatttgcttaaacaaagttgagcatttacatgtcctttacatattgttttttgggttgtttagtgtttagacaatgttgtaactagctaaaaagattggttgtgaacgatctctataataagaaaaggattgaaccatgactaatgcagcaactcttgtatgatttactgggctgatcactagtaacatctatcaaagaggctataaataaagcattttaatcgttggaatacacttgaatagggctcataacattttgtttgtttttgattatgccttttagcataagctatgtgtgttaatctccatattttgattttcatcaatccgcattcatgttcccaaatctatcttctctgtagggatgcggggcaaactggtgctgccacaggtactcttaaagatattatatgtatttattctacagtagtataaagggtttagttatgttacgtagtatagcagctactctttagttctctttgctttcatgtatgttttattttagcagatattgtatcgtatacaagttaatagtagaatgacaatactgatggggacaggaaataacggggggctggatttattgatgaatatgtttggcagtcttggtgctggcggcctgagtggcacgaaccaatccaatggttagagactacaaattttttttagcttacgcatctgttgtgatggttccactgaaacttgtctgtttgattccagttcctcctgaagagcggtacgctactcaattgcaacagttgcaggaaatgggattctatgacagagcagagaacattagggcgttgcttgcaaccaatggtaacgttaacgctgctgtagaacgactcttggggagtatcggacagtagcatacaggttcatgaactgatgtctctccatctggcttctcagttatagaataaacagcttgaatgtgtgtttttcagtaatgatatattcatcgaattcataaaaatttatatatgataggatcgtgaactttgttgatagaaaagccgcatcaatacggtatttgttatcagtggtcactcttcgtctttaactacccttaaacctatatatcttgggtgtttatctttgataacttatttcaagttgttacaacatacaacatctgtaaatgtttatagacatcaaagtgaaattgaacccattaaatttttggttccttctgatccggttcaaaggttaaaccaaattgcccaaagagagaagtggcatgttgcaaaggaatatccaattagttgattcatcatcttcaattagattcaagttacagccaattccttcctgaactatataccaaatgcctcaatttagacccgacccggcccaatcttacccagtaagagtcgtcgatacgttctctgaagcgcaagtcatttctggattctcatttaattggccgttcggggccaaataactctttaattttctgcagtctcatttgttattcgaccaaaaataatttatatccctttcctcaagaaatcttcagaaccgacttattagagcttcgagtctcctcaaatcttcttctacgattttttcttctaggtttagagcttttgattctccgatcaatttcgcgatttgttgaactaggatctgaaattagaatg

SEQ ID NO: 13849 - DNA, 3000 bp, Unknown
  misc_feature (1)..( 3000): cDNA_ID_3032291_gDNA_ID_2214658_Annot_ID_188828 3000 nt of promoter + ATG
  misc_feature (46)..(46): n is a, c, g, or t
attatacatcccattttcagaatcaaatttactatttacaaaatcntgaggcacaaaattatttcctaatgaaataatcccatatattaataccttgtatttaatggtaacgccatttctttcttagaaaaaggttttggcgaattatctatttttaatctataattactactgctaattggacatgtaccatgagactaaaaatacacacaaaaaaaactttaattatttgtttcctccctatacacagatatatgttttatttttcttctaacacatgcacaagagcacatcaacttttaattttatttattttaaattgttccatccacaaactatattgatgatggttctttgactgacgcattacgcgtgaaatggtttccttgcttatattattgtagtcgtgttcatattattttaatgatgctcatatgatttgtttgcatcctgaaaaatcttaacacgtttgttttctatgttattatttttcctggccagcttttcgtatgttgttcatttacaagaatactacatactgtatacacgtactcaatctacctcttttggatatattttttgtggtacgccattctacacttccgaatcaataataataaaaattaatctccacaaatgatttcttcacaaattggagttaattatatggagatagatatccctctctttacaaattgacaattttaccttcatgcactctaaatatataggcactcttcctgggagagttacaaagtaaatcctaaatcgaatggattaaacaaaaacaaaaaagatcaaaattataaaaacctgattcttttcaaatttgtgtccaattaagtgtttatttaaaccataattcctatttcttttatacaagataaattatcgtaagattactgatctgcttttttctctttgcctctgcttgataatttcaatgagtttagggttttgttatcaaagttttcgtttatttttgaaattagttagaggttctttccaaagatcattaatttacaaggtttataccggacaatgcctccccgactaatagatttacctgcactatatacacacgacaaacatttttaattggacacataatcacacaaaaaaattactagatgaaaaaattaaacacttaatcaactattagactacaatttttactttttctatgaccatttaatattctaatttcactcatttgttgattttaaaactatatcttcataaaaaatggactatatatcttgtttgatgaaatatgttgtttatatataaaagtttcaaaaactaactaatttgtgagctagggtgaaggacatggtactccaaagattgtacaatttctttgtgttcttgaaaaggttattacataacgataaatatagctagaaagatattcaactaaaaattggaatataagagaaaacataaagataatagaaaatgattggtgaatgaagaattatgcagggttctacaagaagaaaacaaaaaaaaaaggcataatgaagtaaaagtgtttgaatctttagagtagtaaaaataatctcaatttgcaaacgtttggaataataacttttctggaaaatctccaagttagtaataaaattgtttgaatcttgtgttggtgtttgtagaattatcatcaaaatcaagctgcttgaaccttaggggttactccttcacttcgttttattggttactgtctccatttgcattgcgatgttttcttctcgtttttactactattactacggtttatgacgcgcctgaactcatcttcaccatctcctatagtaccatttatgaattcaagtgataatcgatgactcaagttttcaatggtgaatcaatttttttttgagatctttctcttgagtatctttctattcacatcaaaatccactatttaatacgccaacatcacgtctaatgaacttgacaattatttctttattttgttttgtttgtatgtaaccaaaatattcagttttggattttgacacaataatttaccaaaaaatgccgtgaaaaagaattctaaaaacagattaatagtttttaacacaaaaagagctatttacttttatttaattggacatttatccatctttcatttttttaaattttatataaagaaaatacatggatatcaatcataaaatcatcaaccaagattgaaaatggtaattatcatttagttttatagaaaattatatctgtgtaagcaaccctgaatattaattgagtttacatgataaaaaatatagcttttgaacaattattttaacaacagtaaatattaatttgctatcttaaattatagtataaaagtgaaattaattatttaaaactataatctaaacatatttataatccaaccgtatagagacttgttgaaaagtaaaataaagttttcaaatgaagaaaatacagaggataattgtaggggccttgattgttttctctttatttggtggtctcatgtaaattatttttctttatagttgactttgacctttaaaacctctataattctctctttccttattcttcctcaaatctttgcaccaccattcttttatgactcagtcttctctctctcttctctcaatgcccatgataacaccaaaccacttgcttctgcttctcacaccacaaaattctctattcaataaataaatctctcagaagaaatttcttcgaattggagaagataaaaaaagttttatcttttcttgattttttttcttttttttctaatcattcacacccaatttaaacgagacttgtccaatctctatccatcaatattgtatcatttcttgtaaagtactctgttttagcttcacacgccattttttgtttttccatttgacttctgtaaaatcctgacaaagaattgtttaagacatacatatacgtgttatatatttgtaaaggaagcaaaaagtgtttggcttttaatttctctctgttgggatg

SEQ ID NO: 13850 - DNA, 3000 bp, Unknown
  misc_feature (1)..( 3000): cDNA_ID_2704325_gDNA_ID_2214658_Annot_ID_188827 3000 nt of promoter + ATG
gtagctcaactggctctgaaatgccttggacccgaacccaaaaaccgtccatcgatgaaagaagtggtggaatcgctcgaactcatcgaagctgccaatgagaaaccgttagaacgaaggaccactagagcttccccatccatccgtcaacaacaaggccattatcgcccgcaacaactctcttcgtttcgtcctagacaaaacgtgtctcgagctcactagtgttgtttgaagacactgagattcttttcttagttttgtatttgttaagattatcaaaacccattcgtatgtatactacatgaaagagaaaacaaatgttgtacctgtattagtatgtagtgtttggtgtgtgtaatataactacttaaacggttaaaccagattatgaaaaggtttaactaatggtcatcaatatataagccattgttcacacaattttgttgttaaagcttcaaactttagttgtggtttgaagtatggtaatgggatcacacttgtgttcaaagctacaagctttgtcttcgaagattaagcaagcttctgttagtggaaaatggcgggaagtggtctctgggtattcagagatacagagagctggagttcaatttaacgatcctttcgttttccccattgtttttaaagcttgtgctaagctctcatggctgtttcaaggtagatgtattcaagcaagtctgttaaagagaggttttgagtcttttgtttctgtagggaactcaattgctgatttctatatgaaatgtggagacttgtgttctgggttacgagaatttgattgtatgaattcgagagattcggtgtcttggaatgttatcgtttttgggcttctcgattatggttttgaagaagaagggttatggtggttttcgaagttgagagtttggggttttgagcctaatacttcaacattggttcttgtgattcatgcgtgtcgtagtttatggttcgatggagagaagattcatggctatgtgatccgtagtgggttttgtgggatttcgtctgttcaaaattcgatcttgtgtatgtacgcagatagtgattctttaagtgcacgtaaactgttcgatgaaatgtctgaaagagatgttatttcttggagtgttgtaatccgaagttatgtgcagagcaaggaacctgttgttggattgaagttgtttaaagagatggttcatgaggcgaaaacagagcctgattgtgtgactgtgacaagtgttctcaaggcttgcacggtgatggaggacattgatgttggaagatcagttcatgggttttcgatacggagaggttttgatttggcagatgtgtttgtttgcaattcacttattgatatgtattcaaaaggatttgatgttgattcagcatttagagtatttgatgagaccacttgtcgaaacattgtttcatggaattcgattttggctgggtttgtacataatcaaaggtacgatgaggctcttgagatgtttcatttgatggtgcaagaggcggtcgaagtggatgaagttacagtcgtgagtcttctccgggtttgcaagttttttgagcagccattgccttgcaagtcaatacatggtgtaataattcggcgtggatatgagtcaaacgaagtggctttgagttctttgattgatgcgtatacaagctgcagtcttgttgatgatgcaggaaccgtgcttgattcgatgacgtacaaggatgtggtgtcatgtagcacaatgatctctggattagcccatgctggccgatccgatgaagcaatctcaatcttctgtcacatgagggatacgcccaatgctatcaccgtcataagtcttcttaacgcatgctcagtttcagcggacttgagaacttccaaatgggcacatgggattgctatccggagaagcttagccatcaatgacatctcagttggtacctctattgttgacgcatacgcaaaatgtggtgccatagaaatggcgagaaggactttcgatcaaatcactgagaaaaacatcatctcttggaccgtgatcatttcagcatatgctattaatggtctaccggataaagcattagcattgttcgatgaaatgaaacaaaaaggttacacaccaaacgctgtgacatatctggcagctttatcagcttgtaatcatggaggattggtaaagaaaggtctcatgatcttcaaatcaatggtagaagaagatcacaaaccttcattgcaacattactcttgcattgtagacatgcttagccgagctggagagattgatacggctgtggaacttatcaagaatcttccagaagatgttaaagcaggggctagtgcttggggagcgattcttagcggttgcagaaaccgttttaaaaaattgatcattacctcagaggtagtagctgaggttcttgaactcgagcccttgtgttcttcaggttacttgcttgcgtcaagcacatttgctgcagaaaaatcatgggaagatgtagcaatgatgaggaggttggtgaaggagagaaaggttcgggtcgttgcgggttatagcatggttcgtgaaggaaacttggcaaagaggtttttggctggagacaagttaagccagagtgattctgaattaaatgatgtcgttcagagtcttcatagatgcatgaagttagacgatactgcaggaccgataaactaaagccctttgggcctcaacgaagcagataaatgatattattatacgatgccgtatgtattctcggatccgggtgagaaaaggaacgaaccgggttttgtttttgacccgacccggtcccttcgatccgttctctgaagcagaagtcttcttgttttgttctcttcgatccatttcgtcaagcaatctaccgaaccgactcagagcttttgagtcttctaaatctctatcgaatttttctagggttagggctcctgatcgatttcgcgagctctgcgattattttaagtattaggatccgaaattagaaatg

SEQ ID NO: 13851 - DNA, 3000 bp, Unknown; identical to SEQ ID NO: 13848
  misc_feature (1)..( 3000): cDNA_ID_3032295_gDNA_ID_2214658_Annot_ID_188826 3000 nt of promoter + ATG

SEQ ID NO: 13852 - DNA, 3000 bp, Unknown; identical to SEQ ID NO: 13850
  misc_feature (1)..( 3000): cDNA_ID_2704325_gDNA_ID_2214658_Annot_ID_136509 3000 nt of promoter + ATG

SEQ ID NO: 13853 - DNA, 3000 bp, Unknown
  misc_feature (1)..( 3000): cDNA_ID_3032291_gDNA_ID_2214658_Annot_ID_136510 3000 nt of promoter + ATG
atcaatcataaaatcatcaaccaagattgaaaatggtaattatcatttagttttatagaaaattatatctgtgtaagcaaccctgaatattaattgagtttacatgataaaaaatatagcttttgaacaattattttaacaacagtaaatattaatttgctatcttaaattatagtataaaagtgaaattaattatttaaaactataatctaaacatatttataatccaaccgtatagagacttgttgaaaagtaaaataaagttttcaaatgaagaaaatacagaggataattgtaggggccttgattgttttctctttatttggtggtctcatgtaaattatttttctttatagttgactttgacctttaaaacctctataattctctctttccttattcttcctcaaatctttgcaccaccattcttttatgactcagtcttctctctctcttctctcaatgcccatgataacaccaaaccacttgcttctgcttctcacaccacaaaattctctattcaataaataaatctctcagaagaaatttcttcgaattggagaagataaaaaaagttttatcttttcttgattttttttcttttttttctaatcattcacacccaatttaaacgagacttgtccaatctctatccatcaatattgtatcatttcttgtaaagtactctgttttagcttcacacgccattttttgtttttccatttgacttctgtaaaatcctgacaaagaattgtttaagacatacatatacgtgttatatatttgtaaaggaagcaaaaagtgtttggcttttaatttctctctgttgggatgggtctttgttggggatctccatctgattctcctccaacaacaacaccttcctctactggtaacatcagttcaggtttgtcctatctatatctactgaattttcccatctgggttttgcttaaacttgcgtgatacgttgcaatttctgtacttggttgtttgatgcataaaggttacgcttttacatcttcttgtatcgtttgtgactcttcttttggtgttatctcgtatgggttctatgaaagttttgaccttttgattaaaagactctgttcttcttgtgtttttgttgaatcagattcattatcatacttaatgctgtttgtgatctgttatgtgactctctgttttgggcttgactttgttttcttgtggttgtaattgaagtagggacttttaagtcatcaaacaacacgacgactacaggaacatcaaggggaagtaacatatctagcaatagtgggttctctgtggcaagtggtgaagatgcttaccccgatggtcagatacttcccattccgaatttgaggatattcagcttagcagaacttagagcttcaacaaggaatttcaggtctgagaatgttcttggagagggaggatttgggaaagtctttaaaggctggcttgaagacaagactccagggaaacaaagcaacggaactgtgattgctgttaagaaactgaatgcagaaagcttccaaggattcgaagaatggcaagtgagtaaagtgaactatgggaaactagttttctaactttgatatacaaagtgaagttttgtttgctgagtggatagattctttgttggttgttgtgcagtgtgaagtgaattttcttgggagggtttctcatccaaacctcgtgaagctgttgggatactgcttggaaggtgaagagttgcttcttgtgtatgagtatatgcaaaaagggagcttagagaatcatctcttccgaagtaagaacattctttaatcagaatcttttgcttatatgcacatttacatctcgatgtttcgatgtgtaattgcttctattacttcagaggggtctgccgttcagccactctcatgggagataaggcttaagattgcaataggagcagctaaaggcttagcattcttacacgcttcagagaagcaagtaatttatcgagacttcaaagcgtcaaacattctacttgatggggtaagtacatacagattgcttatggatttgatgtagcaaatcatcaagtgtgaaatttcaactggtttgctcttgatgcagtcatataacgcaaagatatcagattttggattggcgaaattaggaccttccgctagtcaatctcacatcacaacacgggttatgggtacacacggttacgcagctccagagtatgttgctacaggtactacaatgttttgtattcttagttcttttggtttccaacaacaaactgtgaacatgtttgttggttccaacaggtcacttgtatgtaaagagcgatgtttacgggtttggcgttgttttggctgagatcttaactggtttacatgcgcttgatcctactcgtcctaccgggcaacacaatctaaccgaatggatcaaacctcatctatccgaaagaagaaagctaagaagcataatggaccctcgtctagaaggaaaataccctttcaaatctgctttccgagtagctcaactggctctgaaatgccttggacccgaacccaaaaaccgtccatcgatgaaagaagtggtggaatcgctcgaactcatcgaagctgccaatgagaaaccgttagaacgaaggaccactagagcttccccatccatccgtcaacaacaaggccattatcgcccgcaacaactctcttcgtttcgtcctagacaaaacgtgtctcgagctcactagtgttgtttgaagacactgagattcttttcttagttttgtatttgttaagattatcaaaacccattcgtatgtatactacatgaaagagaaaacaaatgttgtacctgtattagtatgtagtgtttggtgtgtgtaatataactacttaaacggttaaaccagattatgaaaaggtttaactaatggtcatcaatatataagccattgttcacacaattttgttgttaaagcttcaaactttagttgtggtttgaagtatggtaatg

SEQ ID NO: 13854 - DNA, 3000 bp, Unknown
  misc_feature (1)..( 3000): cDNA_ID_1450859_gDNA_ID_2214659_Annot_ID_136521 3000 nt of promoter + ATG
gggaccacacttgggctagaatctcgggtcatagttgtggtcggttccaagaagataaagagaaacaaatggagagagcgaaaagggatctcaagcggtatatgcattatcataaccgatacaaagcacatatcgactcctccaagctagaggctaagcttagtaataatattagtaaaaaggtgtctatttcagaaaagagggagttacaacttaaagacttcagctgggctaccaatggactccatcggttatttagatcaagacgagttctttcatattcataccctttcgcattttacatgtttggagatgagctgtttaaagatgagatgagctctgaggaaagagaaataaaacaaaatctgtttgaggatcagcagcagcagcttgaggctaatgttgagaaactttctaagttcttggaggaaccttttgatcaatttgctgatgataaggtcatgcagataaggattcaagtcatcaatttgtcagttgcggtcgatacactctgcgaaaatatgttagttaataatctaaaagacatcagagagtgctaacaacctatattgaaactgacatgtcaagctttttgcaggtatgaatgcattgagaatgacttgttgggttctctgcaacttggcatccacaacattactccatacagatcaaacggcatagaacgagcatctgatttttatagttcccagaattccaaggaagctgttggtcagtcttcggattgtggtacaagcagtaaatcttgaaacttcacatcattaggttggagacttaccggtaatcttacaaagcaaactctttaatacaggatggacgtccaggctcgatcaagctttggagtcagggaagtcggaagacacaagttgctcttccgggaagcgtgctagaatagacgaaagttacagaaacagccaaaccaccttactagatttaaacttgccagcggaagccattgagcggaaatgaacacttatccttcttcacctcccaataacaccctttttgtccaaataaagtgtgttacccggatatttatagctctaaacccaatcccctctgcttaatttgtcagtgaccttacctaaccctcttcagttctgaaagaaggggtcaagcatcgttacttacaaaatttcaatcagtttcggagtttacataggataatggttatagacttatagtggatcatatttgaagctgcctatgaactcaggcttctctcagtgcctcgaggtgtaaatttttaactaaacgtaggtggatcgtacctaattcatggatatgaatctcttgtacatatgcgttatatatttgagatggtatgaggtttttgttgtgacggtgagagagtgtcccgcaatctgaaaaattggctaaccttagtttttcactttttctggttgtaatttttttattgaatgcatcccctaaaaaattttgtttggtgagatacctattgaatctctcactaatataattttattatttttggttcacttttgtgtctctcatcaatataatgtatttttagtgttatttaataattttaatgtaatttaacttgaatacttcttttaatgtcttattttaaattaaaatatttctaactaatatttttaaaccatctcaaactacattttaaaaatattcattttcagacatattcattttaaacatatacatttctcatagagagctctgagaagcaagtgatcaagtggaagcaactcccacatgggtgggttaagtgtaactcagatggagtttggaatgcagaatgcaacaagtgtggcatttgctgggtgcttagaaactccgacaagaacgtgctttggatgggtgcaagggctataccaaaggctcaatccgccttggttactgaggctgaagcgttgcgttgggcggtgttgtcactctctcgactcaactaccgaaaggtaatctttgaatctgattcccaacaattggtgtctattcttgttgataacgatgatatgcctactctggaccctattatacaagacatcaagttcttgcttcagcattttgaggaaacaaagtttgtgttcatgcatcgtggaggcaatggagtggcagataggatagcaaaggaatctctttctcttgagaattatgatcctaagttgtattctatagtgccaaattgggtaaaatcgtttgtggaattagacaagttgtaaaactctgttgtttaatgataattattgttgttgagccaaaaaaggaaaaaacatattcattttcaattactttgttatcttttataaaaggaaaaaagatggctaactacacgaaatatagagaattacgctgtcatatataccaagtataatattgtatcttgagctacacgaagtacatgtattgcatgaccatatttatgaactatatgacgtcatctggttaatattatgaacatacaattccggtaaaccgatcagttgacttcggcgttgacaaacaaaaaaatgctaaccatagttcaaagaaaaagaattgttacaaaaacgattctacgataatttttataatttataataaataataaatctagacggtaaaaaataataacttaaaatttacgttttttctgacatagaagtctatattttagtacacagattcttttattttatttatgtagaatgatatgtcagatttgtcatctttgttagagtccaaaattggcctcttccaaatttcttatggttctttttcattttttccccaaatttaaataaattcaataaaaatttgttgattttttgtggccgttgattaaaaccgggaaagcagcagaaacaaatctgaaaatctgagttaagccaaccacaaaacaaatccactccaaacactccaaattacttgtctctcttctcttccccaccaccactaccttacaaaaaccctaaccctaatttctccacccccaaattcttttcctcaatctctgcgatg

SEQ ID NO: 13855 - DNA, 3000 bp, Unknown
  misc_feature (1)..( 3000): cDNA_ID_3032337_gDNA_ID_2214659_Annot_ID_188847 3000 nt of promoter + ATG
agtgtttttgaaaagtccaactatattagttcatctgaaaacgaatgtgcttgagttgttttttattgttgttttagattttcagttttttattttaatttatatatccttgttttttttgttatctgtttagattgtgagacggtgaaattttagaaaatttatatcttacactaaaaatataacatgtctttattaaccatgtctctatatattcaatgtaagcatattcaacttgatgttcttagaaagtttagttaaatttttgtcataatcttatatcttacgtattagttataaggatagctcctcaaacatctttcaaattacttgttttcttagcataaatctcgaaaagcttagatatatttaatctgtcatttagtttctttcataataatcgtctaatttttaggcaaggaatatgtgtagcatgtttggattttatgatcactttaaccacttaattgaatctcaaaattaaagaggatatattgaattaaaaaatatagaaagagtgatggttcaaattctcattaattatatcctcctattttagttgtttttttttttttttttttcataattttccaattaaaagaaaaaacagattacagagggaaactcccccaacaaacacaggcacgcaggccctacaaaagaaacaaaagacaagaaaggagaaaaacaaggccaaagcccacccggcacgcaggcccacagaaacccacaaaggccaaaaggccgacaaagacccaaagaaccaagaagacccagcaaccgaaaccacgtcgcagaagccatacctgcacccaaggaccacaggagacgttgaaggaaagcaggtccacaaaaccagccgaagagaactaaacttggaaaagttcgaaccaagtagctagaagagatgatcgagaaagccccacaggtctttcccgacagataggatccaacctagctcggataagctgctggacctccttaatgatagtaggaggggttcttgaatgagtagtatgaattctacagtttctctctctccaaatcagatacacagaagcttggaagaggagcttgatgataagagaaaggttctttgaggaagaggccgacttcaaccaaagcaaaatgggaccaaaaagatgaggaggagtcatacccgcccttatcatgaagaaactccagatttcattgctgaactgacactggaaaaacaaatgatcatgagtctcatccacaacattgcacaagacacagacggtaggaatgttaagcccccattgagtcaacctatcacgagtatgaagtctcttccaagctgccacccaacatataaaagcatgcttcgggattctgtctttgaaccaaacagatttctgccaaggcaccaaaacaccatcgggattgagagcagtccaagtttttgacgctgagaaaatgtttgaaggagcatgatggtccggcttccatttatagacatcatcatgctgacattcaatcatactctcgctcgaaggcagaacactttttaacagagcaatggacgggtttctgcttctactagaagacaaccaccagttatcaccacgcaaggcatctcttaccacggcattaagaggcatccccacagatcttggaccgttagttcccgtcagatcaattaaaggcccctgcccggtccagttgtcctgccagaagcttgccgtttcccctgaaccaatctcacaaacaagaaagggcctagcaagagggcgcagtttacaaagcttcctccaaatccagctgccagaggaatagggatttagagtccaaaaactcctattttagttgttatgttgaattaattactaattatgtattatttattttatgaagtctatgtggcaagttttcataatgaaattttcattaaaaaaagtcaataaaatacgtgttatacttcatatggctctttcaccacggacaagtcaattccatcagctaccgttgtggatcctatggaggatttggaaaagcaggaacgttttatattttcaaagaagacatattccctgggaaattactttgcgtcttgctcaaactgatgctcatgagtataccgaggcgaatacagtagcacaaataaatacacgtagcagaggggtgagagaggaggataaccatgacagatggagacgacctgaagaggatggatcaaatgcaactttgatggctcattcgttaatggtgatgtagaaagtaaagcaggttgggttgttcgggatagtaatggaagttatctactggcggggcaggctataggaagaaaggtggacaatgctctggagagtgaaattcaagcgctaatcatttcaatgcagcactgttggagtcatggttacaaacgggtttgctttgaagaagataacaacatgctgtttgacctaattaacggatccaaggtacattttggcgttcacaactggatacgggacattcattggtggtcaaggaagtttgaatcaatccatttcaattggataagaagacatcacaatactccagctgatatttttgctaaaggtactcttcaaaaccaatctttattcttgaatcatttctgggttcctaatgtaataacatatgctgtacattgtgactacactgctgatttataaatcaataagatgctgatgacaaaaaaaaaaaaaaaaaaaaaaaaactgtttagatactcaaataaaaaaagtgatttcatataaaacggtgccgtttggtccgtaaataacgatgtcctctttctcttctcctccggttgattcagtccttttaacactcctcttttgatctcgccggcaaatatcatcccacatccttcatgtctcaaaatctccgtcatcgttctcttccttcgttattactctcgtactttatcacctccgtcgttctataatactctcttccgtcaatcatatcatttgtcgacaatttcattctgatcagtttaaaaattgatccatg

SEQ ID NO: 13856 - DNA, 3000 bp, Unknown; identical to SEQ ID NO: 13855
  misc_feature (1)..( 3000): cDNA_ID_2714104_gDNA_ID_2214659_Annot_ID_136522 3000 nt of promoter + ATG

SEQ ID NO: 13857 - DNA, 3000 bp, Unknown
  misc_feature (1)..( 3000): cDNA_ID_2704389_gDNA_ID_2214659_Annot_ID_136524 3000 nt of promoter + ATG
aacaagtcattctcaatgcattcatacctgcaaaaagcttgacatgtcagtttcaatataggttgttagcactctctgatgtcttttagattattaactaacatattttcgcagagtgtatcgaccgcaactgacaaattgatgacttgaatccttatctgcatgaccttatcatcagcaaattgatcaaaaggttcctccaagaacttagaaagtttctcaacattagcctcaagctgctgctgctgatcctcaaacagattttgttttatttctctttcctcagagctcatctcatctttaaacagctcatctccaaacatgtaaaatgcgaaagggtatgaatatgaaagaactcgtcttgatctaaataaccgatggagtccattggtagcccagctgaagtctttaagttgtaactccctcttttctgaaatagacacctttttactaatattattactaagcttagcctctagcttggaggagtcgatatgtgctttgtatcggttatgataatgcatataccgcttgagatcccttttcgctctctccatttgtttctctttatcttcttggaaccgaccacaactatgacccgagattctagcccaagtgtggtcccttccagtagcttcaccacacaaccaactgtataaagtaataaccaaacaaaaagttcatcaccacctgatataatgttcactagaaagcagaggagaaacaaggctaaaattcataccaaaaagattgtcgacaaagacaagtcacgagattgcatccaccattcttttcaacaggcttgtgacatttgggacacggctttgtgtgaacagttatccaattaacagtctcggactcatcaaagcacttctttctccatagttcccacatcacacaagagcaaggggagtgagcttgagatgaacaactgaaacagaactgcaaaccacaagagcattcaacctcacagagctcgtcatcctcaacacgtatggcattcccacaatgaggagtactcggacaccacttcaccattttgttatcttcgatatacgactcaagaagaaaacgatcaaacttctcagctaaatctggttggcttttactaactagagccctgacaacatcttcatcacaaatagcattacacttatgagccatgcatataatccttttgctctgaccttcatttatctttacagtaaaatgcccagtccaacctaaaacaacaaaaccatattaactaaacaacttcatttcaggatatcattaagaaaaggatgagactcacagttattgcaaaagctatggccacagtccatccttgtcagctgataacccggtacatcctctacgcagatatcacaactcatcatcgaagaagaaccagaaacggaagaatcacaactttggttttcaagaagtgtaacaccagcaccagaaaacaagctatctttccctttctcaacaagaacagcaaacaacttctccacatcccatcggtaatgtataagaagagtccgagcatggtgctccttaaccgataacaattccatcactctccgcaaatcctccctctacattgattcaaaaacagtttagccttcaaaattgaaactccacagtatatatggatcaaaagaagagtcattgctctttcactaacctgtgcagccaaaagtgattccttcgtaataacctacaaaatgcagattcacattcatgcaaacatcaaacgcttttattctaattgaaccaatgccactactcttctaatcctcttcacagcattacagagatgaaatttcacagtataacacaaaaccctaattttaactagagaacaacagagatcacagaactgatttttcaaatcaacatttcaactaagtgattcaatttcacgaattcgttacaaaattaacaaaatccgaaaaagaatcgagagaaatttagctcaaaaaccttgacagtatttgatcgggaagaaacaggtatcgaaacggattcatcattatcaatcccgttgagagattcctgatcggaggagtaatagtaatcttcttcctcgccgcttaaattatcatccatggatcaatttttaaactgatcagaatgaaattgtcgacaaatgatatgattgacggaagagagtattatagaacgacggaggtgataaagtacgagagtaataacgaaggaagagaacgatgacggagattttgagacatgaaggatgtgggatgatatttgccggcgagatcaaaagaggagtgttaaaaggactgaatcaaccggaggagaagagaaagaggacatcgttatttacggaccaaacggcaccgttttatatgaaatcactttttttatttgagtatctaaacagtttttttttttttttttttttttttgtcatcagcatcttattgatttataaatcagcagtgtagtcacaatgtacagcatatgttattacattaggaacccagaaatgattcaagaataaagattggttttgaagagtacctttagcaaaaatatcagctggagtattgtgatgtcttcttatccaattgaaatggattgattcaaacttccttgaccaccaatgaatgtcccgtatccagttgtgaacgccaaaatgtaccttggatccgttaattaggtcaaacagcatgttgttatcttcttcaaagcaaacccgtttgtaaccatgactccaacagtgctgcattgaaatgattagcgcttgaatttcactctccagagcattgtccacctttcttcctatagcctgccccgccagtagataacttccattactatcccgaacaacccaacctgctttactttctacatcaccattaacgaatgagccatcaaagttgcatttgatccatcctcttcaggtcgtctccatctgtcatggttatcctcctctctcacccctctgctacgtgtatttatttgtgctactgtattcgcctcggtatactc

SEQ ID NO: 13858 - DNA, 3000 bp, Unknown; identical to SEQ ID NO: 13854
  misc_feature (1)..( 3000): cDNA_ID_1450859_gDNA_ID_2214659_Annot_ID_188846 3000 nt of promoter + ATG

SEQ ID NO: 13859 - DNA, 3000 bp, Unknown
  misc_feature (1)..( 3000): cDNA_ID_3032341_gDNA_ID_2214659_Annot_ID_188844 3000 nt of promoter + ATG
gatcgcttatcgtatactactcaccattccggtttcagttgctttggcggagagaactttttcaaaattaaagctcataaaaaaatatctacgttcgactatgtctcaagagcgattgaatggtttggcgctgatatctgtataacaagaactggttgagaagctcgattaccaaaaattgatgaatgaatttgcaggagcgaaagctaggaggattatgtttcgccaggaagaaaactgagatttctatttattttttttcttgttaacaatttttatgttcaattttcttaaacaaaataaatttcatattattttattttgcgaaaaaaatatatttgggcatcaattttgaatttgctttaagcatcaaatatcctcggaccggcactaaatctagggttaccattctgcttcttcttccatcttttcttctgctttcccatgatttaatttcctttgaaaattttccaatggaaacaatgtcctattctttccgctgcacgctgcattttatagattttttttagattcacccgtataactatgattaaataactctttatacaaacaatctcgacttggcccagtggtctaagtctctctcttttaccctacgcgcctactagcgcctggtttgaccttttacatctacatctttttctctctttttttttcccttcatttaaaccagatcgaaccagtttcgattcggttaaattatcgaaatagtcaattacaacatcacaatatcgactttttctactggttcacttggtatttttaaacgacacttatatgtaagatcattgtttctattattgttatacgaaccaatctaaatatgatttaattagctacccaatcaaacccctttctttcttaaaaacatgttattttgttataatctggataagtatggatcctaccaaaaaatctggataagtatggatgtaattatccatcactcatctatatccataagatatggataatgcgtatctctatccattattttctccctaagtctattatttcctcgctaagtctattacttctttgttaagtctattacttcttagtaagtctattactttttcgttaagtctattactttattgtaagaagtacagagaagagaagagaatgagtaagcaataagaaaactctcgtttcggtctttactctttttagttttcattcttctttaaatattttataacaggttatcagtaagagcgtctctccgggtgattgtctaaccgaccgatcgtctatttgttcaagcatcttttgaggtaatatttgaattatgttaaattcattttaattcattgcggcggacccataaatactttttaccgaattaaactacaacttaaaagaattagtaatttaaaaaaattaaattactaaataaaattatttccttaaaaaagaccacaaagtaggttaaatatttatgggtgaatcaaacaaaaaggctaaaacatgtcaaaaatagtatcaaaacacaaagtagaagaaaaatatgatcaaatttaaagggtttcgatacaaatttctaatttcaagggggtcaacagagaagaaatataaataatattttaaatatttaaagggctgtaatacgaatttagaattttccagggcatctcatcccttcccatctatactctttaccgtgtcaaaataaaacttaaaataattaataactaaaacttttaaaaaatctttatttactgaaaattaccacaaattaggttcaaactttattggtgaaacaaacaaaaacaaatacaaagagtaaaaacatataagaaatagtgttaaaacacaaagtagaagaaaaatatgataaaaacttatagcgtttacatgcaaatatgtaattttaaggagattagaaccgaaaaatataattaatatcataactattaaagggatataatgtaaatgtagaattttagtgtggttttcccctttaatcatctttgggtctgcccatacatatttcttatcctgaaatttgaaatagacatgcgcgattttcttaacaacttataaacaaatatgttcttatacatttttcttacacaacttttaggatatttatcttaggattttatttatttattttacgtttaaagattacaaataatttttagacgttaccgccacaaaaaacttatccacaaaatattttacgttattttattttacgattaaagataacaaaaacttatcggtttattaataattgtcttgtggatcgtcgtataccgtaatttgataacaattctaaactataaattataaatattctataaatagatacaatttggaaaatttaatatatattaactttaaaaaatagtgttaaaaatctagttttaaggttaatagttgagttatgttctaaatctttccaagtttatatatttttgtactttaatgtttactcatcaaaaataaattaacaaaaactcttatttcaaaagcaaagtcaatagtacaaaatatcaagttttttcagaaaaaaaagtgaattagcgtattgaattttaaaaagtgaaggtttttatatgagagatgatttttttttctataattaccataaatatctgatccttaactatgtcagcagaggatatacatttgttttttgttacaaaagagttgggttctaacttcaaaagagtgaaggtttcaaacagttaaaaaaaaacatttactgttaatatttataatttcatcaataatgggcagaaagttttataccaattaatattctacattcttattctcttatggactttcttacatttgcagcaacttaaagattccacttgataaactcccatctttctttttggatgctccaagtcacttgattaaagcttctccagaatctcctctataaattatgattcataccaaactcttgtagacaaaaccgattttcaaaaaaacaaaacataaaaatattttttaaaaaca

SEQ ID NO: 13860 - DNA, 3000 bp, Unknown
  misc_feature (1)..( 3000): cDNA_ID_2704369_gDNA_ID_2214659_Annot_ID_136530 3000 nt of promoter + ATG
aagtgtttaatgttgattgatgatttgtaagttttgtactttaaaatattttgtttagatatttttggtagagattaaaaactaaatagtatttacataaatgattttttacaaaagtttcaccaaaaatgtataagtagatatgtttattaggttattttcagaataggcccatccaataattatctttgggtctctagtccaattacaccaaccaaacctggaaccaaaccaaaatcaacctaagatcaaacccaatctaaactagcagataaccgatctaaacccggagacacataactcctaagattctatcacaaaatctaatcaaagctgccttccactgtgtcgtggaaactcgcttgaataagaccaccggtgagtcaggaagacgggagtcgaacagagaaggcggcgcagggtcatcgccatcccaccaccgtagagttgtgaaaagaaggaagaagaaaccgatatacaacgtcgagaaaccaagctccttcgtgtgacccgttttttttttcataattgttgtaaataaaaatggataataatgactcatgtttggataaatttacgaaagatttgaaaataaaaagtattattcatagatatcttataacaataataataaacaaataaaaactcagttatcaaaactatactacatatttgacaaaatcaattaaatctttaatgtggattacgttgaaagctgtacaaatccttacaaacccgtttatttacaaaaataataattaaatatacatatctcgttaacaaacaagtctatatataccaccattgtagtcattcttcatcatcactttacacctcatgagtgacgacgaagatctcgatttgtctttaaggttatatacacaaccaaaaaaaaccgttaatgagaaaaacgggttggttcctcaaagacaagaggaacaaggcgaggtcatgcaactcttgacatcagatcctccacaaaatacccaaccctctcctcctcaaccaaatgacatgacttcttttgccaacggaacaaaccatgtgattgttcccacgcaggctcttgagcaagctgtaccgcccccaaacgtctcagtgaggaccccattgccttatcaaccttcagaagaagtccttccccctcctcaactgaaccaggttgccaccgtggccttggcaactccccgcagaggtcgtccaccaggaggacaagcacgtcgtaactcaaaaagaccggtggctggggttgaaagaaacgtaggtgacagggagatcgtaccaccgtatccatgggccaccaaaaagccaggcaaaatccagtctttcagagacttgtcttccaacaatataaacgtcatctctggacaagtccactgcaaaacttgcgataggaccgacacggttgaatataatctggaggagaaattttcggaattgtatggatacattaaggtgaacaaggaggagatgcgccatcgagccccgggtagttggtcaaccccgaaactgattccgtgtaggacatgcaagagtgagatgaagcctgtgatgtccgagaggaaggaagaaattaactggttgtttcttctgttagggcaaatgttgggatgctgtactttggaccaactaaggtacttttgtcagttgaattctaaacatcgaaccggttctaaggatcgtgttgtctacataacttatcttagtctatgcaaacagctcgaccccgaaggaccatttaacctgtgacttataagaagatcagatcgtatctttagcgtttgcttttggtttgcatcgtaagtttatttttttttatttttttgcatcgtgtttctctttagggttttgaggatgacgattacttttattgataatttgcgcttttgtattattatttcttgtgataattactctggtaatcaatacgaaaaatactttatttaaattaaggatatatactcatagaaaccataaaatgaaagcaaaagttgaagggaaaaaaggggtcctgaataaaacttttgtagattcttaattcgtttgttaagtcaagatcatatcttttcgttatttttcttatatggaagactcatcaacttgagcctacaagatctacactatcattaatattctttttttttgttgtgaggaatagataaacacatatgagtgtatatagcgttaataatcatttttgtgatgaatggataaacatatgagaaaatcttattaatttaatgagaaaaatgaaaatgtcatgcctttagttttaatttttgttttaactttacgattatcattttctttttcttcttacatatcttttcttatgtcatattgtattatttaaattcgagtgaactttttgaattataaacttgacaaactttcgagaatatatatgcaaagcatcttaacagtgtatgagagatgacagcaatttttccttattcgaactcacaatccattgaaatgataaatgtacttaattaaccactctgcgaatttgtactatcgaccaattaaccacataaatattaaagtaattttcacgttggacacctgactttttctttcacaaaaaggcaaagtgggctgggtcaaccacattttagccattagaactaaaatggccgaatttgctctggaacgaaaaactgacggaggcggtttagtttcgtggagccggttcagtttccttaaccgttttctggtttcaaaataatttaaatatttaaaattattaattttaaaacttaaaataaataaaaaaaactgtcttcttcgagaaagcagaacagttccgacgaaacgaagaatgatttcgaagaaccagagaaattccgacgaaactgaaacacaattccgattgaggctctgttcgagttcgagtcattgctaaagtggagaaaatttcgatagggttcgtgttaaagtgtggaacaataatacgatttttgggtttatcgattaactgttcagagaagagctctaatg

SEQ ID NO: 13861 - DNA, 3000 bp, Unknown
  misc_feature (1)..( 3000): cDNA_ID_3032436_gDNA_ID_2214661_Annot_ID_188877 3000 nt of promoter + ATG
atcaccttatttgtttatcatatgtagtgaaatactctttggattatgcaacaaagctcaggctaatggcagcttacctggaataagggtctctaaaggcagtcctcgagttaatcacctcctctttgtagatgacactatgttcttctgcctctctgacccgaaaagctgtaggaagttacagcagattctacaaaagtatgaacaagcttctggtcagaaaataaaccaagagaagtcctccattactttctcctcaaaaactaaaactaaagttaaagtgcaagcaaagaatatcctatcttttcaaaaggaaggaggacaagacaaatatttgggtttacctaagctttttggaaagaagaagatggatcttttcagccaaatagttgataaagcaaaaagccctgagttggtcttcaagattcctctcaactgcgggtaaacacacaatgctgaaatcagttttatttgctatgcctacatatattatgactttcttccatcttcatagctccctctataaacgcatacagtcagcccttacccgtttttggttggatggaaatacagaaaaaaaagaaaatgagttggatttcttggaagaaaatgacaaaatcttttaggactgttggtcttggtttcagagatatcagtaccttcaataaggccctcctagcaaagatcagctggcgtctactcactaaaccctctagcctcatagcaaaggtattggtagggaaatactgcaagttttctactctacttaattgctctgtaccaaacactccttcacatgtttggctaagtatttgcttaggacgtgacctgctgaaagctcagttgggcaaattaattggttcgggagaaaccacccatatttggagaaccccatggctatctttagtttcaccactctccccaatgccaccccccccccacggaggctactcaacatatgcgagttgctgatctcttgctctcggattcctgtgattagaacaaaaaccttattagacgtatccttctatcttatgaaatagaaattttaactcttagaccaagctagttgggagcagcagatttattggcttggttaccaacaaaagatggcatatacacagcaaaatcagggtattatgaggcttattcggatacttaccccatcgttgagatcacgcctgcccccacagatgatgaatttgattgaaagactcatatttggtccctcaaaagctcaccaaaaactaaacttcttctttggaaagctggccaaaattctcttccagttggtttaaacctcctccatcgacaggttaatgactctatcaagtatcctcattgtggactagaggaatcagtggtccacatgttcttttcctgtccttttgcgtcaagactgtggaatttggctcttttcaaatcacaactcaacataaccaacagtagatctatgcaagaggaaataaagagcttcaagaaactcatatgtctccctcccacgggtattggagatggaactctcgcaccatggctattctagaccatctggacctctaggaatcacctaattttcagcaaaaaaacagatcactgtcgaagaagctcttcaaattgcaatctcacgagctaaaagagtggcaagcagctcaattgcaaaaaccacaagtgcataagcttcgactacctgttgttttaccctctgctcccacattagctgtgacttgcttctcagacgcatcatggaaagacgatggtaacgctggatttggttggtttctaaggatccacacgatattaccctcttggaaggatcagcctcaacctcctccgtcggatcacctttgatagccgaagtcatggcaactctcgccgacgttagagttgcggtcgaatcggcccaacaaaacctcttcttcgcttcagactcgatgattctagtcaaagctctcaatctgaagatccatcagaaggaacttcatggaattctacacgatatcctgcatctatcctctaattttattgtctgcacctttaattacattcttagggcacttaatcgacaagcggatctcttggcaaagaacgctctgttttctattatgtaatatctttctaattaataataattagatattttgatcaaaaaaaaaaactctttcaagcgagtctgaaattaagcaagcatatttcacctataaaattttctaaagttttaaaaaacgtaaaatagacaataaataaaattaaaaacaactaacgacagacataaatttttatagacttccaatttggaaaaatggatccaagatgaacatgtgtaaattctcacagtttacttggaaatattattatcaaaagagtgctaaaacgtttcaaatgatatttacaatatacatacatatatgtccaatggcaaatctagattttttttttgccaggggcaaaatattatatcgacttttaaagataaaaataatttattatgtactttttaatattgttactttattattgttatttatatttctaaataggttagagatgatattatatgtcgtaagttattaaaataaattaattctgggaaaatatattagttagagaatatgtataacttttcgaataacaaaaaacaaaaattttagaaataaaccaataaaatgcaacaataaaaagattttgagagaaaactaaataaataaataaagaaaaaacaaatctaaacaaattggaaattatataaaatctggaaatgagacgtttatattagaggaaaaataaacaataaaagctaaaatttagggaagttaataaaaaaaaaggaaagaaaagaataaatgaaaaaaattaaaagggcattatgggatttgattttgagtttatagggggaaagttggttcaaatttccatttaagctaacaaatctttattaaaatcaatgaaaatctagaaatttgataatttacccggggcagctgctcctcttttccctacatg

SEQ ID NO: 13862 - DNA, 3000 bp, Unknown
  misc_feature (1)..( 3000): cDNA_ID_1808564_gDNA_ID_2214662_Annot_ID_136534 3000 nt of promoter + ATG
aaaccaaaccgaatatagattgacccaaactcaaaccaaaccatactaagagtgcctctaatgtagggttgtaatgcaatttttcagaggttctcttgatattttggatcaaaaataaatcaaaatagaattaaaatgatagaggcgttggagataggcgacacgtatctaaattgtattggttgtgcatggataattttttttgtctcttaaaaggttttgaaaatatatgattattagtgacataatatttagtctgtgatcgactatattgacataaaaacgacataattgtcatccttttcactatgttttgtatttataattattgaatgctttaaatatttggagcagtcacctagcaaagttattgaatgggttcgttcagtggtacataaatgataaaaattctcaaaggagaatcatctttatttgcatcatatcaagaagtaatttgtaaagatgtcgagcgtgcatttggagtattgcaagtttggtttcacattattagaaacctaactcttatttgggataaagaaaaaaataggaaatattatgtgagcatgtatcatgctgcacaatgtaattgttgaagacaaacgagatagatacactctgtttgatgttgagaaattcaagttgaagcaaaccaaacttcaaaagtcgatttatcgtattctacatgtatgcctacaaatctcagagattttatgagcattcaaaatcaagtttgtgattgagagatacatctacaattgaaaggtgatttggtgaaatctatatgaaaagaaatgcataacaatcaacagaataactgatcgtttttgtttttttttgttttacatctattttaaaacatttcaaaataatatatttttaatattttatgctttaataattattaagttttataaaataaaataattttatattaaatttttttcttcagagaactactctaagagatcctaccatttaagtatgaaaaataaaaaacaaaaaaaaaacacaaagctctttggttaatttttctgaaatttaattatagaaaaatggagagaacccttagagaggctctcttctttggaggtgctctaatttcggttgagtttagttaaagttttacaaacccaaataaacagaaccgaaccgaaataaaagaaatgccaacccctattctgtaatgaaattacattctacaatttattgacctctcaactacatttactaatcttatcatttaatgcatgctataaataaatagctttatcttgtggtacgtctttctttttatgcatctccttcaaaggttcattttctttcattctgagtttgttccatcggtacttccttatactttctcgtttcattttcgagatttttttgtttttagtgtccttacaagtaacatcatactttgattactaatagtttcatgattcatcattgttgttcatcatctaatgctctcatttcctcacgcagctccaactttcaaacacaagtgcttttgtcttaagaccttttctcttcgggttcgtgagttaaggtaacaacattactgatgattttggtacaattaataaatttccctaagatttttttaggatattataagcttaatttttaatttgtatagctgatgaacaataaatcacatttattgtagccccatgaagcatgtctcaattgacttttcttgctgcgtttataccattagataatagatagcgataagaaaattaaatggccaagaagcattgaataactaccacgttttaaaatggtatgtacattaggtaggcacgcaaactaatgttactacacaatagtccatttttatttgtttagatatgtaaaaatcgtgtcccaaatttcttctattattttgtcgtatagaagaaagaaacctttcacgggatatgattggttggactttaaaatttttttaaagtcattaaaaaaactataacctcaaaattgaaacaattatgatatagcttttctattttttctcacagcctaaataatatttttttaattattttggctgtaagtacaagttattctaaagcacaagtttatggttctttttttcttttcattttatttttatttttgtaaaaacattactataattttcatatatatatatatatatattaaatttagttttatggatataaatagtagataaatatctactttatgacatatatatatataactcacattgtttttaatatatatatatatatatatatatatattaattaaattgatatttgtgaataatattatataacacataaatacattttacaaataatattttttttgtttaaaaatacatacaaccaaaatcttatttctacaaccaatttctttaagtaataatattatattaataaaatctacaatctaatttctaaatcaataaaacctacagctacaaccatcacacctacaacaaaaaatatacaaaaataaatttacagttacagacgaaccaatcacccacatagcttccatttttaaggtatatagtcgtctagattactatcacaacaatttaaaaaatctagctttttttgtttttgatgtaaagaaatctttattatatattatagactaaaaacgcttttttaacacatgtacgaatccaatttcttatttttggaaactagtgttaactatttatctcttcaaaacagctagaatttttggttttatgttttagtgatgcagaattacaacgcaatgttaggtatatattaattactaaaacaatgtcttgatgcataaaacgttggaaatgttatttttaggcacatataggtttgttaaaattagttagctgttttttgttgtactattaattttttttagtatgtgtaaagctttataattgacctcaattttcatctttctttcaatttgcagggttcttcttcttcttcttcttttttctctaaactggaaaataaagaagaaaagaac

SEQ ID NO: 13863 - DNA, 3000 bp, Unknown
  misc_feature (1)..( 3000): cDNA_ID_1813111_gDNA_ID_2214662_Annot_ID_188915 3000 nt of promoter + ATG
atctcataatccttcgtttttcacaaagagtcctcggtactaaaaaaatgaactttatattgtacggacaacatagaagaagaataagctgaaattagttacctttttttctctgacaaaatgaactttataaacaatacataattcatctctcttaaatttccaaaatctaagagatccgttttattctaaactttgatttataatttaagagatttaaagtttgatcaatttttttttgttgcgtctaaaaatctctaaacatcgaaggatggagactgaattgtggtccgttaaaaattggtatttgtaaacaagaaaacaacattacgtaaattgtaattcataaatttgcgtgctttgtgcttgtctacctccacaccggcttacgatgaaccacactctttttaatattcaagacttctatataatcattatatcgtatattcatatatatatatatatatatattatataaataaatattcttttctgttttctgtgttactaacttttattatatagagagagatattcaattatacccaatacaagcctatataattatcaaaattaagtggttttttatttaccaatttgaattctctagatatcttacatacgaggatgtgcttttagtcaaatggacttaaccatttgattccgccttctccaccggaattcgatttcactaagttgcgttatcccgcaatcccgcatagtagggattgagtattgatcgggtcttgtcgatacaaagatgtaaaaaaaaaaattttacatagtcttttttttctgttcttattcttttttttgggggtaaatatctgttattgaacattataattcaaacacttccaaaactttttttaccttgttctgatattgatgcagcgtatcttgaagacaaatgctcctccggtattcatcacgtccgaggagattgtttattgctttacttttgggtttagtttcatatggacttaattaatgtatatttgggctttgaatatttgatattagtttgcttattctttaggctagggtttccattctttttctcttattttaagagatgtaattcattattgtaattagtttttgattattgaataaacgagttttaagagagcttgtctaaagcctagagaggaggactctcaaccctaaaagcttgtgttcaagccctgcaaggaggatttgcaaaacctcatcgatatcgttatcgatctcgaccttatctctattgcttcttcatcaagtttcggcgttctaaacaaaatccgttcgttaatccgagttctcatagagattttgtgttttcgtccgttatttagcttccgctctccatcagatattacttttgttcagtagaccattcataaatacctgccttggatccaaaaataggacaaataaacatcatttgcatcattttattattcttaaaagaaattgcaaatttttgaccaaattgcaaatattttgtttttaggttatacccaatacccacatactgtattatagtcgtaataaaaaaaggaaaagttgcaaaataagtagaggacagtgagaagttggtaactatatatgttttggttaatttagttatgggtatggagtctataacgtatggtttcgatatttccaataattagcaatcgtgtatcttcgttagcatcaacattgttgtattttatttagtgcacaccttctcataatttctaaatcaataaaattttaatatcattttatcttggtatatgtcactatgtatgtggttatttttatgcttccatgtttttattttttttgccatggaaccattagcttaggttgaaaatcatcgattgtaaacctatcatgttttcatttttatgaaatattaggtgatcatccgcgctacaccacggttttttcggatgtttttgtattgtttaatttaaatataatttttatttatcttatcatttactcatgcaataagcaattacatttagtattaaaatatttttttctaaccacattctcaacaatgcatcatacacataatttctaaacaatgtttatcttaaaccaatttaacagagggtagtgttggattctataaacctaagaatttaatgatggagctccttacatattcttcaccctcagttatttattatataaatatcaatttaagagaatataaacatcaatttaagagaatataaacatcaatttaagagaataacttagttaaattattaagtaatatactcatactttgagtttggattaccataaaaatcttcgagtatgagaaaactattaaaatgattttattaaaaaatcatgtgatattaaaataaatttagtaaaagtacaattaaatatgtataataaaataatatgtaaaattaaatataaatatatcattaaactatagatttgaaattgaagagattacattaattatttaataaacacatgtcaaatgctaaagtgatgatgtgtctatcatatgaagagagttggccaactttcatatatataatttacgaaaaaaaaaaaaaaaaacaaatattcaagatctctttcttgatatgggccaatttgatacgaaacattttccagccataacctttcgttttactttatacgggctataggcccattatgggttaacgtgtaggcccaataaggtgttttttcaatttggtttgcatttggtgtgtgtgtgtgtgtcagctacaatttctcaaggagaggcgcgtgtaaatcaaacggataatcctacggttttgatgaaatggcttctcgtagacctcacaatctctaaacatctcttctctttatacgctcttcttctagaaacctctcttacctcactctccttaaacctttaatagggtttttaggttactctttgttcaactactacaaactcttttctctttagagattgagagattgtaaaaaaatctcaaatcttttccttcacaactttcaaatcta

SEQ ID NO: 13864 - DNA, 3000 bp, Unknown
  misc_feature (1)..( 3000): cDNA_ID_3032467_gDNA_ID_2214662_Annot_ID_188913 3000 nt of promoter + ATG
catgtgaaatcaattgcttacccattaacagaccaaatgaagcctaaatctatacttaaacttctaatgtaggtgctaaaacacaataacccaaatctaattggattgaatctcaaaatcctcaaaatatgtaattcaaagcttttgaagctctctccatacctggacttagtagattgatgcagcttgcaggaggagaaaaacgacaatgcggctcgccggaggaagaagcccgaagaagaacgagctcgagctttttctttttctttttccgtttttttttttcaaaatgtttagaaatacaggggtaaattcgtcttaacacaattccttaacacaaaggggatatgaagactctaaagtggttttgcagattagttgtcccacaaaagggacacaagagatgatcattcgattataagagggaggaaggaagaagacgaaggagatgtatatttatttttaattcttttcatcgtttttaaataattatttaaattagattatattattaatattaaataataacattgtatttattttgggttgtgataatcaggttttaattcggtttagtctattgggttttggtttgacatgggtttggcacagtaaatcaaagataaaccgtgaaactcaaatttatggggacctaggattcgaactttcgatttagggagaaattggactttaacttccattttgtggagactgagatagaggttcgaattctgtgtagttatggtgttatatgaaactttgtagggagacacaagtcgtttacccaaataaaaacaattaaaaattacacaaaaatattacgaggatacgcatacccgttaatgtcttctaataaaatcagcaaaacaaactctatgttcaatgcaaagcctcctcgcaaattcccgtccccatctcgtagcactcctcccgccgatgcaagtcatggattacccttagaaacactgtccgtattaagtttagtccagcccacataaggtggagaccgtgcaatcaaccttgttacccacgcaggtttgatcacccttcccatcattacgaagctccattatgtggtaacctacatctttaaggatattcatgaaactcttcgattgaggaataacggcattatgacccgtcttcaaagagcagtggttaccgaaactttctctttcattctctccaaccacatccgactatagttccgtagtcacccttctccttgttgatgagcaaattcaagtagctcttctcgtgccagcgagtatctcggccatggaacctcatcaacgtcacttaatctattgactatgactattgtatcgtctaccgctttacccgtggatgatgtgtcgacaaaccgtgttatcacttgtgccaattagcttcttagagttggcttccaagctttcatggatcctttctcgatttcttctagctatccttttgtagcttttgcttgtcccttgttcttatgttgtttctgccttgttcctagccttataacccttgcatttgtggtagttctggttcttcttatattatgatgaatgaaacaagtattttgacccagaaattttctttcataaaccgtttttattaatatgaattatatttggttatcctaaattatttttggttatattaaaattaacgcgacttgattatatatttgtatgttatatttaaatatggttatattaagtatgttaaacatgaaacttgatgagtatatattaatatcacccataaatttgcaatttgtaccccaaggtggtgcatatatcaaatacttttgattatctttaaactgcacaaactttttcgatttccagactaatacaccaattaataggctattatatgcctcaaaccgaccattttcatggtgcctccaacgttcacatttggataaatcggaaagaaatagaaaaccagaccataaattttagtcaaaccaaaaattagaaaattggcaattgataccagacaaaaaaagatatgttacctctgtgtctaacgctatattctctcctttgttatttatctacttggattgtaaatttggctcctagttctatatatgaaggaacatatccaaggtatgtgttatttgttaacttaatcattcactagttgtttcgtatccaaaacaagagttgttgaaatcttcagacacactaactattcggctccgggttctatcaagatccaaagtatgtggtataaactctgtcattccacactaattatttaatgctataaatagctttgatcttctccatatttctttatttaaagatttggcttttttacctttgctttcacttctattcattgtcttcctctgttccattggtaacttccttgttctttcatctaagtgttcttttatcatagttcttttactgacactttatacttatctagtgctctcatttccttacgcagctccaaattcaaacacaagtgattttgtcttagactgtctcatgcgataaggtaacactactatatattttggtgtatttcatagattgccataagattatatattttaggattaaaagcttaacaatatttgatagaagtacgtgggaattagaatttcaatatccttacgtagattcgtttaaagaataactaattctaggcttttgcatggtgtatttttatttttagtgtgtttgactgtttgttattttgtaaatcaattataataaccaactttggattcagtgttggagctagttatcttcgatgcataattttgttttaaactttctcttaaatttttcaaagtttttaattttcttttcaattaccgaagcacaagttgtaaaaaaagtttatatttttttttctgaatataatttaactttatattaaaaaaaaaaatgattataattaacttttcgccatcatgattttttttcgcagggtttatttcttttgaactctttgctcttaaaccggtggaaaaaaaaatataaagaa

SEQ ID NO: 13865 - DNA, 3000 bp, Unknown; identical to SEQ ID NO: 13862
  misc_feature (1)..( 3000): cDNA_ID_1808564_gDNA_ID_2214662_Annot_ID_188909 3000 nt of promoter + ATG

SEQ ID NO: 13866 - DNA, 3000 bp, Unknown
  misc_feature (1)..( 3000): cDNA_ID_3032493_gDNA_ID_2214662_Annot_ID_188903 3000 nt of promoter + ATG
aatatggtcaaagtttctttttttcgggtactcaggttggtaatacataaacatgtgaattaattaaggccaaagtatgtgggctaaccggagtagcattgaaaacattagaaatagacttaaatatatacattcaaaccaatttatttagatctttcagattaaatcctagttaaaggatttttggagattagtttggctgggtttggaccggcacataaaatatttcaaaagtaaatatatatctatagacttgattgaatggatttatgtataataatattataaataaatttttaaaagctttctatatgatattatatatgatttttacattttacaattcaacaaaatttaaatttaaattttatatttatttatctaccataaagggtttagattgaagtgggaaaatggcttctttttttaccccaacaatttgtttttttttttgtctacacaaattcttcattaaacttaaatgatttcaaaagaaagagtcgcaaacggacccatccgaagtacgaaagcaaacgccaagcaaataatacataagcagaagataaaagataggcaagaacaatcctaacactcaagcaatcaacatcgctgcagattccatgaaccttgataacattagaaacaagaaatggaaagacgccttgtggaacaaagagcacacatagtgatctatcgttcgagcttgaaactacaactagggcagagaaagcaatcttgaaatcggttactgaaacaaaggcaacaaaacaccaaattgctgaacctttgaaaagaacatagaaaaaagcctctgtaaaccatccttcacaaacaggggttgaacttgcaacaccgatgcaatgacataaaagctaaaactttaaggaaggtggtgacgatggaagagttctctcctgcaaagaggaagacggtggaaacgatctctcatggcctcgacataaggaattttaataacaaggcagtggagatgaactagacttgtagatggttgatgatgataacgttctctcttggtcccaacaagcaatatgttgaggagtaattggaggctaataggagaatcagaagatggtttataccatatcaacaaaaatggggtttaaggaaaaccaagatcaatgacatctctttctatataagagtttcgatcaattcgaaggttttgtgatgtaacggatggatcgctgcctatgatttccgtatgcgttaccagtatttcatctgtaaaaagaagatgattcccaagcaagaaagtcacaccaaattgacggaaattatgaagacgattaagtacttgactaagaaagcggagcgtaataaactttatcgtttcttcgttacataaaccattggttatatctgtaatctcgttgataattttgtatacactgatttatataaatgaagtatttttagatgaaaaaaagaaaattatgcatgagatatttaacaatcatacgcaaactgattgacgagtatctacgacagaccaagcttaaaaagaaatacagctaaaaaatacaaatgaagtacaacaaatatgaccagagatgaaaacatcgtcccgtttatatagttttaagaattatttttgttcaacacttctttttgttgttaacgtatatttttgagatatgactgtattttttgaagcgatatgttttgtatgttgtgcaaaatgatatactcattaaggaatactatgcatcactgcatcaagtgttttaaaaagaatattgattactttgtctctttcaatatttcgttttcaccattaggccctaccttccctccctcttttgtcgccacattatcaagatttaataacacccatttttatacaggtaaattagtaaatgtatatcacagttaagtatttcgttttagactttcagtagatatctttagtgtattacacaatcaatcatgacgatcaaatttagatgttttcctaaacgactacgatttgttttgcactttgaaacatgatcaaataggtatgaagttacagtatatagtagatcaaatataagtcttaattaagttttgttgaaaaatttagctttaaattcagtgtttaatggttttggaaaagtttaatttaattatatcgtcaatcaaataaaatgatatattagtgagaagaacaattttcttaatcttgtagtacgtaactttaacattaatactaacttgcaaatttaccatatttgctaattattaacctattcaaacaaaaggaaaatatggtattcagagaaataaagctccaccaaataatagaagatagactgtccgcagatttctattttcgaaatgttccaaaatcatgaaaagaatgaatatttctatttatagttcatgtattaaaatagaagaacttcacaaaattcgaaaatatttttgttatgtcgttaaagtgaacaaggacctattctctgtcttcttggcatggtcttcttctttagtcaactcagaaaaacaaaaacaaaaaaactcataagtcataacaaggagatgaaacgttgatttttacagaagatttaattattttcgatttgcatatgtaaacaaaatcatttcgtttcttttgtaaataagcattatagttttagcgtatgaaaaaataaacagtatagtctgtactaaaatctacacccacagttactttgccctaaaaggactgaaaaaaccaaaactggtaagagagagagagagagtgagagagatggtgaaatggagaaaaaacaacaaaactaacaagcccattgacatcgcagcgactcctttcagttttataagaagacaagattaaacaaagatgatcttactctttagcgataaaggcgactaacctagacagtttcttctaacggctcttactcttcatcctctgctcagctctgccgcaaacttctctccgacgactccttttgttatttctcgtcgccaaaagtgatcgccggtgactctactatg

SEQ ID NO: 13867 - DNA, 3000 bp, Unknown; identical to SEQ ID NO: 13864
  misc_feature (1)..( 3000): cDNA_ID_2704401_gDNA_ID_2214662_Annot_ID_136536 3000 nt of promoter + ATG

SEQ ID NO: 13868 - DNA, 3000 bp, Unknown; identical to SEQ ID NO: 13863
  misc_feature (1)..( 3000): cDNA_ID_1813111_gDNA_ID_2214662_Annot_ID_136537 3000 nt of promoter + ATG

SEQ ID NO: 13869 - DNA, 3000 bp, Unknown
  misc_feature (1)..( 3000): cDNA_ID_2705709_gDNA_ID_2214663_Annot_ID_136538 3000 nt of promoter + ATG
aaatatcaaagagttcttttactctcacttatgacacgctaaattaaaaccactaaaaaccataatattaatttcacggctacaagttgatgcttcctcaaacttactacgttccaatgccgggcactgattaaatatggacttcacatctttttttttttttttagatattcatttccaaacggtctattgacagatgggctaagaatttcacgggttacaaaaaagtggtccaaatcggaacataatagaaacaagatcagtaaaacgacggttcaccggccggagacgcagccttcaccttctatatccgatgcaaatttaacatatttcgaacgaatctatgagatctatatgagaattttgcttcttgggttttatacggttcgggaaagtggatgtatcaagttgtgacaagaagcatcaaagaatatgactttgtccagtcatttttatggtatagtgatgatcgtcaatgatcataattggctaggaagaaagagcacatgtgcattcatatgattatcataattgtgcatatcatatgcttttatgggcatagttgtcgatagaaacaaaacatgcgtcgaggaaaaaacaaaagaatagttaaaacttagaatctttgattctcatgagccatgaggccatgtgctttttctctcccacgttatatgttttaccatccttataatttgctcccccgacttctctcactttcagacgaaaagaactgctgtcgcgatttttgaacaattatggaaaataatttagatgtgaaggaagccgtaaaaatagttattatactttttgtccatatatatagaattcgtgatgattatgttgtggatgacaattggtggtagatagaaacctttactatcgccattgttatgggctaattaatcaagtttggtaacaaatcaacataataggaccaataacaacaactactgcagatcttactattattctttttattaattcatcagtatattttattattttttcttgattgtttatccgattgatcttgtaagagataacttttgattattacataacttacttcaacatgttaaatgacacaataaaatagacaatttatttttgatatccttttgaaaaatattaaataaatatttgtaatgactgtgttgcactaaaaaatcgagataaccccatgagtgataatttggtaacataatctaaacttagagacaattaactaattaagttattatctgagaaataaattagacaatatttttattcgtgtgtgtaatttttgtggtataatattttttcttatattgtttcaattctacggatgttttggataaaaaggttaatcaaatttataaaatgtaaaattttgcttgaacaaatgaaccaaaatgtttactaattggctaattgctggaaaaaaacagttatataatttttgttaacaaaaaaaatgtttgatgtaaataattaattcacagctaaaagtcaatttcctcatttatttttgattaaagaaagtaataaaaaacaattaagtataccattcgctgtacaagagtcgtttagttctgtcggctcgacaaccgactcaagccggctcgagtcgctaagtgaatccactcgctgtctgtcggtggacaaagccggctccaatctgatcactctctctcaccagcacacacacagctctctctcttccctctctctctcccccgctttatactttgttgagtcaaaatcacagacgaagaagaagaagaaacctctctctcactcctctctcctttctctcgtcttattcgcttctcttctacgtaacagattgttcatcttcttctccttgttgcattgaggtgagttcaatttgatctatcaatgtctaaatgcatgctttttgaattatcggatctcttgtgtttgatttcattgatagagatccaattatgatctagatctgaagaatcctgttttttgagttcctattggttaaaaagtttcctcatttagctttagttcgaatctggaatgttaaacgattcggatcgagatttagcagtagtagaattcagttaggtagagtgatatttttatactattagtcttcaattataatataattgcattgagcttttcctacttcactgtatcgttttctattgtaaagattgatcctttttatatattatgcagggggtgttgttgatgttctgacgatctgatttgagtagatctgggtagggggcaaggtctctgggtctacttttgatttgagaattttttaagtgaagtgaagatatgacaagtgctcttggatggagatttccttccactaatggaaatggccttgccccaagtgacacggtaataattacttgattcagtattaacattcatcacacgggtttatggaaaagcttgtttagttgatatactgcaatctttctgagttgcaaagtcagatctggtgtattagcaggatgattaagctgatatgtcccttgcattttgaatctgatttgaaaaaagtacttgagctaagtccattgttaattaatggctttgtaccagtcagttatatctgatagagtgtcatgataaaggttatagtttttccattgcataggagcgaaaaggtcttgttgctcttttaacttattttctgttgtttggtcttgattgcaggagagaaatggggatatgaagatgcatgattcagagcccccaactccacattcaaccacaaagatgagtttgaggtaacgcatatatgtatttggtactgcatgggagctaatcatcgtgataaaattgaggttttatctgtatttgttgcaccaccatcttggtttaacaatgcctgtggaaattaatattatctggattggtttcctatgttatcctttcaaatgagacattttaagcagaaaggcacacctattagcgaattagtatctaactttccccatcccctgcagagaccggacaaccagc

SEQ ID NO: 13870 - DNA, 3000 bp, Unknown
  misc_feature (1)..( 3000): cDNA_ID_2704421_gDNA_ID_2214663_Annot_ID_136539 3000 nt of promoter + ATG
tccattcataatgtgaccacatttgtttctgtaagagctttggagttttaataaagagttttgtcctaccgggaatgatcctctataataaggttctatcgaaataaatgggtagaattatcatcattttgaagaggcatgttagggataatatcccaaaaccaaagtactcttgcattttcagtgatatataagagacatgcatataacaataaactcattgctgatagattttgagttgaaaatctatagtttctcatttggtatcaatagtaaccccaaatatgtataatgaaaaagagggatttgattcgaaatcaagtgtacactgaaccttacgttaccatgtaaacatgcttaatcaaatgacacgtaatatatataatcaaaattaacgcaatgacataattaaatcattttaaaacaatggcatgtccatttaaatttctcgagaaaggaaacatagtaactagaccaaacaacctcgtttcatgaatttggggctttagagtttgcgatttatccgccatatcattcccaaacatcaatgctttcgtcgcatgtgtatatctcctctttgtcaaagaaatcgacttccgtccatagggtttcatgtatttcattcataccttattaattgtgtttgattttatcagtgtgtttgtaatggtgatttcgtttctctttgtgtatgtaatgttgatcttgagatagctttattgtagaaatgagtttaattgaaaggggcattccgaaaacaaattgatgtgatgacattagttgatgaaattttcactagagccaaacaatctttaaccgccttcattcgttgtacttttattatatgaaaaaaaaaacacagattttaaattcattcaacaaaaatatgtaagataattatatgtagaatacatttgacaagtattaaaatagataaatattgtcattcttaataatataaaaatgaagcaaatactcttcaaattggcacttcaatgcaatgagtatttgacagtgcaaatacccttcaatagaaagcgaatgtaaggcatgctcgggaagatgattggccaacataaatcagaaattgtacttacggtttcgcaacattctttcttgatcccatggacatgtccgtggaaaatcctctttatgctctcgagacattcatgtggtgggtgtttaatcgtctgccaacatgcgttaggatctatcggttgagcactagaacatgaccaagttatcaaaaaagcaagaaccatgagcagaaaagttgtcttcactgtcttagatgcgatttgctttatcaaattataaaccaattaaatgaatttagtttgtgacacttatgttgttgatgatgatgctaattatgtcagctttttatggttgttcattaccatatgttttgaatagaatggttagatttttattttattttgttaaatagaatttttggattttgatttacgtaaattagtagttcttcttcttctgcatttcacctagtcagaaaaataagcataattcagtaacatattaattgctacccaatttgaagatcatatagaatataactatataagtgattatgtgtattaaggcatgcatgtttttaattagatatagatatgatcctatatctaggataacatatcttttaatttaattgttgtagatttttttttttgctatgatatattcatattttactcttcttttcaaagtataactctttgtgtatacatttccttatatatttcttcaatcaacatgcacgacatcatttcttcatggaaaatcatcttcaatcaaataattttgcaagatattttatgttgaacttctgatgaataaacatttcacgtaaagaggacattacaatgtccgaactgaggaatgggtaaaaatgaattatattaatagaaaaacacacttaaagaataacttttagctaccgtggtatttacagagatgtcatgctgacgtgttacaaccagacaaattctcaaccaacttaaatcattgtccatcctttattagattattcacaaaattaactattagtattatatacaaatatctttgtttttaatatatagacatgaaaattatatgttaacaaagatattaatatataaactacctttattttttctaatcagatattaccaatacttttgtaaataaaaatatttcaaaatatataaaacaattaaaattaattaaattataaatattcagaagattctaaaaatataatattaattaaatttaatcagaagattccaaaattttccgttaaaattatgaacataagaactaatttatttatagaacttatatacatgtttaaatcaatcaatgtatgaataataataattttaatacaaaaaattgctggttcaaattattttaaataaaatttacattacataataaacaaacaaatttcaaatttcaaataataacatagtaacttttgtaatttactacaatatatttatttaataatttatttcacatataatgcgggttaactatctaataatagaaaccaaaaatttgggcctaccagaaaaaaaaaagaaaccaaaaatttgaacaaatattattagatatatagcatatattttggaaagttctatacttgttttttcaatgaaaaaatgaagaagaatagtgacacaattctccaaaacggttaccaattaaaatttcagtgacttttgttaagtcgtccattgtaggccgcttattgggccataaaagcgataatagtcagcaaaatccagtagccgtatttactaaactcgatatatgatgaagaatgaagatgaacctgtatccaaacactccatattttttgaatacagataaccatgcagccaaacgttgcttaacctctgcgttcgttatcggcgatttcgaaattcgaatcatcatcatcttcctcgatagtcccgcgctcagtcgaaattcaaaactctctcttccatg

SEQ ID NO: 13871 - DNA, 3000 bp, Unknown
  misc_feature (1)..( 3000): cDNA_ID_2704409_gDNA_ID_2214663_Annot_ID_136544 3000 nt of promoter + ATG
aatatttttcatcatgattttagcgcaaaaaaaataaaaaaatcaggaatctgttttaaaattcactaattgtttttaaaggaactgaactgtcctggtaattaattaatggtgcttggttgttctttagaaaaaaaaaattttttctaaagacgacgagaagtaaaatgatagaatccttaaacaaaaagaacaaaaaaaggtaaaatgataatgattaggttatatattcctcatgcacgacatcttcctacatgttttttacgtcgcagttctaagcatttcatttctctattgattattacattattgggtaattcattttgaaattgagaagttccttttctgcaaaccctaattgatgataatgtcacgataaaatttgaacttttttctatctttcgatgaagtggatagtacttgctctatgtctctgtagatatcggtcacgttgtgggtggagacaagtttgattcgttgcacgtgaagtcggtaaccagtacgaatagaatcaattatagattttttagtgtaggcatttgtggattttttaaaaatgttatttttacctatttgctatttttaagatacttaaaaatgtatttatttacgattagtttttacaataatatatattttatactaaatattatatttcaaaaataaatgaaaccgattaaacataaatataacgaataaaatacatattaaatcatatttttatatttttaaaagaagcaaaattcataaattcttttaaaaatcaaaatccactgatgccattaaaaatttgataaatccgtaattgattctttattaaggcaacataaaatttgatgtgcatgcaaatcaagtctaagatatcgtttgagctatcgttcaaaaaacttgaccaacaaaaaaattactaaaacttatttttattattataaaacaagctagcaaaacatttgagattaagttgtaatatctgcatcagaaaaaatggcatatccacacatgcatgtgaacatgtgagatttctctttgtcttctatttaattatacaacatgtaacataatttttccaaaatattatgtgaaacatagtataatctgatttcactgcgaaataaacgaagtgacttgcatatatcaccaccaaaatctttacaatattagttgtgacgaaaaagtaaacaaacattaaaagaaagtagtgtcgacatcatcattcatcatatatgtggataaaaatatctgaagagtcaggatctcgtgatcacgaactcaagaatatgatgcgtttacctcaaatctcaattaatcaaattttttttttccctaacacacaaaaactacattatgagattttttttcaaaaaacactattatgggaatttgcttaattgttttcttttggactaaatgtactagacgctgactgatcagtagaaagctgttaactaccttagccatgtggcgcttattaaactacaacagctagcagtgaaacctaataagaacaaaacgtgttcgattttggtttggcgatactttgtctcattataaaattgcatgttttataaataaagatcaaataaaatatggtgattatatatatatatatatatatatatatattgctgaaacaaatccgtgcataatatatcgcaagtcttaataaacttaaaaaaaaaaaaattgtttatagaataacaaataactaacactaggattgtttttgttttttttaccgtcatagttttatcatactttttccttttgcaaagtttcaataatattaaattgtaaatggttcaaaccaaaaaagtgtaaaaacaaagaagcaagcatgtgaatgtgaattgttgggaaaaaaaaaggagatttatatactcatgtttcaaactcccattaccttgcaccaagatgatataaaagagcactatacaagatttctatcttacaaacatgggcttccgaaatttaatgatattaggaggcagtaatatttttctatatagatctaaagatgctataagtaaagtttctctattttagaattcaccatcttatgtgttgcatgcatgatgcattgcatatagttaaatccattaacgcgtcatagacaataatagatcattggccctcaagttcttctcttcagcagtaaagttcgacttcactttcttacaagaggttagtatatggaccagtggaccaaacaaagaaaacatttgattaattaccaaaaacaaatatctcaatattcttttgtcagcatgatcaaattggaagggaccacgtggcgcttgatgggaacgctccaacgccaaataaccaaaagatatccaaaggaagccaacaaggaagtatagtggaactcgcactcaatggtttcgactcggacacacacaatatctgattttacttttcttttttttttaattgcaagtttgccactataaaatcagtccatacccttagttaacaacccacattcactctcatttccatcaaaattataacttcattttacattttgattaatatcctaaaatgggtaatttcttgtttcttgcaatggtcacttacatatgtctatctttaaaacacacacaaaattatatacgtgttactgatctgttatcatctctgttttaatcttataatttcagttagattcatcgaagaaaatattactaaaatgttggagacaaaggccatctcaaactcggaggttttatatgtcggaggagacgacggagacacgtcaccaacgacgaaagttcttcatgattttcagatcaacagcggaggaggactgataagatcatgggttgattctatgagagcttgttctcctactcgccctaaatccttcaatagccaatcttgttggattgtaatgtcttcttgcttcctctgttttgtttgttttaatcttttatttcaaaaaattattaaacgagagaattacaaattttgcagaaggaacatccatctgctttgaacatg

SEQ ID NO: 13872 - DNA, 3000 bp, Unknown
  misc_feature (1)..( 3000): cDNA_ID_3032585_gDNA_ID_2214663_Annot_ID_136547 3000 nt of promoter + ATG
atgtttacacaaattaagtaataaacccacttcccactttgtggcttttgctttaaccacaatcatcacgcttttggtttgtggtcactgcttcggctgctacagtcactcacaaggtccacaattattcacgatcgactcgactctttgacaacgacgtttctaattataaccctcgtgatttaatgatatcgctaggacaatgttcaccataaaaacttcaacatataaacaagcaagtggttgtgtagtactacgtataagctttcagtctttctatcaatagttgaatcttgcactctagttcaattattcgtttggaggagttatgatccatggtccaaagatatttatagatcactttggtctaaaacttcttggttaaacaaaaaaaaacgttgaaagatatacaataaaacctctataaattaataatattgaaattgcaaaattttattaatttagagaggtattaatttattaatttatcgataaattaatatttattaatttatacagagattttcttaatttagtaacttttttaaaaaatttataagatttttttcattatagaaaataactttctagaaccagttacaagtataacataataataatgactaccaaaaaacaccaaaagttttgatacactaaaatatgaaaactatagtcaaacaaagaacaattatgaatttaagcaaaaaattattagaaaatatattttacagattttttttacatataatatatataaactaaattttatcccgcggtgacaatttatctttttaaagttagtataatttttttttgcaaattgtatctatctataatatatttttattttatagtttacaattgttattaagtaacgtcctgccaaacccgttccgtaaaaaaaccatttatttatattaatgttgatcttatttatgatatgtttataaatcattgtctaaatttttttgtcgatgcgggacgttgaacccacacattttttgctaattggttaatatatgttcatttttaaaattttgaatcataaaatatgacggaaaaaattaagatgttttttaaactctatatattatataatgatgttaaaaaattgtaatatttcaaactatttataagtttaaatattaataatgttttataaattctaaatatataaataataatatttaaaaaattaatatttttgtttataaggtaatgacacaataactcttaaagcaaggatttagaagatttaaatctttaattaaatattttcattaataaataattaatgtcagtgacatgacattataaataagttcaaatacaaaatttatttatttaaacaaaaaacgtttagtaagaataatatttatttaacaaaaaactttgttttaaaatattgttaacaaatatgtttatgctaattttaagggattgatttgaagtttggtgggattaaatttgattgataatgtgattgacaatttaaatcaaaaatttaaagtaaaattaattattttggaaaaaagatttaatgctaatggcagtaaattgtaaataagtcgaagtccaggatttatttgctaaaatgtatatatatatatataatacatttatacaattattaatttatgatattgatgggatcatatatttacatagcactttcaaaaaatttattatcttattaatttatcgatttgtgtcactttttatactggtctcaagttcggaccggaaaaatttattaatttatagaagttattaatttataaagtattaatttatagaggttctactgtatatcatagacgtatacgacatagattagagtataaaaaaaatacacatcgtcacctatgatggaaacttaaactacatgcatcactgatcacttgtaaacatcttcgcaaaagacttcacagcaaataaaaggttttgcaacatattcttcataacaaacaattctacttgaaccataattatagtgaattttttcttacatctacaacacatgtacagaaaaacgaaacacactaattaatatgttagataaattcacgtgtacaatatagcaaattgcattttcttggaattccattagttacaaccttcatcgactatcgaacgattcaaattacattagaatttgttctttgtttcatagatttatgtatcaacgagttgtcatttcacgcaaaattttgattaaatagttcatatagtcccatcgaacttgattttcatattctacctatattaattagtgaaaatttgaaaatatctatcttcacaaaatcacaataccttaaaaacctagttgaattctattgactattttttagtaacgtttatttacattacatgcatctagattttatccaaaccaaagtgcaaaaatggcgaaaaatattttaccatctcctgtggtaaaaaaaaaacatttaccatctccagtacaaagtaagtcaataattattgttgaaggacctacgcactactactaggccctagttcaaaaattggtctctcacgcgccatcacgaaacgtgacaccacatctttgccacgtgtccatacagcttccaaacaacagatcgcgcttggcacccacgcgtttctcagtggccaaacgatgtcgtttaactgcagtgtcccacgacaacaaccgcttcttcttcctcatccctcgggtgtcttcgagtgtgttcacagatttacaaagaaacttgtcttcacgttaatcacgccacgtgtctgaacccaatttccaacgtgtctctcacattctcgaattcgactcttttagtggttctcgtcctctctgggcttttagactgggctcgaaccatctccattccaccgataacatcgaaacccgccacgtgtcctccctcctctgtctctcgtctatatatccacgctcttgttcgtcgattcgagatcacacacacaaccaccaaacacaaagcttttcaaaacccagagaaaatg

SEQ ID NO: 13873 - DNA, 3000 bp, Unknown
  misc_feature (1)..( 3000): cDNA_ID_1808999_gDNA_ID_2214663_Annot_ID_136548 3000 nt of promoter + ATG
ctcatcaccagcaacgatccatgtttcaatgtcaaactttgttgatcctctctgctgcttctctttaacctcttcttagctggtccactgtctcctgttttccctgcaggttcacaccaaacaaaagttggcttgttcctggctatgcaggaaaacactttagcatgactcaaatgtcccattaccttgggaagattcttcatctttctttttcttcaacacaaaatcacgttcacatccaaacgagactgaagcaatttctggagttggaccataaatcttttcatcatctgcatgccaagccacataatcactggcacctttgtatctatttaagagcaagctgttgaatctgcttccaggaagcaccttgtaaatctgacaagacgaaatagaaacgttttagttcaaacaaccactagaacacagggacatagcatagttgttttcaatcttacagcatccagaatctccttgagaggtgggaaatcatcccacgaataggaggtaggtcgatatccactgtacaccaacgcagtcaatccgctacttgcaacataacaagtatctctcggctacaggtggcaaatgcatatgtattagaaggccacaaacacaagttatacaggacttcacatgattgtgacttagatttctgagatacaagttgaatccaagcatggaaatggccctggcaatctttgttcctcacattgcacaatactcaatgtaacccgcgaggagacacaataaagcttcaatggatcatatgtatacaaaaacaaatgacagagaaagaggaagtggggaaacctggaggcaagatcgaccaaagacacgaatagtaggcctggtccaaggaatatgcttgtcgagataatcgaagaaagtccaagattgttgaaatggaagaaacctctgaatgtaaatgaggtcgcttccatggccaagatcaatggtttttctagagggagcgttgctcgatgaaggagactccaccgccacaatcgatgtcaaactcatcctccgctacacagcaaacatacaacatcactcagaaaggaggcctacttctctagaagctcatatttagtgtataagcacaagttgtcttttacgtagtaattgaatgagacaaatacctgatcctgatggtaatggaatcttttcttggtatctgaatcatctttaccattgtcagagaatgtgtcactatcagttacttcttttagcttgtgccctgaacagttcttcctatatgaaacattgaaaaggcttggaaccaaaaaaccattttgtgaagaaaaccacattcaaaagcagactaaatcctaaagcatgcaaatttagtttaagcaacattgcttcttcccaattagtaaatccggaagaaacattcgcatgaaaaagatgaagtcattacttgttaattagtgattcagcttcctcattggtgatttgaccgtcgctgattccatcagaagacggctgagaaaatggataatcagaacggaatcacacttttgtcggaacataatcaaaactgacgatgagttatcgccggaaaacatacctggttagagcgattagcggcggtggaattaagtggattcgtcatgtttcgctcctccttaatctcacctttttctgtgattctaaacaaaaacggtaaccgaataatttaaatcgaactaaaccggaaatgctaaaactagaaaatcgaaacagattaaaaaattcgattggtttcagtaattgaacaaaccgagatattcgtgtattcgatttcgaacccttgttaaaagtttacccgagcaatggagcgaagaggacatggtcgtattcagtctctccagtgtctcaagtccgagagaaaagtctggtcctcttagtgaaccaaaatcaattttatattgttgtcgatttattacggttcaatatttgagatgacggtattaagcacaggttttgtacggttcaatttcggtttaatcctgttttgtaaagttaaaacgtaaaatcccaaaaccgagaaacttgtccttgtctttcttttcttctccaaaagagcttgcttagttacttgctttcctgaatctgatccctggttcgtttctcttctctccttgttaaattaagagttaagtaagtttggcatcgagtgtctgttgttgtgatccttgtttattctcgtagcaatctcactccaaagcttctaagttataatccttattttaggcatttacttgatcccaagattggagtctattaactagattatgcctaatgccttaagaatattaactttttttatagctatagatatatattttcccatatttttaggattaagattagggtttaatgattgaataatatagttatacaagtgtgtgactgataaaatgaaacaaacgaaaaatctttcccggtgacatcatcagccgccggcgactagctttctaactctggtttgcaaattcaaagggttggttggtggctaattttgaacatatataaatgtcattttaaaatatttttaatttcattttcttaacattgttccaccaactcctcccacattctctccgcctctctcgtttacaaatcccacctcaaaggtcgactctttatctctcttctcaccaacccaacttctccaatggcttctcagagttcagtcgccgtcatttcctccgccgccgccagaggtgaatcattcccagattcaaagaaaccaatcgggtcagttcggttccaacaacccctccgtctctccttctcgtgagtttcgtctctattctaatcttcgattcaatttcgtcacttttgagcactcttttgattagaaatctgaatcattgctccaatcactggtcaatgtagttgacttaggtctctgtaatggttaggtactgtaagtcagggaatatgtcatctagaatctgcgctatggccaaaccaaatgatgctgagactctttcatcatcagtagatatg

SEQ ID NO: 13874 - DNA, 3000 bp, Unknown
  misc_feature (1)..( 3000): cDNA_ID_2714125_gDNA_ID_2214663_Annot_ID_136552 3000 nt of promoter + ATG
ttttaaaaagcatttgatttagctgttttatcgtaatttatctaaattgtttttttgtctcgtcaatctagtgacactcccttctgtacggaggcatgtcgagaaaaacagcaggaggctgataaagggaaacataaattagagaagataattgaaaaagaagatgaaattagataaaaagttgaaaagcatactcataacaatgttgattgatttcatatattaacatcatcctaatttttattcttgtcaaaaaattaggaatgacaatagttttttccccctacattttagtagttaatatttcccattttaaaaagtcaaaccccatcatgtatcatatatattgtaagataagatatggtgaaatcttcttgatatatgtactagatttctatgtaagaaaaaatttataaagcacatattttattcttttggtaaaaaatttcaaatgtaaatgtttgagaccaaaaaaaaactttattttgactagttgtagattttttcttctttttccttttttttttttttttttttttttctttttccttttactatcttattctctatcttcttttttaatataaatatgggtgtgacaggtatgaaaaaaataaaaaaaattagaatttttttttcttctctcattttagtttatttctgaaaaaaatgagttaatttgataacaaataaaatttgtgtggattgagaagaatttagacgaaaaaaaattcttcaagagtatataccagtgcacactcgtaaaatcgaacactgttttgaaatagtattaaattaaattaaaaactagtctatagtattaaattaaaaactagtctatagtattctttcgcccaaagaaaaaaaaaaagaaaaaagtttatagtattaaactaaaaactaatctataatggcatgtcggaatttcttttaatcgatatatgaaacattgttcagggtgattttccaaatagataaatagggttcgagctcccgaacttatagcttttgggccttcctcgtcttcagtttggacagctacgtaggattctatataaaatcacaaaactttagaggcaagtgatgttcgtcttgcgttaggactgctccattgcaaacaagtattgtttatggatatttgtgaaatttctgagtgaaacaaacattttccttgttttcaaatttcaaccaagtctcatggtctgttttactaatattagtgtttaaaactctataaaacacatccttagtatttttcggattaccacatgtttgctttttgttgaagaaaatttatctctagtggctagacatacgaacatcgaaaatttagcaaaacgatttcttttaaatttcattattttcaaataaaacaaaaatcttaaaatgcttggatttttaaccatttaaattatcaccttttagttttttttcttttttttttcgtgtgcaaggattttattgattaaatgcgtttgagttatacagagccgaaaatgaaaaaatcttttcggatacaaagccgacgggtacatagaaacccccagagacatgaggccaaaaaaggcgaacaaacaaaacaagccttaaaagaaaatatacaaagataacagttacaagtaataggtaaagcctccaaaacaacaacactgaaaattcttcccaacaagcagccgattaacactttcatggaacaggtaacagctaccgaagtaatagttaaagtctccattttcttctgttttatagaaaatttaggtaatatttcatatatatatatatatcactcagaaattacacaaatattcaaaaaaaatctgaacattgggagcaaactttttgaagcaaatcagatcataaaattagataacccgtagttacaaaaaaaatacttattgttctataatataaactcagctctaatcagattccatttgctaatttaaccgtataaagatatttctaatttacaagattttaaaatacgagaatgacagtaggaattagaaaaaactaatataaagcagaagaatataatcgtcaacacgtgataaaataataacccaatggataatttaatactattacagaaccaaaacaatcaataagcaaaaaaaaaaggcaaagtcccggaacttgcgtcagaagaattttgactagaaagaaaaaaaatcaatttcgacggccatttttttctctcatcgtacggattcctatctctcactactcagatgcttccttcttcactttaatcacccttttcgattttcgttttccagctttttgattcctctgtttcaccaagtagacgaagtagaagaagaagaagaagaagaaagttttcacctttactctaaaagtttcactttttatgtctgctttgaagctctgagatcggagaaagcaatatctatggcggaagcaagacgattcagcccagttcatgaattaggtgaagtgaaagttttcttctttctgtagtatttgagatatttttgtttgcgtgggtcaaatcaaatctttatccgatctatttggtgtgagtattggtatatagtcatcaaagtttcaatctttatctattggaatctattcaaaagggcatttttatccattattggtgtgagtgatgatttgttcttgttgaaagtatattttatctgaatattcatcacttacttattagtttacttatccaagttgataacgaatctattctaaatcatgttcatcatttttagtgggttactttttacttctttactctttaagtttctatgcataatttatgattgttataggcagctaagaatatcttgggaaatttagtatcgtgtgttggttatactttaattagctgcttcttgtgaggaagttgactttttagctactacatcagaaggtactatagtgtctcttaaaagctttcttgatgaatgatatcttcttagttgtactaatttttgtgtgtcttctgattgcaataattgttgtccacag

SEQ ID NO: 13875 - DNA, 3000 bp, Unknown
  misc_feature (1)..( 3000): cDNA_ID_2714122_gDNA_ID_2214663_Annot_ID_188938 3000 nt of promoter + ATG
ctctgagcagagaaggcgcaaagtttaatgatattaaaagaagcacgtcaccaccagagttagagtgtcgctgctgcaaatcttccaaacccttgacttccttccaatcagtttcctctggaaaacgccacagtattttcccggacataccacatcagaatataataatgcctcaaataaaacccaatcgtttctattttctgggttagacttgatccggttgtcataaagcaacaacgccttgttgagaagaaaaagatttgactattctcatccagcgcgtgaacataatcaaaccaacagaaaaaaaaatccaaaaatccaaaatacccgaatcgaaaatatccaaaatacttgaaacccccttgaaaccatccgaaaatatccaaactttttggttagaactaggcatgggcaaattaatcaaacccaatgtaccaaactgtagcgaacaaaaaaattgaagtataagattaataattatcgagatctatgttagctaaatttgaatccaatcaataacctaatatttcaatgtggcacacgagatttgaaatgtaaaatggtaccagttcataagcgtaagatattacgtatggatgcaaacgtcatggtgtgttcataatagaaacccttcgtaacaactaacaacgtcaagttgttttttttttttttattggtcaaaccgtaacaacatcaagattctcgtgaactttaaagatacaaaatgtttttttgtttttatcctttcatttgaaagatggaacgtgaaaacaagactttccccttttgcgctcttacataaacgataaacatgaatgcatataacaaacattaacatatgtatgtgatcattcagaacatagtcaccaaatacttgtaattaggatagtttaatgatctccccatactaatttaagatacatatctttcttagaattttttttttattaaaaacgaatacattttttgtgtgttttatgtaatttatgataagtaaaacctaatttggccctcatcttaaatagaacccaattttaagagtcaacatatttttgtaaaattatataacagagtatataatatggttgataattcgagtttgctttgatcttttttttttcttaagttattgaaagagatgtcagattccaattcgatatttcttttgttctttggtactaattttgatctttctgatagaacaaataatgctagatctatataatttatcaaaactgaatacaagtacttacaatacatttttctgcgatgagaaaataaaatacttgcattgtgttaattaattcgctctttttatgaaaacaaaacctcttattcttaaactggttgacccaaaaaaaaaagacttcttaaaacgattacaaaagaaaatcaagaacatgggtaaacaaaaagttctcaagaagaagtgttaagaacttaagctgtttgaggtgaacaatcatatgtgacatagattgctcaataaatttcccaaccgaagctctaatgtcacgagtgacagattgtttaaccgctaagccatctaaaactctatcatcatcatcattgtcttgatgatcttcttcttgttcttcttctttaaaatcatcagcaagcaaatggagcggaactacggattcttgaagctcccactcctcaatactaagtccccattcttgataatccactcccgccatcgctaaagcctccatcgaacccataaaattagaaagtgatcttaaaatgtagtttgctttgttaatattttcttggaaccttttgagttctacttcttctctgatgagtaggtacgtgtggctaatgaccttactatatataggcatgtacggacgtgcggttcgctggcttctcctctgaattcattaccaaaagatatcacgtgaaatgttcaaaaatcaaaccgtctggattgaattttaattgtcaaatactttggttgacaaaaaatacattgaacgaaaaacaatatgaacaacaacattctcgtgacgctctctcaaagttgaagagaagaccatttgcagattgaaagtagtagtaatattaatcttctttagcccttactcatcttagtgatctattaaactattcaaattaattacagcgtaactaaacatagtaacatacacacaaattgatctcactcacgcgaatacaagaataaaataaaaatggtatttagccatacatgttcttgattttcttttgtgatcgttttaagaaaaatgtcaaagaataataccgcagaatagcgacatccaaagaataattgacatttcgctctctcttaaaatccctatcacagaattagatagttttaatggtctttgttttttggtcatcttgttttatttagctgtggttatgaaaagtttattattattccataacattacaatccaaaacacttgaagattggtgaaaaaaaaaaaacttgaagacaaaaatatggtttaaaaaaaggtaaaactaagtagataaattaaggttagtcaagtcaatcttaagacttggcattctccaacacatatttttcttgtaatatatatatatatatatatatatgcataattattaacttagagctagatgaaattatatatttcttgaagcattgacatgaaagaaaattgacttttatctaacttccaaatttcaattcattttataaacttcatacaagccaaacttatttaatttcaaaaataaaatgagtttaattcatagttttgatgtaaaaaaatcgctaaatacagaaaaatagaggataatttatttaattatcatattaatctttccttttaaaatagtcaaacacaagttccattaatttattattattcgcgaggaacagaaatttcagtatcgatcttcttcttcttcttcttcgccaatttcaacactttcgaaatctgagaatcttctgtgtgaatcggaacgaaattaacggtgttacggaggctagggctgatg

SEQ ID NO: 13876 - DNA, 3000 bp, Unknown
  misc_feature (1)..( 3000): cDNA_ID_3032569_gDNA_ID_2214663_Annot_ID_188937 3000 nt of promoter + ATG
tcatgtatgatttttaaaatattgtttattcactcaaattggtcaatttaaaataaattttaattaagctctaattttagttatattatggtgaagaaataattatgttttcctttaatttaatcaaaatataaaaggatatggtattcttaagtaattggatagatttttgtaatttctcatccgtaaaagttgtacatataagattaaacttcttcttttgttgggtcaacaaaaatataatacattcttattatattattttcttataaataaatatttaaatctcttaaatcatttaccttactaggaaatgtttgctaaaaattaaacatttacataacttcatgagataaggttgaaaatgatgtattacataagcttgttctattatatatacagatacaatctcatactgaaacatctattttcatatctaacttcaatcaaaaacttaattaggttttatcatgggttatcaagcagatctaaagcaaataagcttcttcacagatcaatgtggtttttgcaagaaaaagatttgtccaaagcttgatgacatctacatgtataagtacgttttttcatttttaaaaagcatttgatttagctgttttatcgtaatttatctaaattgtttttttgtctcgtcaatctagtgacactcccttctgtacggaggcatgtcgagaaaaacagcaggaggctgataaagggaaacataaattagagaagataattgaaaaagaagatgaaattagataaaaagttgaaaagcatactcataacaatgttgattgatttcatatattaacatcatcctaatttttattcttgtcaaaaaattaggaatgacaatagttttttccccctacattttagtagttaatatttcccattttaaaaagtcaaaccccatcatgtatcatatatattgtaagataagatatggtgaaatcttcttgatatatgtactagatttctatgtaagaaaaaatttataaagcacatattttattcttttggtaaaaaatttcaaatgtaaatgtttgagaccaaaaaaaaactttattttgactagttgtagattttttcttctttttccttttttttttttttttttttttttctttttccttttactatcttattctctatcttcttttttaatataaatatgggtgtgacaggtatgaaaaaaataaaaaaaattagaatttttttttcttctctcattttagtttatttctgaaaaaaatgagttaatttgataacaaataaaatttgtgtggattgagaagaatttagacgaaaaaaaattcttcaagagtatataccagtgcacactcgtaaaatcgaacactgttttgaaatagtattaaattaaattaaaaactagtctatagtattaaattaaaaactagtctatagtattctttcgcccaaagaaaaaaaaaaagaaaaaagtttatagtattaaactaaaaactaatctataatggcatgtcggaatttcttttaatcgatatatgaaacattgttcagggtgattttccaaatagataaatagggttcgagctcccgaacttatagcttttgggccttcctcgtcttcagtttggacagctacgtaggattctatataaaatcacaaaactttagaggcaagtgatgttcgtcttgcgttaggactgctccattgcaaacaagtattgtttatggatatttgtgaaatttctgagtgaaacaaacattttccttgttttcaaatttcaaccaagtctcatggtctgttttactaatattagtgtttaaaactctataaaacacatccttagtatttttcggattaccacatgtttgctttttgttgaagaaaatttatctctagtggctagacatacgaacatcgaaaatttagcaaaacgatttcttttaaatttcattattttcaaataaaacaaaaatcttaaaatgcttggatttttaaccatttaaattatcaccttttagttttttttcttttttttttcgtgtgcaaggattttattgattaaatgcgtttgagttatacagagccgaaaatgaaaaaatcttttcggatacaaagccgacgggtacatagaaacccccagagacatgaggccaaaaaaggcgaacaaacaaaacaagccttaaaagaaaatatacaaagataacagttacaagtaataggtaaagcctccaaaacaacaacactgaaaattcttcccaacaagcagccgattaacactttcatggaacaggtaacagctaccgaagtaatagttaaagtctccattttcttctgttttatagaaaatttaggtaatatttcatatatatatatatatcactcagaaattacacaaatattcaaaaaaaatctgaacattgggagcaaactttttgaagcaaatcagatcataaaattagataacccgtagttacaaaaaaaatacttattgttctataatataaactcagctctaatcagattccatttgctaatttaaccgtataaagatatttctaatttacaagattttaaaatacgagaatgacagtaggaattagaaaaaactaatataaagcagaagaatataatcgtcaacacgtgataaaataataacccaatggataatttaatactattacagaaccaaaacaatcaataagcaaaaaaaaaaggcaaagtcccggaacttgcgtcagaagaattttgactagaaagaaaaaaaatcaatttcgacggccatttttttctctcatcgtacggattcctatctctcactactcagatgcttccttcttcactttaatcacccttttcgattttcgttttccagctttttgattcctctgtttcaccaagtagacgaagtagaagaagaagaagaagaagaaagttttcacctttactctaaaagtttcactttttatgtctgctttgaagctctgagatcggagaaagcaatatct

SEQ ID NO: 13877 - DNA, 3000 bp, Unknown
  misc_feature (1)..( 3000): cDNA_ID_3032585_gDNA_ID_2214663_Annot_ID_188931 3000 nt of promoter + ATG
cacaccgatttttttttgtagtacattcatttattgtaaacatttttagtccaaaaaacatgttttttaaatcaaattttgtaatcgttaggtgaattaaaagtaatcataaacaaacaaacaaaaaatgtgtgtccagcaagaattgatattaaatcacggccaaattatactaactgaccctagaaacgtctcaaattattcaatcagatcatttttcataaagtaaacagtgaaagcaagtaaataaaaacaaaagaaaacaagaagaatatgaaaagaggacaaagctcgttgtgtggcttgaaatgtatacggctataagaagaggccatgaaaaggggaaaaaaaattgttggtagggtgcacaagaaaaaaaaaatctgttggttgaaaaatttaatttgttatcaaaacgaacgaatggtcactgctttatcaaaaaatatgtttttttttaactacatcataaattgacatgcatgcatgcagatccgtgatagtatgaagtatgaactcagacatgaaaacatccaactacaaaaaaattagaatttgtttggtcatttctaatatataggaccactcatgcatgtttacacaaattaagtaataaacccacttcccactttgtggcttttgctttaaccacaatcatcacgcttttggtttgtggtcactgcttcggctgctacagtcactcacaaggtccacaattattcacgatcgactcgactctttgacaacgacgtttctaattataaccctcgtgatttaatgatatcgctaggacaatgttcaccataaaaacttcaacatataaacaagcaagtggttgtgtagtactacgtataagctttcagtctttctatcaatagttgaatcttgcactctagttcaattattcgtttggaggagttatgatccatggtccaaagatatttatagatcactttggtctaaaacttcttggttaaacaaaaaaaaacgttgaaagatatacaataaaacctctataaattaataatattgaaattgcaaaattttattaatttagagaggtattaatttattaatttatcgataaattaatatttattaatttatacagagattttcttaatttagtaacttttttaaaaaatttataagatttttttcattatagaaaataactttctagaaccagttacaagtataacataataataatgactaccaaaaaacaccaaaagttttgatacactaaaatatgaaaactatagtcaaacaaagaacaattatgaatttaagcaaaaaattattagaaaatatattttacagattttttttacatataatatatataaactaaattttatcccgcggtgacaatttatctttttaaagttagtataatttttttttgcaaattgtatctatctataatatatttttattttatagtttacaattgttattaagtaacgtcctgccaaacccgttccgtaaaaaaaccatttatttatattaatgttgatcttatttatgatatgtttataaatcattgtctaaatttttttgtcgatgcgggacgttgaacccacacattttttgctaattggttaatatatgttcatttttaaaattttgaatcataaaatatgacggaaaaaattaagatgttttttaaactctatatattatataatgatgttaaaaaattgtaatatttcaaactatttataagtttaaatattaataatgttttataaattctaaatatataaataataatatttaaaaaattaatatttttgtttataaggtaatgacacaataactcttaaagcaaggatttagaagatttaaatctttaattaaatattttcattaataaataattaatgtcagtgacatgacattataaataagttcaaatacaaaatttatttatttaaacaaaaaacgtttagtaagaataatatttatttaacaaaaaactttgttttaaaatattgttaacaaatatgtttatgctaattttaagggattgatttgaagtttggtgggattaaatttgattgataatgtgattgacaatttaaatcaaaaatttaaagtaaaattaattattttggaaaaaagatttaatgctaatggcagtaaattgtaaataagtcgaagtccaggatttatttgctaaaatgtatatatatatatataatacatttatacaattattaatttatgatattgatgggatcatatatttacatagcactttcaaaaaatttattatcttattaatttatcgatttgtgtcactttttatactggtctcaagttcggaccggaaaaatttattaatttatagaagttattaatttataaagtattaatttatagaggttctactgtatatcatagacgtatacgacatagattagagtataaaaaaaatacacatcgtcacctatgatggaaacttaaactacatgcatcactgatcacttgtaaacatcttcgcaaaagacttcacagcaaataaaaggttttgcaacatattcttcataacaaacaattctacttgaaccataattatagtgaattttttcttacatctacaacacatgtacagaaaaacgaaacacactaattaatatgttagataaattcacgtgtacaatatagcaaattgcattttcttggaattccattagttacaaccttcatcgactatcgaacgattcaaattacattagaatttgttctttgtttcatagatttatgtatcaacgagttgtcatttcacgcaaaattttgattaaatagttcatatagtcccatcgaacttgattttcatattctacctatattaattagtgaaaatttgaaaatatctatcttcacaaaatcacaataccttaaaaacctagttgaattctattgactattttttagtaacgtttatttacattacatgcatctagattttatccaaaccaaagtgcaaaaatg

SEQ ID NO: 13878 - DNA, 3000 bp, Unknown
  misc_feature (1)..( 3000): cDNA_ID_3032538_gDNA_ID_2214663_Annot_ID_188922 3000 nt of promoter + ATG
ctattttgaagtttttaatttttgaatttcgccaaaacgtttaccaaatttgtgagacttgcataaaacacgagtggtctattcagcctataaattagttgaatgctacaagcctacaagcttaaaataaatcgaaaattttatatattaattaaaacttataatttgtttagttctgttttctttctcagtgactgttgattttatatataattgtgtctgacctaaattgtattgcgtatgattgaaacttgtatgatttgtagaaaagagagagaggaggagtgtctatatgtttttatttctttttgtcttggatccattaccatatctataggtctcagattctatgtttacaacctaaactgttttcattatctatgaaatatttacaatttagcaaaaaaaacaatgacaatctactcatcaagaggactagatgatgactttcaaatcttttttttttggttttttttttttttggcaaagatgactttcaaatctttgcaaacaaaatcaaaatgtaaaaaatgagagagagaaaccaaaaataataatgagaaaatagtctattaagaaaagatgtacgtaagaattaagttaaaatgtaacactaaaataaaagaaaaaatcaaatgtatgataagaccctcatcaaaccattatattgaagtaaattatatatgtatgaaaatgaaatatcaaagagttcttttactctcacttatgacacgctaaattaaaaccactaaaaaccataatattaatttcacggctacaagttgatgcttcctcaaacttactacgttccaatgccgggcactgattaaatatggacttcacatctttttttttttttttagatattcatttccaaacggtctattgacagatgggctaagaatttcacgggttacaaaaaagtggtccaaatcggaacataatagaaacaagatcagtaaaacgacggttcaccggccggagacgcagccttcaccttctatatccgatgcaaatttaacatatttcgaacgaatctatgagatctatatgagaattttgcttcttgggttttatacggttcgggaaagtggatgtatcaagttgtgacaagaagcatcaaagaatatgactttgtccagtcatttttatggtatagtgatgatcgtcaatgatcataattggctaggaagaaagagcacatgtgcattcatatgattatcataattgtgcatatcatatgcttttatgggcatagttgtcgatagaaacaaaacatgcgtcgaggaaaaaacaaaagaatagttaaaacttagaatctttgattctcatgagccatgaggccatgtgctttttctctcccacgttatatgttttaccatccttataatttgctcccccgacttctctcactttcagacgaaaagaactgctgtcgcgatttttgaacaattatggaaaataatttagatgtgaaggaagccgtaaaaatagttattatactttttgtccatatatatagaattcgtgatgattatgttgtggatgacaattggtggtagatagaaacctttactatcgccattgttatgggctaattaatcaagtttggtaacaaatcaacataataggaccaataacaacaactactgcagatcttactattattctttttattaattcatcagtatattttattattttttcttgattgtttatccgattgatcttgtaagagataacttttgattattacataacttacttcaacatgttaaatgacacaataaaatagacaatttatttttgatatccttttgaaaaatattaaataaatatttgtaatgactgtgttgcactaaaaaatcgagataaccccatgagtgataatttggtaacataatctaaacttagagacaattaactaattaagttattatctgagaaataaattagacaatatttttattcgtgtgtgtaatttttgtggtataatattttttcttatattgtttcaattctacggatgttttggataaaaaggttaatcaaatttataaaatgtaaaattttgcttgaacaaatgaaccaaaatgtttactaattggctaattgctggaaaaaaacagttatataatttttgttaacaaaaaaaatgtttgatgtaaataattaattcacagctaaaagtcaatttcctcatttatttttgattaaagaaagtaataaaaaacaattaagtataccattcgctgtacaagagtcgtttagttctgtcggctcgacaaccgactcaagccggctcgagtcgctaagtgaatccactcgctgtctgtcggtggacaaagccggctccaatctgatcactctctctcaccagcacacacacagctctctctcttccctctctctctcccccgctttatactttgttgagtcaaaatcacagacgaagaagaagaagaaacctctctctcactcctctctcctttctctcgtcttattcgcttctcttctacgtaacagattgttcatcttcttctccttgttgcattgaggtgagttcaatttgatctatcaatgtctaaatgcatgctttttgaattatcggatctcttgtgtttgatttcattgatagagatccaattatgatctagatctgaagaatcctgttttttgagttcctattggttaaaaagtttcctcatttagctttagttcgaatctggaatgttaaacgattcggatcgagatttagcagtagtagaattcagttaggtagagtgatatttttatactattagtcttcaattataatataattgcattgagcttttcctacttcactgtatcgttttctattgtaaagattgatcctttttatatattatgcagggggtgttgttgatgttctgacgatctgatttgagtagatctgggtagggggcaaggtctctgggtctacttttgatttgagaattttttaagtgaagtgaagat

SEQ ID NO: 13879 - DNA, 3000 bp, Unknown; identical to SEQ ID NO: 13875
  misc_feature (1)..( 3000): cDNA_ID_2714122_gDNA_ID_2214663_Annot_ID_136553 3000 nt of promoter + ATG

SEQ ID NO: 13880 - DNA, 3000 bp, Unknown
  misc_feature (1)..( 3000): cDNA_ID_2704455_gDNA_ID_2214664_Annot_ID_136557 3000 nt of promoter + ATG
aaagaatgatgaagatgaagaagaagaagattcgtataagacagctcagttatggcatctgcctgaaccgcgaggaatattagtgcaaccgttccgaccagaaccacggaccggtcctctttgcaacgcctgaaacagaagccggatctcatctacgggatctgggaaaggcctcatggcttcaacttgcgtagcgtccaagaaaacaacgaacataacaactaacataactacgaccaccaattgttttttcatcatgtttagaattttagtttttcgaatgagaaacaaaaacaaaattgagcttttttattggtgaatgtagagttttttttgtttttgttttgtatgtgtaataaattcgataatgactcatatatatagggtttttgagatgtcattgtttgacttgtgctagtttggtctcactatcttatgtttatgtatacacacacatacatgaaatttgactttgactttactacaaaagaattcgttttcaacattttgaaccaaatttgaaggattttgaaatataaaattcacttagacacggtttgtccaagtccacacaggcttttgctaaaaatatacaagacctggccctagcagcctcattctaaaccgaattctggtttcggttcagattggtttcatttggcttcgtagtcagatacaactttctcttttcgtgacagagtgtggaaatggattctcttttgctaattgaaagatattaatagacactcaactaaaatatatatcatctcttacaaaagcaaagtgttttctttttttaataagttggatagcttttggtgaagctttgttctgaaagagagtaagagatcattgttaataatatggtagtacttacgatactagagatcttatgataaaataatgcgaaaataaagatacaagcatgcatgcgtcaaaaagtgttatgatgacaaatgaatgtactctaattttcatatctaaatttttactaatattctgaaggtattaattttcgagttattaaatcgctgtaatatgtttatattttgtaagagaaaaatttggggtactaataaatttgtctttagccctttttcgtctaaatgtacgaaattaaatgatctatggacgataatttctagtttgattcatcgtatatactagtccaaattgtaaaccaaggcataagattcgtcgagaatgacaaccagaagagatgaggagtgctaattagaggtgataaatcataaatataccgccactcttggtttgagtttctcttgtacgtagctacaacttgacaactatgccgccacttttttttattgatccgtaccatttgtattgtatgcaactttggtatcattttgttgttgacaaagttggtaatccatattgtatatcacattggtaaaaagttgctaaaaaagagtctatgcttattcatcaaaattttcaaaggattgatttatcaaagtttataaacacgtggaccatatatcaaatcaaaattccaattcaattcggtaagttatactgtagttattaacgaaatttatgtttgaaattagttaaatatgattatttgtttacgtttgcattgaacatgtaagaataccacacatattttaagatggtaaacacaatatgtataaaactcaaacgaaactttaaagtcgccttattttatgatacacctgatcagtaaataccacaatactattacgttcataaatatacatgtgtttcactttcattaggagcagtaaagtaaacaatatgcgtggagattagagatttttcttttatttttatatttagcttgattataacttaataaaaatgtgtatgtgtttatagataaaatcagggtttgtttgtttatttgactcgggaattttggtctcttaggaatttcatgagatatgacttttatttgggaagaaactcggcttgaaaacatttgaacaacacaattaatattggaattaatcaaacacccgactcggttcgcctttacaccacgagttctttattcacacgcaaaaaaattctgaaaaccggatcataatcccggtttagttggccgagcatattcctaggtaggtccttacgatttatgctcttaaacaaggcttatcacttatgttaattgttacatacttgcatgcgtgtataggactataggtccacctaacgaaatactacaattgagaaaacaagttttctttaatatacaagtttaattacatatatgctcgcgtcatgtcatcgatcatgtgagttcatgtttcttcttctttttctttaatttattttatagtataaagcatgcatgattcatgttgtaacttatttcaaaacattgattatataataatctcttataagattaaaaggataattctcttacttttctgaaacgttctccgacattgctttctatagtaaaatcaggtgaatgtaaaaaaattgaacattactaaatcatcaagtcaatttgaattttaaaattacatgaaaaagtgccttttgtcggcaaagtttaaataatatgatcaaatcttgtatttaagcacaacaattaagttcattttcattcctaccataaaaaaacaatattaagtttcattttcattaaaaaaaatttgaaataaatcaaaagtttaattaaattaaaattttgatgcacattttgtagtcgtgaaaacacgtcttacctaaattcagagatgcctcgctgtttaatattttggtttagtattcggcaccacttgtcccggtccggttcgttccggtttaggatgttctaggaggcgacacattgctctctctctgtacggcttcttcttcttctcgctgacgctctttctccgtcaattctcttcgaagatcgttttgatccaagagagaattctctgagagattgagaggggaagagaaattcttcgatccatagagagataattctctttgaacatcgatccatagagagat

SEQ ID NO: 13881 - DNA, 3000 bp, Unknown
  misc_feature (1)..( 3000): cDNA_ID_3032632_gDNA_ID_2214664_Annot_ID_188959 3000 nt of promoter + ATG
caaaagcatttaactttaaccggaaaaatcttacatttttttcctcctggatctctctctctatatctgcagattcacactacagctgatttagatctatttcgtaagtgggtctttcaaagtcgtctcctttgatctactttgattcagggttaggattaaaaacttctcctttttctatagttgcttcactgtttctattccatggagaaagttgctagctttaatttgccaacttactattcttatgtgtaataatcgtttgcagggtcgttgatttggtgataagtcagtagaaatggataaggagaaatctccagcacctccttgtggaggtcttcctcctccatctccatcaggtcgatgctctgcattctcagaagctggtcccattggtcatggttcagatgctaatcgaatgagtcatgatattagccgtatgcttgataacccacctaagaagattggacatcggcgagctcattctgaaatacttactctccctgatgatttgagctttgatagtgatcttggtgtggttggtaatgctgctgatggagcttctttctctgatgagactgaagaagatttgctctctatgtatcttgatatggataagtttaattcttctgctacatcttctgcccaagttggtgagccatcaggaactgcttggaaaaatgagacaatgatgcagacaggcacaggctcaacttccaatcctcagaatacggttaatagtcttggcgaaaggccaagaatcaggcatcaacatagccaatctatggatggttcaatgaatatcaatgagatgcttatgtcgggaaatgaagatgattctgctattgatgctaagaagtctatgtctgctactaaacttgctgagcttgctctcattgatcctaaacgtgctaagaggtaattggttttcgtttttcttctgtgattctctggtttcttaaatcctgtttatagtgtggatggacacggtgactatttgtgtgcttttggtttgaaccttaatgccaccagtcatttagttgcttcagctgttcccacataacttcagctttttaatgagtggagcaagtgtataatttgtttttgtttcatacaataggatatgggcaaacaggcagtccgcagcacgatcaaaagaaaggaagacgagatacatatttgagcttgagagaaaagtacagactttgcaaacagaggctacaactctctcagcccagttgaccctcttacaggttagttttgactcattgtacggttgttctttcttcatgctaaatgaaactaaatctagccttacaacgtttgttcgtgcattgtgattttttatgggttgaaaacttgtgctcttttcttcctgtttgtatagagagacacaaatggcttgactgttgaaaacaatgagctgaagctgcggttacaaacaatggagcagcaggttcacttgcaggatggtgagtctctcttttatcacaaacaatatccctctgtgccaagactgctatagttggttcatatcatcgaattgaatcttctctattaacagaactaaacgaagcactaaaggaggaaatccagcatctgaaggtgttgactggccaagttgctccatcagcgttgaactatgggtcgtttggatcaaaccagcagcaattctattccaacaatcagtcaatgcaaacaatcttagctgcaaaacagttccagcaacttcagattcattcacagaagcagcaacaacaacaacaacaacaacaacagcaacaccaacagcagcagcagcaacagcaacagtatcagtttcaacagcaacagatgcaacagcttatgcagcagcggcttcaacagcaagaacaacaaaatggagtaagactcaagccttcacaagcccagaaagagaactgaggaatatgaatatgtcccacgtaagtgagaggttctccttctgaacaattcctttctcattcataaattgttgttcatccatcacttgcagtctcttggattttagggttttagctaacacagcttaacgggtgccttggcctacagggtattggcgttttggtacgtagaagaaaccttttggtaaggtcattgaagataaacatttgggtaagcccaaagaaacagagttccgtgcattgcaaatatgcaatgcactgcaattattagttgtttggatttgatatagagactgagtctcgaaaccatagtatgtaaaaatataatcacgttcaaaagctgttaatttgttataatcttataacaattgtgttttaagatacaaacctactttgtgttatgatatttgttcactattggttttggtatatatccaaatcatttttcagggaattaaatactgactttattctctaaaagaaagaaggaaggccacaagatgtcaagattagtccacacaaatgccaacaaacttgtattgatgttaaagaaaattaatgtctcctccaatgtgtaatacagaccgcaaaaacatttcagccgacgaaattgttgtgcaacattgtccacaagattttacggctacactgtatacagactcacgaaaaagaaaacattaatagtcttttcagtttccataagatcgctttacaataatatcaaaataaaagtgaaaaagacagagaagaagagaaacaacgagagccgcagaagttgaagaaatgaggacctacaaggcattgatgtaagaagcaaggatgtggttccttttgattcccaaaatcctcttaaaatctcataaagcccttcttatcttcttctcttctcctcaacttgaatacacagaaacaaaactgcttttgtctctcaagtcatttgtcttataaaaaggttctgttcttgaacaagggaaagaaacaaaaggctgataactcctgttttgtagattcctctgatattcagattcttacttctcaggaaaaccctaaagaaaatttctgtttttttttgagaaat

SEQ ID NO: 13882 - DNA, 3000 bp, Unknown
  misc_feature (1)..( 3000): cDNA_ID_3032628_gDNA_ID_2214664_Annot_ID_188964 3000 nt of promoter + ATG
caattgaaatactcctaagaacagctaaaatcaccgcatttcaaacaagaggaacggagaacaaactcatgggatcaaccctttatatggttgtcactttattgagaacatatcagaacatagctatcgaaatgaaaccattaatcaaagtcaaacaccaagatccttatcaagaagcagagccagatatagcaatggacacactacatataactaatgtgcgacagattcaagtcaattacacaatgataatcaaaatccaatttctcaatggagtgaaattgaaactgcaaacaaaagatgggttcttatctgttgaagcaaaacacagtttctcactattaaactttcataacatttagttcttagctgcagattgttaactaaacaacatcgaataaacctcatgaggaaatacaaaaaactgaaaacacttgcctttaaagagaaggaacaaaaaaccactaattcgtgatactcttcttgctaccaccactcaacatctcgtcaggaattttcttaagctgcttcctctgcttcttagacatagaaattttcttcaaagtcttgggatttgtaatcttctgcaacttagtaccagttctcaaaacattctccttcttccgcttctctctctcttccttcttcttcctcttctcaaccttattactcctaatctcttccttcagctcattcaccctctccttatacgctttcttaatctccctttgcctcttcatctcctccagatctggtttcctgttcttcacaaacctccctgaagatctatgagttcgcggctgtttccagttccgtccggagactttcccggcgattacaccgtcgtaggttggtctctcgacagctagagcaataggtttgtctggattttcagaggaagcgacggcgctacgtttcgcggcaggaggagcaccatcgatgtccatggaagcttcatcggcgattgcttcggcggcggcttgttcttgagattcgcgtttgcgtttgtaggttttgccgccgaatccttcgtcaaggcaccggaaatctacggtgcaagccatttcttctcttctttgtgtggctgtgaggttttggcagaaatttagggtttctcgactatttatatgagtgaggatggagacagggttaaaattccggttttttagccgaccacataattataaccgaaccgaaccggaaattatgtgattcatcaattactctgttttagtgcaaacaccttctcttttaaattgtagaaaaccaaatcaaatcttttaggttgtgaatttggatagaattgggaataaatccatgttcgtgataaaatattgattcaagctattaacacaagttagtaccgcaacaataaatccaaagtaatcttttagaaaaaaattgttaataaatctacattattaccaagtcaatttaaaataaataaataaattcagaaaaataaggtcattggacaaacatccaacctctctagttgactcaagggagaaaatatccaatctctctacaaaaaaaaatcaataaaccataaaaaataatgaaaaacaaattcctaaagttacttgggtctcaagcaacattgtgacattatgaggaatgaccagagctgcttctaccacaacgggttggagaagagagagcaaagcaaagttttccacttccatctcgaaaggaccagatttcaatcacgtcattgactttgaagatttttttatcaatcacattgttccaaccatgacttaacacatatttccaaactgtattaccattccacttctttaaataaacgacatgcttatccgattcaggatccaccaaaaacactttcaaaccatcccttttagcctttaaaaagtcttcatctaagaatctggtttcgtcctctgtcaaaaaatctgacttctctaatttgctgagatgcattgagagacacccctggtttttacggagatcagtcgtacacagcaccctcctctttatgatcagctttggatcgtatccattctcttttctcatcactttcacgagccagtctggtatcgaagaattgcatgtttcgggactatcagcaggacataacgaaacgatgtcgcttttgttctgctgagaggggctcgggatgtcgaggatgattttcttttttcctttgagaactatttgagaaaattcttccaacatatccagcttccaaaacttacaaatatcataagcctccattgtgcggccagagaactacaagaaattaaggaagaggtttaataacaagcttaagagagagatagagaatattatataacagaatttttaattacgttcttactaaggatttgctcttgtttttttcccaatcttccttaaataagttatatatatatatatatatatatattctagtaataaattcttattttaataattttctagtgataaatttttattttagttctcactattttaatttttaattttaataattaggtgaaatccagttaattaacgttttttaatcaaatttttgttttatttcatttatttttcccctaacataaataggttttagtttccaaaagtaaaaaaaaattggattagtttatttgtttatcttgatgaattttatttttttgtgaaagattagtttctttatttcccaaagcaaaacatgtttatcttttgtcatccatgacccaagagaaaaaaagttttgtgtacaaaaattaaaattaggagataatggaatggtctagtggaaaccgaaacattaaactgccattagtattttcatggttattaatgattgttaattactattttgatgaactaccgttcaaagtctttgactttcctaaaaatttcaggaatctcattctcatccgtatattatcatcacctattttagctttgaatttaactataaataaaatgtttgaaacacaacaacggaaacaaaattaattaagaaagaccttctttgttcacaat

SEQ ID NO: 13883 - DNA, 3000 bp, Unknown
  misc_feature (1)..( 3000): cDNA_ID_2704443_gDNA_ID_2214664_Annot_ID_188961 3000 nt of promoter + ATG
gaatggtaatacagtttggaaatatgtgttaagtcatggttggaacaatgtgattgataaaaaaatcttcaaagtcaatgacgtgattgaaatctggtcctttcgagatggaagtggaaaactttgctttgctctctcttctccaacccgttgtggtagaagcagctctggtcattcctcataatgtcacaatgttgcttgagacccaagtaactttaggaatttgtttttcattattttttatggtttattgatttttttttgtagagagattggatattttctcccttgagtcaactagagaggttggatgtttgtccaatgaccttatttttctgaatttatttatttattttaaattgacttggtaataatgtagatttattaacaatttttttctaaaagattactttggatttattgttgcggtactaacttgtgttaatagcttgaatcaatattttatcacgaacatggatttattcccaattctatccaaattcacaacctaaaagatttgatttggttttctacaatttaaaagagaaggtgtttgcactaaaacagagtaattgatgaatcacataatttccggttcggttcggttataattatgtggtcggctaaaaaaccggaattttaaccctgtctccatcctcactcatataaatagtcgagaaaccctaaatttctgccaaaacctcacagccacacaaagaagagaagaaatggcttgcaccgtagatttccggtgccttgacgaaggattcggcggcaaaacctacaaacgcaaacgcgaatctcaagaacaagccgccgccgaagcaatcgccgatgaagcttccatggacatcgatggtgctcctcctgccgcgaaacgtagcgccgtcgcttcctctgaaaatccagacaaacctattgctctagctgtcgagagaccaacctacgacggtgtaatcgccgggaaagtctccggacggaactggaaacagccgcgaactcatagatcttcagggaggtttgtgaagaacaggaaaccagatctggaggagatgaagaggcaaagggagattaagaaagcgtataaggagagggtgaatgagctgaaggaagagattaggagtaataaggttgagaagaggaagaagaaggaagagagagagaagcggaagaaggagaatgttttgagaactggtactaagttgcagaagattacaaatcccaagactttgaagaaaatttctatgtctaagaagcagaggaagcagcttaagaaaattcctgacgagatgttgagtggtggtagcaagaagagtatcacgaattagtggttttttgttccttctctttaaaggcaagtgttttcagttttttgtatttcctcatgaggtttattcgatgttgtttagttaacaatctgcagctaagaactaaatgttatgaaagtttaatagtgagaaactgtgttttgcttcaacagataagaacccatcttttgtttgcagtttcaatttcactccattgagaaattggattttgattatcattgtgtaattgacttgaatctgtcgcacattagttatatgtagtgtgtccattgctatatctggctctgcttcttgataaggatcttggtgtttgactttgattaatggtttcatttcgatagctatgttctgatatgttctcaataaagtgacaaccatataaagggttgatcccatgagtttgttctccgttcctcttgtttgaaatgcggtgattttagctgttcttaggagtatttcaattgtagtcctatcctgtgaaagttctttgtaatgtcttgaattttgattatgattgtgttgaatttatcacgccttagttatatgtagttgttcattgctatttctggctctccctcttgataaggatcttggtgtttctctaatgctgcctcttgctgtttggtgcgatatagataggcattcgggtctgaaatctaacctatacattgacttcgatcttcgatttatggtttcatttcaatagcttttctcgggttttagttttactgaaatataacaattgaatgatcccatgagttttgcttgttgtgtgatgtgttctcggttccttttgtttgtaatttcaattgtatttatgtcttgtgaaagagctttataatggtttaattggatgagagacaaataatatacattctctatggcagccagtaactgttgatcttatattacacatgtaagataatgttggaccagaaatgtcaacatctttcgagaagttttgtgtggcagtaattcagatatatgttcactctgtgacgcaagcgtttaatatcttggcactgaaatcgttgtcggaatactgagagtttgacatctggaacattaggattcctttggagttcgaaaattctggttcctacatttatataaaaacaagacagtgatatcagagtttttagattgtttcagctttctacattacttttttgctatattaggtggaacaatgactcgtgcaacatccaaatgttctttctactcgtcaataggtaggtggttgattacataatttggtgagagttggtcgcataaagcttaaccaataccatatctttccccagatctcctctcagaaagtctgataaacaaattatttaacagaacagatacacaattggaaaacaaatatgtgacaattattgcaaaaacaaataagaatgaaagaaacagacgaaagttaagtaaccatgactttagtgaaattaatcaatttcgtaagcaaaataataaaaaatcatttttctaggaagcagaggaggagagtcctaccaattcatcttctctctctctctatcggctcatatctccaaaagacctatccaaaaaaaaaaagtttgagtctttacgaattccaaagaagcaatgaaaaaccctatccatatgtagctcttttcgattccgtaatcaccacaaactcttcctttcaatg

SEQ ID NO: 13884 - DNA, 3000 bp, Unknown
  misc_feature (1)..( 3000): cDNA_ID_2704467_gDNA_ID_2214664_Annot_ID_188965 3000 nt of promoter + ATG
atcaataaaccataaaaaataatgaaaaacaaattcctaaagttacttgggtctcaagcaacattgtgacattatgaggaatgaccagagctgcttctaccacaacgggttggagaagagagagcaaagcaaagttttccacttccatctcgaaaggaccagatttcaatcacgtcattgactttgaagatttttttatcaatcacattgttccaaccatgacttaacacatatttccaaactgtattaccattccacttctttaaataaacgacatgcttatccgattcaggatccaccaaaaacactttcaaaccatcccttttagcctttaaaaagtcttcatctaagaatctggtttcgtcctctgtcaaaaaatctgacttctctaatttgctgagatgcattgagagacacccctggtttttacggagatcagtcgtacacagcaccctcctctttatgatcagctttggatcgtatccattctcttttctcatcactttcacgagccagtctggtatcgaagaattgcatgtttcgggactatcagcaggacataacgaaacgatgtcgcttttgttctgctgagaggggctcgggatgtcgaggatgattttcttttttcctttgagaactatttgagaaaattcttccaacatatccagcttccaaaacttacaaatatcataagcctccattgtgcggccagagaactacaagaaattaaggaagaggtttaataacaagcttaagagagagatagagaatattatataacagaatttttaattacgttcttactaaggatttgctcttgtttttttcccaatcttccttaaataagttatatatatatatatatatatatattctagtaataaattcttattttaataattttctagtgataaatttttattttagttctcactattttaatttttaattttaataattaggtgaaatccagttaattaacgttttttaatcaaatttttgttttatttcatttatttttcccctaacataaataggttttagtttccaaaagtaaaaaaaaattggattagtttatttgtttatcttgatgaattttatttttttgtgaaagattagtttctttatttcccaaagcaaaacatgtttatcttttgtcatccatgacccaagagaaaaaaagttttgtgtacaaaaattaaaattaggagataatggaatggtctagtggaaaccgaaacattaaactgccattagtattttcatggttattaatgattgttaattactattttgatgaactaccgttcaaagtctttgactttcctaaaaatttcaggaatctcattctcatccgtatattatcatcacctattttagctttgaatttaactataaataaaatgtttgaaacacaacaacggaaacaaaattaattaagaaagaccttctttgttcacaatatggccaaaatgacaataacacacatgaagtttcttcaactgttgttatctttagtgctctttgtattctcaatgtcaaatgcaatgccaatctcagacgtacataatttttgcaaggaaacgtttgaagtagaattctgcatgaaatacattgggtcggaccaacgtctcgtagccgcacgcgacttcagtgacatgcttttaattccggtaacgttatttaatgtgacaattttgattagtgatatgtcagattagttgatcacatatattaccaaaaaaggcaagatatttgttcagtgttggtaaaattagggataatagtatagattagttgaaaattttcaccacaccagttcttgtaagattacatggcctccaaaatactaaatagaagttatagaaatctgtggtttattcatattctacaaaagaagtattatttttggtttgtgattgagaccttcttatcagatatctgagactcaaattcaagtgaccaatgcaatcacacaaatcaacaatatccgccaaaggtttaatgacacgcttggaaagaatcggatcgctctatgcgaggaaaaatacgagagcgcgggcactagttttcacaaggcttgggaagtcggacagaaaaagtcaaattcatcgacggaccatatggaaataacccgaaacacgcaagctggctttgatgctgtgtgcgagtgcgaagacgaatgggcaaagcatggtccgaaacaagagtctcctctcactttctattaccataacgttctgaaactatgccaaattactcgtcttattatcagcaagctttaggcttaagtacgtcgtattggaatttgatttatttacgatattaactggtttagcttattcactcacacgtttattaacaccgattgttctctgcttctagttgtaaacccgatttttgaaactatatgtatttattggtttaaatgaataaaacctttgtgatgtttttgataatttatcatcattccgtgaaaaacatgacgttttaaaatctcgagtttcgacgcaatttgtggtatacacctgaatgagagtttcaagcaaaaactaagtccggaaaaatgctaaagatgtatgctaaattagcacaaattcgaaagcaaaaatagttgtctatgatgtctttttggagatgcatgatgcaaatatagagtattctagatttagtaaggaatctcttgaagagattctcttccatacattatcaagagtttccttttttatatatgaggaaaagaaagcatgaagacagaggacaatttcctatccataaaaaaaggaaattatctattgctattagtacgagaataggaaattggcttattgtatagccacaacctatttagtataaatatggtgctaaagttttggaaaagtttagcacaaaagaataagaaaattctaatacattaaggttataaagtttcttgtaagaaagaataacgcttaacagggctaagaaaaaaacacaagaaaacacttcttgtttctcaaa

SEQ ID NO: 13885 - DNA, 3000 bp, Unknown
  misc_feature (1)..( 3000): cDNA_ID_3032638_gDNA_ID_2214664_Annot_ID_188956 3000 nt of promoter + ATG
aattaattttgctctcttaatttttaaacgtattttgttattatttagattatctgttcccgatctttactctgtttttttttcgttatgatatgaagctgcttacctataatgaaagtaacttcactatgtctactattcttgtagggcactttcaattcttgtactcatattattttaattttcatattttttgtcgtcttacgtttccggagttcgcgaggctcttttttttttttttcctcgcgaggctctctcatcgccactatagtgttttgaataactaaagttttctttttcaagatctagaaaaccgaggatctaggaaattctgggacatttattcagatgtgatgatttagtaagttgtttgtttatttttattttatacatataagaaagtggctgatcacttacagtcacaacaagattgtttgaattgtctatacgaaattacaagttagagcacatgcttatgtctacgtatcggatcttaacatgtgaaagtttacgatcttatatttgtcttttgatccaacatattctttatatcattagaggtatggtttcaaattaagttttagttacttaaagcattaaatgtgtgtgggcaacatggcattaggccccaaagtttataaaaatatcgctcatcataatatttttttaaacaaagatacttgaatatttgagatttgagagcgatatcattatagggtgcataagaagatatcatcatatcgtacactgaataattaaatatattatttcatagtcagatttttttcgagtaatgtactttagtgtttaaagtaatagtaatagagacgtgtatgcatcgatgatcaatcttgcaaccctaaaatgattagtttaagaggaaaaaagcctaagaatacatgtactctagtacttgatatctaaactttaaacgaattgataaaatactgtacggcttttatttaaacctcaaatttgactattcattattcaaataatattacacaaatacatacgaacgtaatacctaacctaatgaaaaatatttacatataccccaaaaatttagaaatgatagtcaagaaatacaagaactctagaaaaatacatacattttctatttatttgttcatttacattcttaatttttacaaagatccaaatgctatatatttttcttcggtctacaaatcttgtttagacaaatccgtaccccaccggaaatgaatcatatctattaaaaccggaaaaacggtctatttccccacaagaaataccgcatcatgccagatagagcccaaacttcaaccccggtctacatgtccatgaaaacaaagttttaaacctatttctctccgaaacgtaagttctatagctaaatctccccaaattaatacttcgagatctattagcacatatatctggtttttgtcggtttaatgtacaccaattcagtcttaaccatttgaaaacaaactttaaccaaaactaaaccaaaattatcaaaaagtaacccgaacccgccgacctattaatgatccgatccaacgcttcttcttcacctgaaattttgcttggattatcttcgtttaaaaacaatactagactaactttttcctgatgaaatcaatgatcgatcttggatgcaagtataaagagactttcctcatcatgtggggtattaagtatacttgcaccaaattaataggtcggcgggttcgggttaatttttgataattttggtttagttttggttaaaatttgttttcaaatggttaagactgaattggtgtacattaaaccgacaaaaaccagatatatgtgttaatagatctcgaagtattaatttggggagatttagctatagaacttacgtttcggggagaaataggtttaaaactttgttttcatggacatgtagaccggggttgaagtttgagctctatttggcatgatacggtacttctcgtgaggaaatagaccgtttttccactaaaacccaaactagaagaaaataaataaatagtttatttttatttttatatgccaatagtttttttctttcttttacatcttaataataaatattcaatcaacaaagttagatcgaacactttgagccagatctgttatttttggggtcaaactttaaaaattttaaaataagaatataaaaatatatgcttttcttagagatcttttcttttctttttgcatattaaaaggaaaggtgttaaaatcacatcttttttatgagctggatagtcaaatttatatactattccattttttggtcaactattaatggtactatttgatttatttctattaaataaataaaattaattaattgaattgatgttataaaaaaataaaaatttggatttatttcttgtatatattgtaaaataaataaatgtattgtattaacattaggagttggtgtatattgacacttgggtcctttagtttgtatatatattgtccataaattattgataagataggactaaaaacagtatatgcttgggtacaagccagtgggtaattccaatttttattttaaaagaaacagaaaaaaaactctggaattttgataacagttttccagctacccgaacgtgatttttgcctgtaatcacgtacatccataaagcatgtatatcaaaacagtagaataagtcaaaactaaatttcgagccctgtgacacttttcctctttacgttggcatctatatttaaccttcttcttttttttttactggttacacaaaatatactttcactattgcatgtagtagatacacctcaacccttacgtgcccatccgcaacaacaaatatcatgatatttattatttactgattccttatgatactttgttgcagtaaattaaaatcactataaattagaagagaagcatcacttttattcttctccattaacaaaaaagagagagagaacctaaaaagaagagaagagaaagagagatccgaaatg

SEQ ID NO: 13886 - DNA, 3000 bp, Unknown; identical to SEQ ID NO: 13881
  misc_feature (1)..( 3000): cDNA_ID_2704461_gDNA_ID_2214664_Annot_ID_136560 3000 nt of promoter + ATG

SEQ ID NO: 13887 - DNA, 3000 bp, Unknown; identical to SEQ ID NO: 13883
  misc_feature (1)..( 3000): cDNA_ID_2704443_gDNA_ID_2214664_Annot_ID_136562 3000 nt of promoter + ATG

SEQ ID NO: 13888 - DNA, 3000 bp, Unknown; identical to SEQ ID NO: 13880
  misc_feature (1)..( 3000): cDNA_ID_2704455_gDNA_ID_2214664_Annot_ID_188955 3000 nt of promoter + ATG

SEQ ID NO: 13889 - DNA, 3000 bp, Unknown; identical to SEQ ID NO: 13884
  misc_feature (1)..( 3000): cDNA_ID_2704467_gDNA_ID_2214664_Annot_ID_136565 3000 nt of promoter + ATG

SEQ ID NO: 13890 - DNA, 3000 bp, Unknown
  misc_feature (1)..( 3000): cDNA_ID_2704475_gDNA_ID_2214664_Annot_ID_136567 3000 nt of promoter + ATG
taaaattcagctgattgatttttcccaagttctcctcaaaacagaattagttgggtgacaatagccttgagatcaaagttgttctttgttttaccttaccagaaaagaaaccaacgatcatagcatcactgaagaataaactggtcttagccacatggcccacatctacttttagcaaaaccctaattatgatctatgtggtttttgctgtgacttggagtgaactcaatcctctcagaacaacaaatctgttttattagatgtacgtagcaagtgttttctatcattcatgaacagagtacatcgtaagcaaatcttgataaacaaatctggtttgactcaaactcagaatagtacaaaccaaagcagattaaccagttttagctaaaaacccatcaagaatttaagtataggcattctaaacacaatgagagaacaatcattcctcaacgaaattgacttaagcaaactaaacaaaagactatacaagtatgaaaactcatacgtgtcagtcaagaaacaaaataccaaaagtgtaactgaagcatcatcttcactggtagtgaccggaatcacgaatcgagccatcatcgttgaagccaaagtcttcatcttcgtcgggaagatagccttgactgtcttcttgatcaaagaacaggtggtttaactcgtaagactcgtcgaaaaaagagctaggttcaacagaatcttgaggaagattgtcgttgtggccgtcgtgaccagaatcttgaggaagattgccgtcgtgaacagaaacttttgcaggaaccagaacaaaacagagactaccttgctccaaaccgtcaacaacagagtcggcgtggccacccgaaagattgacgccgtcgtgaacagggttcactcctccgcaacggaaaacccagagagagaaaacgtcgcccaccttgaacgttttgtcgttcttatcaaccaccttattccaacctttaacaaaggcatagctcttggtccacttatgtaactcaagcacgtactgttgcgattcaggatctataaaagctactctcaaaccagccgtccgtcgtttcttcatcttttgtgcctctatggttcgtttttcatcttccgttaagaagcctgaattttccatatgcatggaagaaacttggagtcgtgactgtttgtcatcgagatcacacttgaagagagtcttctttggaatgattagttgtggatgatacccattcaatttattcatggatttcagcagtaactccggctgttgcatctctgcagaatctgacattaaatctagagcacagcaaaagagatagaatgatcgtgtttttttcttgcgtttcaagaaattatgtaaagagaagaaagatagaatgagagtgtgatgtatatatatactgtatgttctaactacacccatttagaaaacaatatttactttgaataaactttgaattaattacaggtttcttgacccttttctttatttaaacttgatctccattggaagtatctcaatgagatacccaacaaaaaaaaaataattaaaaaagaaaaagtatgagagaggtgagaaaaagtaggagagaaggagagttaagtttctcggaagagaaactttgagaaactattttcatccaatttggacaggtgtcatcatataattagttcaactattaaataataattaatatatctgttttgattaaaatattaatatattttttttttagaaactttccttatttttattgaggagatggtcttaacatttaaaaaaaaaaaaaaaaaaaaaaacgttttgtggtttcaatttatgggggagaaaacgatttcaattcatataatttgatgaagctttaataataacaatgttgcaaattaatatattttcggcaaaataaaaaacaaatgttgcaatttccttgaatgattcttctggttaacggaggagccgctacttcaatccatcccaacgccgctcgattttatcgaattgggaccatgagtcgccaaattcacggagctgtatcttcttctaagcacatctccttaaaaacccaacaccccctctcagattccaactcaggttcttttctctctctcgctctgtctgttcaaattccttggagattgtgtgttgctattagcgtgactagtatgtttcactagaactagcctatggagcttctgggtcggagactcgagtgtatacccggaaaaaaaggctaaagcaggaaccttttgagcctctggagaaatattccggcaaaggagtcaatacccacaaagtaagtttcctcaattgagcgtttagcattttgtagaactgggttctggagatttatctctcaagtgtgataatttctctaaagtgtgttcttacttggctcagattttgtcttatttgtccaaatgtcttgagttttaagttaatctgactcagccctatgggttgttagtgatcctagtgtttttaaatttgttcgccctgtgcttcagcaaatgagagaaaaccttgattagtgttgccatttgttccatgaccatatatgaccttgtgttagtattttactatttagagtcttatgtgttgcttaatgtaatgtcttccatcttttcatgtctaatgatgcatcagctgtgtggtttacccgatatagaagattttgcttacaaaaagactattggatctccttcatctagtaagtctccttttataaactcacaactttcacattcccaaccattcattaaacttaatatcaatcaccaggttgaaaaaatagccaaagaacctgactactttctaaactagttgcatgatatgttcttgtcacttgaatgtctcaacagatttaatctgaatagaagttggtaggaaaagttctatcatcaagaagattctttaaacggtcaagagatattaattatctagcttttgcaggcaggtcaacggaaactagcatcactgtgacttcagtcaaaacagcaggtatg

SEQ ID NO: 13891 - DNA, 3000 bp, Unknown
  misc_feature (1)..( 3000): cDNA_ID_3032673_gDNA_ID_2214665_Annot_ID_136571 3000 nt of promoter + ATG
gtttgtcgcaacgttgatcgtcacttagctgttgatgttgttgatcatcttgtaacaaggggaatggattggagttataagttggggacgactggtatcatcatggagaagtgaaatcagtatctgattgtagaaagaacgcaagtcagtggaaccaagagattttagggttgttcaaagctgctgagtttatagatgaaaagctggttagtcaaggtgatgttgatgaggctgatgataaggaagaagttgagttttcagcaaagctagctgatgcagaaacacctctctatccaggttgcacaaatcacagtaagctctctgcgattgtttcactctttagcctaaagactcaaggtggttggtctgatagaagttttgatctgcaactcgagtccttgtcaaatatgctacccaagggtaatgtcttgcacacatccttgtacgaggtgaagaagtttcttaaaacctttgatatgggttatgaaaagatacacgcttgtgtaaatgactgctgtttattcagaaatcagtttgagaagctcgacagttgtcctaaatgcaattactcacgatggaagattaacacgcgaactggtgaggtgaagaaaggtaatccacagaaagtacttaggtactttccgatcattccacgtctcaagaggatgttcagatcagaggacatggcgaaagacttacggtggcatttcagtaacaaaagcaccgatggaaaaatgcgtcatccggtagattctgtgacatgggatcaaatgaattagaagtatccatcatttgctgcagaagaaaggaatgttaggcttggactctccacagatgggtttaatcctttcaacatgaagaatgttaactatagtgcatggcctgttttgctagtcaactacaacatgccacctaacaagtgtatgaaagaggagaacataatgttgacattgctgattcctggtccaactcaacctggaaacaatatagatgtgtatctagaaccgctaatagatgatctcaaccatctgtgggaaaagggagagttaacttatgatgcattcagtcacacaacattcacgttaaaagcaatgcttctgtggaccatccaggattttcatgcatatggaaatctagcaggctgcaaagtaaaaggcaaaatgggttgtccagtatgcgggaagcacacagatagcttgtggttgagtaattgcagaaagtacgtgtatatgtctcatcggaagtctctgtcacccacacatctttataggcgaaagaaagcatggtttgatggtaaagctgagaatggaagaagaggtaggattctgactggtcataacatatatcaactcctaaaaaaatacaagaatgattttggaaatgtaaaagtaaaagaaagaaagatgaagatgaacgattgtactggatcaacttctggtactgatgatgaatccattgcatcagaagaagaggaagaacaattagatgaaggtgagctttcaagatggaagaagcgctcaatcttattcaagttagagtattggaaggtatgatttattatcaaagttattcaagttcagattatttggagtaagttttgaaaaataaatgtcttagccatttaagttattatctgttactattttgtctaggaaatgccggttagacataacttagacgtgatgcacgtggagagaaatgttgctgctagccttgtctctacaatgctgcattgtgggaagtcaaaggatggtattaaagctcgaaaagatctgcaactgcttggtattaggaaggatttacatccccaagcccgtggaaaaagaacctaccttcctccagctccttggtctttgtccaaaacagagaagaaagtattctgtaagcggttatttgacttcagaggtccagatggccattgttctaatatttccagatgtgtgaagatagaagattctactgttaaaggacttaaatcacatgattatcatgtgttgatgcaacaacttcttccagttgcaatcagaggtataagatgaattcttttagctgaaattcttgcataatttgatgtgttgtttttaatcttcaatgttatccatttataggtttgttacctaaaggtgttaggatagctattggacgcttgtgtgcgtttttcaacaaactgtgtcagcgagttattgacagagagacagtttctacaatggagaatgaaattgtggaaactatctgcatgtttgagaggttctttcctccaagtttcttcgatataatggtgcatttgacagtccacttaggcagggaagctcgtttatgtggaccagttcatttccgttggatgtacccatttgagaggtacaatccagtagcttataaggttttttcttttacagaatacttttatgcttaaaggtagctgttttatcttcaggtacatgaaagttctgaaggattttgtcagaaacactgcaagaccagagggttgtattgctgaagcatatcttgctgaggaatgtatgcggttctgcagtgatttcctgaaaaagacaacaaatgcagaagaggaaattgaaagaaatactgattatgagaactgctctatattggagggtcgacctatatcagcagccacttcaattactcttactgagaatgagaagaacatagcacatcttgcagtgattcataatatggcgcaacttgatccttatgtggagtaagctattctcttaacttactctttattatttttttaggatattcacaatggtttagatgatgttttgctttctttcaattttagcatgcacctagaacatctacaagattctaatgaaaggtgtagacgggattcaggatttttatggaatactcattctcagaaatttgcttcttggttaaaagaacaggtaaattttctggttttgtattgttttattctctgagatgctatctatatagtaaatgacacttgttttttttaaatagatacctatg

SEQ ID NO: 13892 - DNA, 3000 bp, Unknown
  misc_feature (1)..( 3000): cDNA_ID_2704499_gDNA_ID_2214665_Annot_ID_188988 3000 nt of promoter + ATG
ttgagacttatttacagtggctgccaccggcatttaataattgtttttgataattagaaagtaaatcttcgaattaaatatttgcatttaactacctttccaaaatctctctgcattaactatacgattaattactaaaataaaatttccaaaatatttaatatcatttaaatactacaaaattatcatttttgatattgctttttttttatgactataacaattcgattataagcagcaaaccgtaaagatatttgatagcaattaattactacaaaattataaaatatttagacaatgattcataaacatatcataaataagatcaacattaataaaataaatagttttttttacgagacgggttggcgggacgggtttggcaggaagctacttaataacaattgtaaactataaaataaaaatattttatagatagataaaatttgtaaacttttatatatactaactttaaggaaataaattgtctccgcggtataccgcgggttaaaatctagttaattagtgttatcgactcatgattaaatatatagaattgatataaactgaacaagatttcaaaagtattcatatgaaaagaattaaaaaaaaaagcataaattaaagcagtatttaagtcaatacttttagatcttctctcattgcatatatcaatataagagaaatgatcgtgtattaaattatttggtaagtctaacgttttaaaggtttattatttgaaaaaacttgagtgtcaatgttatcaaagactcaaaataaaattactaaactaataagaggttaggtaacgaacaagtacaacacaaaaaaattagtaaaataaaaagagtataataaaagtagtgcttaatttattaacataattttttattttatttttatcttgaaaaaatcaattaagagtaggattgatgatacatttaatttgcttatttaatatgattaatattttaatttaaaaaatatagaatgacacatgtcatttttttgtgtgatgatgtgtcattcatatggaaagagttggccaactttcatatatatgattagatttctaaatgatcattgccgtaatattagtaaagatgtgtccagtgttttagcaatttttaccaaactaattttgatttacatctttaattaaatatttcatttattaataattaatgtcaatagcatgacattgtaaataagttcaagtacaagatttatttgttaaagtagctgaaaaatgtatatgtagattttagatctctaaataagattaacataagaaatctgtatcggtctaactaatgatgaatcgcgaaggacaacgttagaaaactaatgacgaaaatatgttcatgagaataatatatactaaactaataagaggtttggtagcaaacaactacaacacaaaaaaaagtcattatctagtagtgattattgataataaaaatttaataaaataaagagtataatgaaagtagtgcttaatttattaacataatttttttttattttattttgaatcaattaagaataggattaatcatacatttaattttagagtatttataataaatgactatagatttgaaaagaatgtacaaactaaccttgagtcacagtatcttgtcggaaacatgttggagaacacttgttattttctcttattacatagtatttataaaaagcacatgctattttttggaaaaaacattgtattcagtttaatatatctttttatcatgatattttgtagtaatacacgttttttattgagatcacacgtgatttctttaaaaatattcttattttttagtaatacatggtttttattaaaatcacatataatttttgttttaagattctgttcatgtaaaagaatttcataataatgttttaaaaaaaaaaattcataacgtattatgaaatagcatgtttttaaactaaatataacatgtgaaattttaatgttacatgatattttgaaaaattacacggatgtgtttcgtttacttttcatcttacaacaaataaaggatagctttattatttcctttcttccgacaacgtgggtccatggttattttgtaacaaaaaactttatctctgctagtttcttaatttgtatgttttatttggttatctactaatattacctttaattttattattttttaaatttaaaaatatagaatgatatatgtcaaacttttgtgtgatgcttttgtgtgatggtgtgtcattcatatggagagtgttgaccaattttcatatatatatgattatatattaagaaactatatattacgttgtctttttcaaacaggtaaaaatgttatgagatttatttgatttttaagtaattatttaaattaaaataaataaaaatatatattattttaataataggggctaaatagaaattatgtggaggagaggggctgcgtagattaaaatccaaaaaataccgtaaacaaaaaaaaatattcccttgcgagagagggaagattgacttattggcacgcagccctaggcattttcgtttcgtctccacacgcctctctctctctctcgcttcttcaatcattcatcactccgacgtcagattcaaaatcctccatgatcgatcccaattgatcaatcaataaccttatcttcttcatcttctctgtcagtatctgaatctgcatctggaagcgtgatttcatcatcatgtatttaaccgcttcatcttccgcttcttcctccatcatccgagctgcttcttctcgctcttcttctcttttctctttccgatcggttttatctccctccgtttcatctacttctccgtcgtctcttctcgctcgtagatcttttggtaccatttcccctgctttccgtcgctggagccattcctttcactcgaaaccatctccgtttcgcttcacctctcagatcagagctgtttctccagtcttagatcgtctccagagaaccttctcttcc

SEQ ID NO: 13893 - DNA, 3000 bp, Unknown
  misc_feature (1)..( 3000): cDNA_ID_3032667_gDNA_ID_2214665_Annot_ID_188984 3000 nt of promoter + ATG
tacatgagaaacgctcccatacgctattattgaaaactttaatccagccacgttctccgatgttggtgaagcttttcctcaccggcgtcagaacttctccactaccgatactgaatgtgttctttacctctctagtttttcagttttttctcctctttcagtatatactagattttgacccgcagtacaccgcggggctattgttatttttttttttgaatatgtaatttgtttaaaagataatctatatacataacctattttttttgtattttataaatatacaatcctaagtttttatatattatttggtgtacaatccctagatttgaccctatagtacaccgtgaatcgatttttgtaactaaaaagtttaaattttaattaatataggttgtgtaaaaaatattcgtttagtttattgttttagattatatcatttattttaattgttactttatgatttcaccggtggtataccgttttcttttcatattgacctaaacccgccctgtgaatttaaacattattttggtattgtttttttaataatacttttattcaaaagatataaatttaaattaattttaatagttcttttttaattttataaatgaaaataaaagttatatggctttgtaattgtttgtttatttattatttgtgcaaagaaaataaaaccgtatatatgccgacctatatgtaagaaaaactttagttttgaatatcttacattttacacatatatattgatatatatataaatgtatggtttttattataaatttataatgagtttgtataaatatgtgtatattttaattttagttttaagaatttcataatttttaatactccaacttattgatattagaattacccaaacccatataaagaaaataggtcctaacataattcgccaaaccaatcaaaatatttaatactagattgataacccgtgcttcgcctggatgttaagttttgataaataaatacaaaactttggatttttgaaagatattgtaccatgaaattttaattatattatcgagtaaattttttttgtttgttaatattatggttttgtcaaatttttaatatcaatatattataatatatgtgtgttgttaagtgctatagcaaacggttaaaatgttagatttattgattgtactatttaagtatatgtttttaaaatgtgcatttattgattgaaaacatgtcaaaactaacatgtggtttggcaacccgcatatacgtgcgagattttatattttaaaatatgtattgtataaaatatatattcaagttttaaattttaagaagtatttaagaaatcatttttctgtttttgttttgggaattagagaatagaatttataccatgatattagtaattaaataaattgatacctggttgtatgggtggtatgtttatatacgtttttgtttgcataaaaatgtattaatatattattttgttgtattactgaattatataatagtgtatatatcataatatttgagaaattatgttttgtgcctaaaacatactttggtacataattttgtattttatgtttaattagttataaattaagaattgaatttatagtttaaaaataatttagcgtaagccaaaaataatttttatgtgtttattaaaatatgtagtttggtgcataacaaataatttgatatgttggagaagttaggtgtgtaaaagttataacttaaaatagtatggaatttaataaagagaattgtaaattaaatatttggtaatgcaacataatatattctttataaattaatatttggatattgaaaacatggttttgcaaataaatgttattcaccggcccattagtgttggtgactgaattgttttgggccaaattagaggttaataatgacgcaaatatacattatccttaacccatttatatttctgtttcattgaatattaacaaagtatatattttttattttttggacattcttttcattgtagaaccattgttgtcttatcttaaaaaaacatacaccgaacaaatttaagagcatcgctcgactttagtataattggataatctcatgtagattttctataccgtgtccgtttataaaaaggtaaccttgctcatgaaatcccaatatgtgatttttttttttttgaatagtgttttcaagaagcttgatcttctctatgggtaattattgtcaattgaatttgcatcatattattttcactttgcattggttttgtactttgcatgctttgatttgtttgaatcggttgctgacttcgaattgatacattgcatgcttcgatatccagattccgggccgaagtaagcaattacgattttgattttttatccagcgttttcaactaatatctgtctcgagtttgattttcttcagtttatgcaagattcataatctgtaaattatattgatggctcatcgattcatatattgatatggttatgaatgtcaactaacgaagttatcatcacatacttaagtttaccagttaatcttactatttgcaagtgtttcaaggtttatcagagaaatatttctcgacacattccacaaatttgtgttgctgtttcgaatttggtttcgagagaatgacgatatgctcctcctctatttgatattgatgatgacattcatagttttgaaaatctctttccaattgcattctctagctatccattaaaattgattttgcaatgggactttacgattaaaattgataataaacttgtctaacttctaagtcttagtgctacgattatgaatagaaaaacatctcttgatcaatgcactctcttatggttgaagaaaaagtaaataatgagtagaaatgaatattgcttagtttttttcaaagttgaagacgtatactaaagatttgattgttcatttttgtaaaatcacataagcactgtttcaagttttttttttgaatatacagaaaccatcaca

SEQ ID NO: 13894 - DNA, 3000 bp, Unknown
  misc_feature (1)..( 3000): cDNA_ID_3032673_gDNA_ID_2214665_Annot_ID_188982 3000 nt of promoter + ATG
acgtatataaacataccacccatacaaccaggtatcaatttatttaattactaatatcatggtataaattctattctctaattcccaaaacaaaaacagaaaaatgatttcttaaatacttcttaaaatttaaaacttgaatatatattttatacaatacatattttaaaatataaaatctcgcacgtatatgcgggttgccaaaccacatgttagttttgacatgttttcaatcaataaatgcacattttaaaaacatatacttaaatagtacaatcaataaatctaacattttaaccgtttgctatagcacttaacaacacacatatattataatatattgatattaaaaatttgacaaaaccataatattaacaaacaaaaaaaatttactcgataatataattaaaatttcatggtacaatatctttcaaaaatccaaagttttgtatttatttatcaaaacttaacatccaggcgaagcacgggttatcaatctagtattaaatattttgattggtttggcgaattatgttaggacctattttctttatatgggtttgggtaattctaatatcaataagttggagtattaaaaattatgaaattcttaaaactaaaattaaaatatacacatatttatacaaactcattataaatttataataaaaaccatacatttatatatatatcaatatatatgtgtaaaatgtaagatattcaaaactaaagtttttcttacatataggtcggcatatatacggttttattttctttgcacaaataataaataaacaaacaattacaaagccatataacttttattttcatttataaaattaaaaaagaactattaaaattaatttaaatttatatcttttgaataaaagtattattaaaaaaacaataccaaaataatgtttaaattcacagggcgggtttaggtcaatatgaaaagaaaacggtataccaccggtgaaatcataaagtaacaattaaaataaatgatataatctaaaacaataaactaaacgaatattttttacacaacctatattaattaaaatttaaactttttagttacaaaaatcgattcacggtgtactatagggtcaaatctagggattgtacaccaaataatatataaaaacttaggattgtatatttataaaatacaaaaaaaataggttatgtatatagattatcttttaaacaaattacatattcaaaaaaaaaaataacaatagccccgcggtgtactgcgggtcaaaatctagtatatactgaaagaggagaaaaaactgaaaaactagagaggtaaagaacacattcagtatcggtagtggagaagttctgacgccggtgaggaaaagcttcaccaacatcggagaacgtggctggattaaagttttcaataatagcgtatgggagcgtttctcatgtatgtctaattctaatctcctaatcttctaactaatcttcttaattatgcaattgatatccatatgactttacaatcatcaaggtatcaagcatcctttaaacttcaaaacatttcttttcaacaatttgatgcaacactcgtctcttttgatttaatagaagactcttcaaataaaacttgtttctaaaaaatcacccaatctggttttgtgataccagattatatcgaatatcttagttataaatagatacaacgatcttatagttcttgtgatttcaacatcatcccttgcgaatatcttggactatacaacatcatcatgtgcacttgcagtagtcgtgttatcttttgaggtaaaataccaaagcgaaataaaacatgcatcactgttagtaatactggtagccaacgttgtaaatgttgtttgaagaatcatagggatgagagccacatcgcgaagttcctaagatgatcgtctgcagcgtgttgttccaatctggagtagtatgcattcaaagaagaggagtgcatagatctgaccaaatgtagaatgtatacggacaagcaaagaaaatgtggtctctagtctcatcacgttcaccacaaaatgattgctcttgtccccaacgtcacattcactgacctgtagagagcctatctttaatggccagccaaatgactgctcttgtccccaacgtcgcatttgctgacctgtagagagcctatctataatagccagccaagctatataaatgacactttaggggaagaggtacgtatgatgtcccaagtgcattttgaggagaaaagtggctgaaactctccttctttatgcttccaaagaattttatcttgtcaagccaactgacatggaaggaaaatggcattgattctatcgataactactctgtaaatttgcccccgagctcgacgtagatgccatctttcattttgtacatcatctgcaacatatgcttgcttgtcaataccaagatgaagtggtccccagtcacctgttgtatcaataaaacgcactgcaccagtccaattatcccaccaaagcattgttgatttcccattgtttaagtctacttgcataagtgaagctgctagttgcctcatcttaaggagtttccgccatatccacgatcccacactactctcccaaacactctaatacacattttgacgacaccatgctacccaaagtgatacagatagtgtgaaaagtctctagatgagactgagcgcaaaaacacaagacgagtcttgcatcctttggtttacacacttcctcccaagtaactttcgtttttgtgtcatcggttgtgtgaccataagaaaacattgcacaaactaccaatgatttcaaagcaacgcttcgggtaaccgaaaaatagaacaccaaatttttataatgctcatgatgagggattatgatataaccctattattaatgtttttggctatgttttagatacaagttttagagtctttttgttatttctagtccttttagagtcttttcaagtattctatgtattgagacaagaatg

SEQ ID NO: 13895 - DNA, 3000 bp, Unknown
  misc_feature (1)..( 3000): cDNA_ID_3032680_gDNA_ID_2214665_Annot_ID_188980 3000 nt of promoter + ATG
cctcttaaatcgtgaagtatatatatatatatatatactacgagaaaacatggtattagcgactacactattcatagctaaacagtcgcttaatcgaaatttacgactatttggcgactaaaacacgtagttggcaatacaagcgtcgctatattgatatgtagccaaacagtcgccaaatggtgaataactagcgactacataagtagtcgccattgggtcgccacccagtcgccaattagcgactgtttggctacatttatgccactatatagcgattagttggcgactgattagccactaccgggcgattgttgtaaaaacatggtaaaaacatataattaatatccaaaaactatttttcttcctcgattctcattacctttagaccggttttagttagctttaaacttcggaacttcgacgacggtcgtggctagtcccccaaccagcaacgcctgtatgaagtacccagtaagcagttcttctttcacaaccttgcaattacagcttgaggaagccaacctcaagatagatgaacaagctactctacaagcacatcgtgaggcagaggctttgcgggttgcagctgagcaagcagagatcaagcgggttgcaaatgagcaacaagcagagatcaagcacttgaggatggtgaagaagtacttgaccacaacagacccaaattttctcgccttcctcaaatcttctactgtttcagaagatccaacagaagagttcctttagctatcccttcttctcttctccgtcctttaaaacttgaaaacatgaacttgttgcgtcggaggaggatagtctctgacagtggcacccgtcgaaggctgtgcaattagatttctatcagggtattgaactggcggttgacgatccgccggcgtgaactcgtactggctggaaagtagtgggtcgatttgggggaatcttcgatacccttccttttcctctcttgccttttccaccacgagtcctcatcacttgaagctaagaaacgagagattgagaagattgaagatggattgatgaagaattgggatcgaatggctaaaagggattagggttagggttcgtcgagagtgaagaaaaggggattagggttagggttatgcgataaaatcgtttatatattctgggtaatgggctcttgttactggatcaagccggtaaaagcccaattaattgcctaaatagaatatatgagtcgataaatggtaactgtaactagcgacctattagcgactaaattaatcagtctcacattcaagattgattagagactaatgtataatataaactaattagtcgctaatacgtcactatttagttgccaaagttaacgactacttaatccgtcgccgaataagtcgctaataccgtgttttcttgtagtatataacacaactcaatgttgataaggacatttgcttcttaaggaaggctggttgggaagcactttcatagatcgtcctccgtttcagagtttttactcagtttttgaagttggtagttaaatttcagctaaaaccaaaaagatattggattgcttgcaacattagtttgtgtgtgttacattaagtttaagattaattatttagcatcctaattacttgttacataaaatattttttgttatcaaatagctactaaatttgtttatgttcgtatttatttattttttaggatctcaaactgctctctcttccagcaccaccaaagcataaactttgtcattcgtcatgtcgttagtaaagaatatgtgagatgtgagagcataatcacctacgccaatttttattgaaatatttattttaatgtgattaatattatttattgaaatgttgaatttcttttttttagttgtctatttattgtttttttgtcaatcatttgtctatttattgttaataatttaaatttcttcaattttaaaattactatggtagttcattcaatttaaatacacagctaaaaaaactctaatacgacttttaggattttataacatttatcaaaagaacatcctttttgtttaatagcttttcctctacttttagatatttggacccggtctttttatgtacgacattttaattaaatttcatgaaataaattattgtatgaagattaacttcaacaactttctcattttggtatgcgcaaattcactattgttttatgtgtctctccactgcactagttagtatagctattgtaaagataagattatttacaaaattatatccataacttataagattatctatattttttttaacaacttatattttttctttgaaagaaaaaaactcattttttttcttacattctttcgatatgtatatgaatttccgtcctcacatttttttttaggagctatcatttttttatgtctttttgcaagcactcattgtctttgttttaatctcttttccaattaacacatcttcacaaaacgcaatcagacgctctcatcagaacaagaaaaactactattagtctcacatgattacatgataaacaacctaacaaacataagcatatatattaggttggggtaaaaattctggaagtaacaaagatgctgatttccacgggatatagcatgtgggaaggaggaaagtcatagtgatccattagatggatgtaatgcaagagtgagcaacatacaagaaaaaacgatctaataacgagagttgttttcaaatacatgtgtccccaaactatctctcccgaagcttttcttgtgtgagaaacctaacttcatcgcatcttgccactttagtgtccgtttaagaccagcgatgctagagggctttaggttaccttggtcttgattctacttgtgcacttgaagattctagagagttatgtcggctctgtttctcgtggcgtgtgtcgaaggaccgccatgcgcgtgggctctttctgatggctgaaatctcttgtttttttgcctccactacctgtagccggtgatggatg

SEQ ID NO: 13896 - DNA, 3000 bp, Unknown; identical to SEQ ID NO: 13892
  misc_feature (1)..( 3000): cDNA_ID_2704499_gDNA_ID_2214665_Annot_ID_136572 3000 nt of promoter + ATG

SEQ ID NO: 13897 - DNA, 1441 bp, Unknown
  misc_feature (1)..( 1441): cDNA_ID_3020316_gDNA_ID_2214666_Annot_ID_136574 3000 nt of promoter + ATG
aattctattagtattatatatatatatataaatagttgttagctttatttacgatccatatatattaaaaacgtctcatttttctattcgtgttagtttagtcctcagaatctctaggaatggtcatgaagcgagagtatataaaagacgacgaggtacgtatccaatattgataatgcatttagcaggttcatgtgtgttaagaaaaataaaataaaaataacatattctaatccctaggaattttagctagaaaaataaaataaagtataagatgataaaattaaactaaaaaagaaataattacaatacagaaatttgatattttctaattatctattaaattactatagctgaaaatcataaatagtttaactatatgttatttctcttttaaatatatggtttgttaaacaaatacatttaaatatgtgtatatgtatatatgtatatacaggaaataaaatttatttcttaattgatgtttgttatcattttcttgtcttctactagccagttagtatattagttctgaccatttataattcccctctctaacctttattttattaatttaaaaaacaataaatatagtatctaaacactaatatgtatcataaattttgtaaatcaagtctcctggcacgaccctgaccgagatgttcaaagacaaagaggtataaatactatttggtcctattatctgcattttagtgttatatttcttgattataaattttattttatagattaaaaatagtgttaattacctctattaattttaaaaataaaacattgaactttatttacgatgcatatgttatccgaaataatattaacgtttcatttttttatttgccttagcaccacaaatctctcggcaccgccctgggtgagatattgaaacacaatgaggtatgcatgtattcaatattgataacacatttagcagattcaattgggttataaattttattggaaaatattatatttttatccctaagaatttcagctagaaaaaaaatatgatgataaacttggactataagagaaataattacagcatacagatttgatattttctaatcatttattaaaatattatagctgtacatcatagaaagttgtactatatgttatttctcttttggttatatgactattgtttttgttttggtagtttatatgactattgtttgtaaaacaattacatttatttagttttatccaaaaaaattaatcgttttttttttttggcattagccctccacatctctaagcacagttctgggcgagatgtttaaaaacaacgaggtacgtatttagtaggttccggtgtgtgtgtgttagtgtgtatgtgttttttttttatcaattgttgttatactattacttgtaggagaaggaacatattttttcggatctagaacgaggaacaatg

SEQ ID NO: 13898 - DNA, 3000 bp, Unknown
  misc_feature (1)..( 3000): cDNA_ID_2704510_gDNA_ID_2214666_Annot_ID_189003 3000 nt of promoter + ATG
agaagcatgaagcgaaggtgaagaagtatgtggcgaagtttgaggagattgtttggggagagatgatgacgtcactttctgatgatgtgacgatgactgcggaggaagggattaagcggtttagtgatgggtttgaggaagcgtataagagacaaaccggttggattgtaccggattcgaaattgagagatgagattaaacggtctgttgggatgatgattataccgagatattccgggttttgtgaaaggaaccgggtcaggttattggagaatgtcggatttgaccctgaggatattgggaattatctttcggatttgtattttgggtctggtggatcagggagtggttcgtcagttcattcttcgggttcttctgtttaacacgtttgtgatgatttaatttatattgataagtaaataatattggtatttgatatcttgtcccaaaaatagaaagtaaatatattgatgtaattattttggaagctatggtatttttattagtctttatgaatagttttgtgattgtaaaggaacaaaaggaaactaaagtttaaacttactacatacttctgttttaggaaaaaaaaaattagtgataaaatacatacgaattagaaacttagaggacactggtcaatttatttatcactatcacaattcgatacattgtccaaatatacgaattagaaactttggcctttcaggttgaacattgtccattttgttaagtttgatttcggttaaatccaattagagtcaataaaccagtttactggttaagagttggctcttgtacgaagacacttttgcatttctaggtcgaatgaattaatttcttaactctcacggcttgtcttcctcaatagtcatcttgtagactgagattagccattgtattaacatgataagtaaagactaaagacttacgtctattcaaaaatatttagtgtattataacgataatctatgtaagaaagatgaattcaatcaattcagaaatctacataatatatatcttaacatttattttcaagatactataaacactaaatatacatgtagcatgaaattagacacaaattttcgaatcttaaaagcagctcaaaatatagttagcattttttttgggttcacaaatatatatttcatttatattaatctcaatcccatgcgtaggcaatttttagcgactatatatggcaaagtatttgtttgtatattttccacatttgcaaattaaacacaaatggctttcaggtttcctctcatggccttcctcgtattcgtctctctctatttaacttccggatattctctttcaacaatatatgatgtctcgaagtaagaacacctcatactcctatatttcacttgtttcattttggttgcaactaaatacatacatattgtattcttttctttttgtttagacatgaagatgaatcttatgttatggctacgagtgatcatggatcgcctatgaccgttgttgaagctgaagtaagaactccaaatcctcaagctctacttgatggctcaaaagtggttacgaatactgtagtttctaagagatcatcaagcaaaagtaaaaaaggttctcttaactaaagaaaattgctttggtttaatttacgttgataagagattctcttaagcttttagtatatactaaatttgatattaaaaaaaacttcaaaaaatttcaggttggaagaagaaacataagagcaagaaagtaggatcagtggatgttgaaatctgtgtcggaatcatcgtagcaattgtggttatcattattttgatttgtgttgtatactttttttgtctgagaccaagaacaaaaagggctcaaagtatatagtccacaatgtaacttgctacattctatatgtctttgtaactcaacttaattattacattctctatagattagttatttattaatgaaatgctagtaaactttatttaaacatctatagatcatcgaaaatttagactcccaaaacagaggatcgtgtcttaacacataatcgttaccatgagttggggagagctaaattgtttctcttctttttttgctaaaagttttttctcttcttatgtgcgtgatttgttttagtttttactaattaattatatattatggcttccgtgaattattgttctcgttatttttataattaatatacttctattgaattattgatcttgttatgaatcttgattttaaatagagtatcaaactccataatgaaattgttttaatgagtatcaatattgagtttgattatgaaattgattacaatggaactagtttaaagagtatcaatttcaataaatatatagatataatcatatgaaatttaaaagtatccaacacaacaagcatacactaccatattgaattagatatatatatttaattttcagaacaaaacaaaactaaaattcaaattgtctgttggtatttttgaagcctcggaccccaaagtatagtttttccaaacttgatactcttacaattagattctctaaatctagattgtttaaagatatactatgtcgaaataaataagaaattaagattttcatatataacgtttctccttttttcttaagtaattgtaagattaactctatttttacattctacatttagacatcactctcaagtctcgtaaatagactgacgtatccaaatccattgattttcgtcttttttataagtagaaaatctaaaattgttagactacaataaaatcaaatccactttttaaattttttataaagcaaatggaggataaccacatgctttaaggaactcgaatcaaagacctcaaacataaaaatagtcaaatcaaaaatcaaaacatacttcctttgaacctccaaaacaaaacaaaaatcaaactttaaacatcttttcttcacgttctatcataatttacaaaactaagaaaactaaaacacaacaacacaaaacaaaaacaaaatg

SEQ ID NO: 13899 - DNA, 3000 bp, Unknown
  misc_feature (1)..( 3000): cDNA_ID_2704518_gDNA_ID_2214666_Annot_ID_189008 3000 nt of promoter + ATG
tgaaagcaaaagctaatgaagaaacaaaacttcaccaagaagaagtgaagaatcttcttcatcttctcaaacttgctcgtcaagaaagagacgaagctaaagatcaattacaaaaacttctcacaatcaaaacaaattcaagcataaccgagtcaaactctcacggttcttcaccggttgactcgttcttcgaaccggtctcatcctcggaattctccaatttcaacatggtacctgaaccgattaaccaagtcaaattcaagaaccgacaacaactcgttaaccggaacttgaagaagattgatcctgtggatgctctaatggatgagatcataaaaggtaaagctttaccggagaaagggaagcttcttcaaactgtgatggaatctggaccgttgcttcaaacacttcttgttgctggtccacttccacggtggcgtaatcctcccccgcttcaacagagctttagagtccctccgatctctaactcttacggttgtttaccggcgacgacaacgacttcaatgctgaattttagaggttgctctgttcctagaattgctaccggaattgaagttgcaactaaacgacaacgatttcattagtgtttttgttgttacaattatttttcttttattgctctgttttttttttggttatttacttagttatttggaattatattattgtaaagatttaaaaatcgtttttggagggtttaagagtttgtgtgtatattggagtataaacgatttgagattctggagtttaggtattcatgaattatacttatatcatcattgatcctgattccatatagtataccatgttcgattaagtagctaatttttggataatttgatgacataaaatgagttctagaccttaatttatgtggttatgcttaaataaaatatttctaagttttctcataattatgttttaaattgtaacatttaaacgcagaaacaaacaaacaatgaagacctaaaccaaacaagaatttctgatggaaatttgagttgttttcatcaacttttattaaaactatagagataaaatacatgtatttttggcctggagatcactggtgtgcctaactctcacagttgtagagtataaagatcaaagaccctaaagtagagacaaatcaagacagaggacttggtcttgtttctaaaaaaatattcaattaaagacaatacagttttatgggttggattgtgaccagtgtttgtggtggctttcggtcatgttcttgtacaaagttaggcgcaaaacatgttctgtttccttagttgcaactgctatgaacggccatcaacttcaactagtttcaaagaagttgcattgttgtgtcctcaaatcactgttacataagttgaaaaattaaaattgtttggcttttgaagatggagaaaataaggttgttccttgaagttttggtcatttcacagaacttatcgatgttatcaaaatgaccatcatctttttctccttagagaaaaaaaggattaattaaaactgagttttgggctttgtggagaactagactggactccactacagtagtcacaaaaactcaagtgggctttgtaagcttattacaaaaacaaatttccatcacaacgcaaactaatatatacattttaaaaaaaattattaaaaaataaaaagtgttacatgtaagtgaacatctttagggcctgaatgtggagcaagtttactatctaaattatttatttatttattaaataattgtttttttttgtcgacttatttattaaaatattttaaaaatggctctcttgattagaatatataatagggttcttagccgttgcaccattcttgacaaaaaaaaaaaaaaaaaaagccctcgcaccactagccctcccttacgaacagtttgattatgattattaaaacatcatttattatttaataaaacaatctatagaatataaatcgtcaaaactaagaaaaaatacttttacattagaagttgaaacattatccaatttaaaacaatttttttccttgaaacggaaggagtaaaacaactaaaacatcattaaatagaacgagtagtattcccaaatggataattgttgtagattcttgggaagaaataattcttcaaacatatataaaaaaaaaactcagtcatttactcatttgcaattccgtaaccgacgttaataatttctaaggataaataagaattaaattagtaaatataataatatccatacatagatgattataatccgaattcaaatattttttcctacattcccgattttgtttttctcttaatctttcctctttgcattatccattgatgatagaatataaacagatactattttataatttacatacttgtcgatcaatctaataaataaaaaaataattatttccttcaaaccttaaaggcttatacggttataccacctctgcctcgtataattttgtttcctcctcaacaaacaaaattaattactaagcaaatgataatatcatttgtactcaagatcgtcaataatataaatactatttctatacaagtaaggaaattggtttaatataataggagttttattaaatttaactcatatctatgatgttatgtcttaatatataagttgtatacatgatttattaatatgattttatctattatggagttataaatgaaatgatttagtaatacgtaatattgaaatagatacttgttgaagaaaatatgaattagttaattaaggtattatccataatttatccatattggccatcgtaattatccataaattggtccaagtaattatccaagtcaaagatacgtttccgaaaatctctcattaaataaccggatatgaattctcaatactataaatacgtgctctctcttcctattcgatatttttaacaaactttctcaaatattttcttacttttgatactctcataatcgtttagatcaagtgtttaacaatg

SEQ ID NO: 13900 - DNA, 3000 bp, Unknown
  misc_feature (1)..( 3000): cDNA_ID_2704529_gDNA_ID_2214666_Annot_ID_188995 3000 nt of promoter + ATG
aaaacttataaatggtccatcaaaaatcagaaatttttaatatttggtcagctttatgtgttgtttagtcgtacctcttaaagcaataagagttttgtaagatggattatgctctaaacatggccttatagaaaataacaaccacaccagtttttatgtccgtcaattcttcatacataagcttcctttccaattccatcaactccaaaaataatcttagaatgacaacatttaaccattttgactctccacaatgtaaatcaattcacgtgaactttgtgatttatcttttaaaagacacaacatagaaaaaaatctcttccaaaatttggatatattaccactcgaagtggttaaccatgccttaatcaaatggatagacctggtttcgtcccattagaaatgatcttcatcttccatcgttataagatacatgccatcaaaagctacatgatcctcctgatgatgaagtgtcgacgatatggttcatgaaacgcttccaagacattcaagcaatgaagaatgggcgtgatagatacatgaggactctctagtcctttgacaacgtatatcttctcataatttcgtgattggtgagctttaagaaagattagctaattttatgacaaatatcttgacatacaaaaaagttttgacctagcagctcccacaaagtcacatctcactttgacttactccacaagacccaaatttaactacacgcaccttattggtcactattaataacccttataatacaccttcccgtagacaataacttacgtttcttcttcttcttcctttaaaaaagttcaaattaagcatctcttctctcactttaccctcttctctctctctgtctctctttctttttccgtaactcttcatcttcttttcccagatttttccgttttccaattctctgtgtctaattccaaacttcctaggggttttttctccaacgtgagaaaaaagcttctagctttagcgatgggatgtttcggacgcactccgaaatcgaacaaacgatcagataccaaaaccacgaagaacaacgatttcaccccaaaaaaactcaccgtcaatgcaaatcgagataagctgacacaacccagctcaggtatcgacttgatttcgcataaaaaatcgatttttatttcgaaatttagaatcttgcgataattaggttttgtgttcttaatgttgcatttatggattcgttctgatgtgtttgttgttatgtctttgttgcgtagattgtttaaaagttagtatatgtggagatgtaagcaaggagatagttactaagaaggatcaattagctttggatgctaaagatactaatgttgaagatgaagttatagtgaagaaagcacagacttttacatttgaagaactctctgtttctactggaaactttaagtcggattgttttctaggagaaggaggttttggaaaagtttacaaaggtttcattgagaaaatcaatcaggtttagtatttgtatcttgatctaatgagttacagtgtattgtggctagtttggttagaggttttaagagtttgtgaatggtgtttcgataggttgttgcaattaagcaacttgatcggaatggtgctcaaggaatcagggagtttgttgttgaagtgttgacattaagtctcgctgatcatccaaatctcgtcaagcttataggattttgcgctgagggtgttcagagactgttggtttacgagtatatgcctctaggatctctggataatcaccttcatggtatgttatattggtattgcatcacattgctttattgattatgttaacttgttttcgtgtattctgtttggttttagatcttccttctggtaaaaacccgcttgcttggaacactcgaatgaaaatagcggctggtgcagcaagaggactagagtatctccacgatacaatgaaacctcctgtgatataccgtgatcttaagtgttcgaatatcttgatcgatgaaggatatcacgcaaaactctcagactttggattagctaaagtaggaccaagaggaagtgaaactcatgtttccacaagagttatgggaacatacggttactgtgctcctgattacgcattaactggacaactcacattcaaatcagatgtatacagtttcggagttgttcttttggagcttattactggaaggaaagcttacgataacacgagaacacgtaatcaccagagtcttgttgaatgggtaaagactaaaaacatctctttctcctttttctaattgagcatcataattcacagttttgactgtaatgttacaggcaaatcccttgtttaaagataggaagaatttcaagaaaatggttgatccgttactcgaaggagattatccggttagaggattgtatcaagcacttgcaatagctgcaatgtgtgttcaagaacagcctagtatgagaccggtgatagctgatgtagtaatggctttggatcacttagcttcttctaaatatgatcgtagtcaccgtcaaaagcaggataatgtgaccgagactaaagtcgatgaagagaaaacacttaccacagaatctaatgtttgtgtggaggagaaacaagagatcaagatatgctcagatcaagcaacttaatcatcaatgaggattcttaaaattttgatattttcttgatttgtagaatgcttcgtttacgtaagcaacagttttgttcgaatttcgactcatacttatatagtaaactgtagcaaaagttcggtttatcagaatcttaaaccattacgtatgggaaagtccggtttatcaccaaaccagtttatggaaacgaatttgtatgatgttctaaataacgattttaacctcaaagcttctgttaaattacgattgtgccataactatataaaggagagacccgaacaaacaatccggaagcggaagctaaagttaagcaacggccgccgcgaagctaacctccaaagaaggggaaaa

SEQ ID NO: 13901 - DNA, 3000 bp, Unknown; identical to SEQ ID NO: 13900
  misc_feature (1)..( 3000): cDNA_ID_2704529_gDNA_ID_2214666_Annot_ID_136576 3000 nt of promoter + ATG

SEQ ID NO: 13902 - DNA, 3000 bp, Unknown
  misc_feature (1)..( 3000): cDNA_ID_2704537_gDNA_ID_2214666_Annot_ID_136578 3000 nt of promoter + ATG
aactaaaacataatttactacttacacaaaatttgatatagagcttttattttctttttttttggttcaactaaatagatatactgtacagctaaatcaatatattgtcccttcaagaaaatcaaaagagatacaattggaaaaattcacaaacatatcttttatagcatgaatgatgtgttttaggttgctagaatcgaagttactggatcgggcacaagatacaatggtatgttaagtctgaaagaggaagaatgacagctaacaaaggcaaccacaacatctctgtagaatccactcgaagctgcaagaagaaaccaagaaattaaaatcctaagaactaaatgtaagtgaagagataaagagagaaagagtagatttacacatggtggagacaagaacatggtctatctctaggaaacatgagactgctgttgctattatggtccaacgagaaaacaaaagaaagattgttttcaagaacgtgactcttgttgcttgaaccttcaggagaaaatggttgagacagagaagaaacagaggaagagaagtcatatttttcacagtcaactccgtagctcacaggaagagaagatgaagaagacgacgatgaaccaactctctcctcttcgttcatttttccattgatctttctctctctttctctctctgctttgtgttttgaatctttcttgtctcccgggaaaattttgaaacttaggtgttaaacctaacggtcatcaactaactgttacaacaccaactagcttttattacttcccctactacatgcttaatctacttacgtgagtgacgtcaattcttcggttagaaaaaaaatacacgagtttcagagaaatgggcctcttaaaggtttatcttgggcctataatgtgaaattaatgactgggcctattaaaggtttctctttgacaactcatgcaattacatttatcgtcttaagtgaatcaatattgtacatgtaaataaaaattgaatctaccttaattatattcgctttatttagttatacacacataaaaacaaatgtcaaaagacaatatcaatcaaagttaacattatattttttttttaaaacttaacagcattcaaattttctatttaactaggacaaatctaatagggaaacgaaaaacccaaaaacaaaaactataatccaaaaactaaaatttgaggcaccaagtaaaattaagtcacgtgtgtgtgtgctttcacatctacgtacttgcgtgtgttattccctcgacgtgaggccaagttttttttcatttgacatttacaaattgattaagattatagtactagtattttttttgttaagaagattatagtaatatattattggtatgttttgtttttgtttttgttcaatccttcaaacatatatgactgactccaaaacctcgagactagatttgtgttcaaaaggttttgaagtattgtaaaacgatcgttaacttattgcattataattctaagaaattagtctgattaacattaaaaccaatgtttacaaaattggtaggtgctaattaaacagtcggtgatcaaatgcatgccgtctaaaacatttaattggagactaaccaatttttaggtggtttagacattcacaatatacaatattataaatataatttaatgtatcatagatgaaaattggataaaacttatgttattaaaaaaataaaaatattcaatcaaaaaataaaaattaaagaaaatatttatttgattcatatcaaacaaaatattaaatgataattatttaccgatatttaggaccatatatcgctttttaaaccactgattaaaacgaaaagaaaataatcttttgtcataaactcataatatagcaataaagtcatatatatattagattcaacatgttatcgacgaaaactgatttatttacttgaaaattaaagtttaataaaatcacaggttggattgaagtagtaggaaattaaaaaaaggctaatcacatattataataagaattaaggggttaaaacaaaaaaaaaacttcctagatcaaaattcgaaagttttcaaatcaccttttctttatttgcgtgtttgtcctttttcacaacggtcggatcacggattttacaacataacggttcaaaaatttaacgccgttagcatcctaccgtctcacaagtcaaacgccagcgcctgccgtaacggctcatttatttttatttttttaatcctcccaatttcatatatttttgctcttcgtttttaatttaaacctttttattagaaagaaactctttgcttcttatatttcattcatcaatctctcttcttcatcggaaatataaatctaccatcgccagaaaatttcaatatcaaattcgagttctccgagattgcttcgaggaatcggaatctaaactccgacgttcgttgtttgttcggtacattttcgactcatgtttcaattccccagaatttctggagattcggtgacgcattgaatcttccatttccgaatctaatcgcggtttctaggtttaatttggaatacgaattcgatttttgttaaatgtttaggacgtgattcaatgtattcttagaaatttgttgattagattgatgttttcgttagattaagaccatctccaatgcgcaactctatatttcctctattttacagttgactctataaaatatagttgattttactgcattgtatgcctctaaaatagaggaaaaatgtagagattgctcttttattagctcaactatatattctctaaactctaaaatagaggaaaatatagagttgggcatttgagatgctctaatggagtttaaattttattgattgtgattttaagcttgttttgtgtggatccattgacttattgtggtgattgatagagatttgtttctccgttgattgcagagagagagataagatagttttgttgcttacgaaactgtaagaaggtagagaagataatg

SEQ ID NO: 13903 - DNA, 3000 bp, Unknown; identical to SEQ ID NO: 13898
  misc_feature (1)..( 3000): cDNA_ID_2704510_gDNA_ID_2214666_Annot_ID_136580 3000 nt of promoter + ATG

SEQ ID NO: 13904 - DNA, 3000 bp, Unknown; identical to SEQ ID NO: 13899
  misc_feature (1)..( 3000): cDNA_ID_2704518_gDNA_ID_2214666_Annot_ID_136584 3000 nt of promoter + ATG

SEQ ID NO: 13905 - DNA, 3000 bp, Unknown
  misc_feature (1)..( 3000): cDNA_ID_2705502_gDNA_ID_2214667_Annot_ID_136591 3000 nt of promoter + ATG
accatcgatgtctattgtcttgttgtcgatatgtcacatcaaaagtatagtgtatttcttcacacaagcaatgtatatatgttcaaatgtgtctgcttttacataaacaaatctaaatcaattacatattcatgcacaaaataatttattttatgtttagtggtggatcacacccatcataactaagactgatggggaactaaacagaaggtaaaattcgttgttcttgttttgctattgtgttgaagttgacttaagcatctcaatgtatggttgttttaagtcttcctcaatcaccggttctatgactacaattctatgactatacatatatctttgcttgcatacgtcaactttactaaaattaaaatgaaaaatgaaaaatataagaaggttctatagatatcaacgtgtttgattcaataaagagaatggtaaacaattttagatatattcacaaagtcagaagttttagccacaatctggaaactgaagcaccaatgaagataaggcaatcaattatttgaatcatagtcattctggattttatagaggaaatgatgagacgtttcaacttacaatttaagtggagaaagaaaacatttatggaggagaaataacgcaaatgcgtgaaaaactaatgcatcaaaaattttggatgactgatgtggcaagatttaagagaaactcttatttgctgaagtggatactttgacaggtctcaaagagttatttttattagtagtagattatagagtaatattagtagataaccaaataaaacatacaaattaagaaactagcagagagaaagttttttgttacaaaataaccatggatccacattgtctgaagaaaggaaataacaaagctacccttcatttgttgtaagatgaacagtaaacgaaacacatccgtgtaatttttcaaaatagtatgtaacattaaaatttcacatgttatatttagtttaaaaacatgctatttcaaaaaacgttatgaatttttaagaaaaaacattattatgaaattcttttacatgaacagaatctttaaaaaaaaaattatatgtgattttaataaaaaccatgtattactaaaaaataagaatatatttttaaagaaatcacgtgtgatcttaataaaaaatgtgtattactacaaaatatcatgataaaaagagatattaaactgaatagaatgttttttccaaaaaataccatgtgctttttataaatattatgtaataagagaaaataacaaaataaaaagaggatattatgttatcgtatgtatttcggaaaaataacatgttacaaaggacatttacgtaattacacgtgttctccaacatgttttcgacaagatactgtgactcaaggttagtttgtacattcttttcaaatctatagtcatttattataaatactctagattatttctgtttaataaaataaattagtgatagaggatatatgttatatacgttttataaactattcagcttttttttttgcgtcaacaagtatattagattgactcaagcaaatcaatgttgagtaagattgtttacataagtgataatatgtggttcggtacgaactttcgtgctatgtaatctatcttgacattctgtttcaaaaaatcaaagaaaaaaaatcaaactattctttgtcactaaatcgcccccaaatatgtaaaacaaatttcccattcttgtcagaaagatatcatctacactgtaaagaaagtttttctcgtttgtcttggttgataatacatttcatcgtccaaacacttttatctctgcatgtagtgtggttaactttttttgaaggtttacaactccaatatcatgtgttccattattcagataagtacaaaaccatcctagcctttaataatatgtttaatggaagattcaatgttatttttgtttgaattttagtctttttagagagccgtggaaaaatccaatattgaatttatggtccattaaattaaattatttatacatgatttttagtgaatttatctatattaaagcatttaaatatatgagtggtgggtatttcaaattatcaattatggttgaaacattgaaatgatatttattgtgtaggtcagtaagatattttaatataactattattatggtggagaacatcacaatacaagttctatttggaaattaaatttgagtgcttagattatttttttcagtttacaataacatttttttttttttttcagaaatagtgtcaagtatgtttagattattatatgatagcctaaatattggaaacttttgaaaaatgtctaaatttttaatattgaaaattcaaatttgcagtgtcatataataattttttcttctttcacatgtagttaagaatattattaaaattttcaattgatgcttcctttttaatttgttttaccataatccatatagttgtgtttgttgatgcaatatatgtataatttttcgttttttcgatgttagattaagggtttgaaaatactgatacaactatataataaaagtattattagtataataattataatattattaaataattttaggattaaaatttatttattaaaataaataaccttaatatatcttaacatttatttttaagctattaacattataaaatagtaattatgttgtaaatactctctattaataaagcaaatataaatcttacaaataattaaattacaaattttagaagattttaaaaaatattaactatgaaaagaatatatatatatatataaaactaaaataacgaatataaccatgcaaaattgattgtatatatacaattatgtatgaatataattcacgcaacacgtgtcagattttttctagtatattataatgatgtctctgttttctgttctttgaagtcgtgcattctcatctcacacgttccaaggtcaagaaaggatcgttgacaagaactaaagatctccaagaagataatg

SEQ ID NO: 13906 - DNA, 3000 bp, Unknown
  misc_feature (1)..( 3000): cDNA_ID_3020341_gDNA_ID_2214667_Annot_ID_189041 3000 nt of promoter + ATG
atcaaaggagttaaataagggatatcatatcaatcataaatggattttagacaatataatatttataaaatgatattgaaaatagatgcaactattcaaaactggaatgctaaaacattaatacatgtttgcatcacccaccaccgggctatgaatagttacaaaattagttatataattataaaattggtaatttatatattcaatattgtaatagtaaatcacaaaaattaacaattaacaagcatgattctcttctttaacgattttctttgtagaatcattgaatcatacgatagtaattatagaaacaaatgataagcatgattctcttctttattgaatcattgaaaacatgcttttaccgatctatactataatcatcgatcggctcatattgttttgtttcaataatagaaaataagtactatgaaccatgagtcgataagtaaacatggttcttaaaaaaaaagtaagaatctctatatctaccttttagagcgtgctgataacgtgttataaacagagaaagaggtagaggaaatgagtgtgttattccattgagataaagggttctttatataggagtacaaggaaagggtaaaaccctagaaacatctagatgatgggcttagatgatgggccttataatgggcatccatctttattcataacaaaacattcttttttctttcttggacaaaatttgatattccaactaaaaccaaaatcttatcaaaccaaccacagatcggttatcattctagtggtctttttttgcggtcttagatttattatttattagaaagttatccacgcatcgcgtggattatatattcggttttagttttgaatatataataacatttatattaaattttatctataattgttaatatatcgttcaaaaataatttaaaatattaattttgatgtttacaaattatgatgtgtttaaaaagaccttaattaaaagattttaatgcactattttgtttttgtgaaaacggtatattttactattaaaaaaaaagaaacttaaatgaaataaaattcccaaattttatcttcaattatttagaattttaacttcaaataatgaaaaagtaggtccataatatgtatgttatataaatattataagttgttacatcttgaaaccagagtttattatataagtaattttaagattatttttaaatttgttttatttatttttgtgatatcgatatgtgtcaatcaaatgaactaataataacaaacacaaatgtcattttataaaaattgtatatataaagatcatgagcgtataaattatttatttgtaatgtgatggcaacaattatagctatattttgtgtaacatttagaagaaaaaaaacttaagaatgttcaaaatatattaacccaaatggttcaaaacatatatgtccatttatgtaaaatattacgtgaaataaatgttgccataactgtcaaaatatgaaagtaaaagatgacatgtgtcgccaaaaaatagcaccgtattgtttacagaataattgcgaagaatgtcatttcaacactatcccttatcaattatgcctcgtcctctttgctattttcatttataccttttaatgaccattttatcctatttggaaaatgttataagttaacaaaatgaaatattgatttttcctcttatttaagatgactttcaatagaaaaccctctaatttgactaaacatctcagaatgtctgctaaatatactgaaagatgtcaccctattttcaaatgatcaacaatactttatgtaaatggaagataaattaaaataaataaaatattctctttaagaacttaagagcatgtccattggttagtttctttaaatgaatccttaacattttataatactaacttttgataattttttagtttaggattgttgatgaatccttagagtttttaatgtccaatggtagaatctttaaatgagtttcttaaaaattttaaaaatatttttgatataattataatttgatataactgttatgaatattagatggatgcccattataaggcccatcttctagatccttctagaatagaatattctagaattatcctgtagatgctttgtgaaaccctaaccttatactcctttataaaggacctctcattcattggaataatacacacaaatcttcctcttcttcttcttttctaacacgttatcagcacgagctgcctaagctaatagatactaaaaaaaaatttctgataaaaaaccatatttattatcgactcatgattcataatatcaatctcatatcatttttcgatttaaaaccatgatggcttgaatccgattcatacgttaatcggttgatgatggcttgagtttcttctttattatttctatgccgccgtgtgcttcgtcaataatttaatacacccatacgtttgccgttcaaatcagtttttgataaatcgtatattatttattattattttcatcacgtcctgattttgataaattgtacaccacatgtttaatcgttatatatcatggtcgtcatctcgtttatcttgttgttatgataagtaaatatttttcatttttattaaatatgctatcttaaagaaaagtcaaacatgaatatacggttcatttcatttgccatcacatgtctaatattatatgaaaattaatttaataatctgatcaagttacacgatcgatgatgacttatgctcatttgataaatttattgcttcatatttttttatattattttattgactggtttagttggtacaattgtttgatttggtttgataaattgaaatcacaatctgttatttattgataatataaatatgacatcgttattcatttatttttatatacaattattgtaaaaatatatatatatatatatatatatatatatatattaattgtatcatttatgaaatttaattaaatttcttaatatttcagtgaatcatg

SEQ ID NO: 13907 - DNA, 3000 bp, Unknown
  misc_feature (1)..( 3000): cDNA_ID_3020335_gDNA_ID_2214667_Annot_ID_189043 3000 nt of promoter + ATG
atctagtatatcaagtagtataaaatcttattaaaagactctagaagagcatatacattgttttctatgggaatacaaaattaaaatcatcgatgcggtatagttctccaaatctcaaagttaatatgatgagatataaatacattatgattctagagtggaatttaatacgagatggatgaacttgaagtttcatcatctcgagaaggagaagtaatgaatggataataagtgacatatccagaagattatgttcaatctttgactactaaagatctaaaagttgtataaagcaattcttatatgaatgtgttattagataaaataaattataattagttattactaaaacttcaagacttgaagtctctttttgaatataactcacattgttaagagaatatttctgatgcgcagatggtaaaacagaagattaaacttttacgcaagtatcgttgtcctgtagacacaatatttgaaagaaatttaagaactattatgaacttaaatcgagtgtttttcaaaggctaaaaaaaatatatgagttattgatgataagtaatactcatattctgaagtgaatataagatcttacatagctagtcaaattaaatttaatatcgtttatattagaatctaaaattttaattattatctcgttattgttttattaacatatgattgattattaaaatacatggaagtaattttgattataagatctcattaagggagtaactgataagcaatgaaaagtaaattagaagttttgaaagaactagaagtttcaaaagaattaaaagtttcaagagtatatttggcttaaccggattggtcatcctggtttaatgatgatgtgaaagtattgagaatgctccagaatataatgagtgtcctgtaaggaccaatttcaaactgctatcgagtcttaagatcgcatgaagcgtaatagaccttggttccaaatataaatattctcgtaaaagtgaaggagcacaaaattaaaaatgaccaaattgaggaaataaatattttgatgatctcttgaagagagtgaatgatctctaaaagagacataaacatgacaaatgaaacattcaagtacttgacaatgaagagatctagctagctatgtcatgtcaaaatataatggaatcaaaagcaaatcgacgtcgtaatatatttgcatgctatgagcagttgatattatagacaaaaaggaggatcatgaaagaaagtctattgaaaagtgtacacaaagtaatgattagccaaaaaatggaaaagaagaaatggacatataattataatttctaatagagatatttggactagtagtctatgcacatgatgtgtaaaaccagtggaaaataaatgagtctttatgtgaaagaatagtgaaattcatgagattttcacaaagataagaaatgtattatgaagagatatattctcttgtggtggatgtaatattttttaagtatctaaagtctggcaataagagacggaacactggatatgacatttatatgaaattcttgaaagatataatttctgaaggattaattatatgagaattatgttctctagaactctactcgatcgaataaaaaaaaaaaaaaaaaaaaaatatgtaacatgacatataatcatataaatgtatatttatgttgagtttgtcaaaatctattgatcaaactaatatttgttttgaaaatcattaaaactcctacagagttatcataagtaattcgatgacaataatctatgataaaatatcactagataatgatatttataagtctatatgaaaaccatataattttgatcattaagattatggttattaattccaacgagatattgtatttgattgaaaatcatctcctgaagaagatgtttccgagggggagattgaatgatatgcgtggatgtaccctttttccttatgatagtttttatcccacatgatttttctatgacaaggtttttaacgagacattaaagaacacgcaaataatacacttgatgaatattaggaaattctatcaatcatccaatgaatattatacactaatgatatttagagaaataaataagatggtcaagatgaatcatctaaaagattcatgagcagcagaagaatggcgttgtactttatccagaaatttgttcaagagaagaattggcagacttattctcaaatactgtttaatcatgtagagattttaccaattcatgaagctagccgcgagtgtgtatggctaagatccatagttcaccatatacaagaagactgtggtatgtatgcagaaaaaagactccaacaattatgtacgaagacaatgcagcatgcatcgcacaactcaaagacggatacatcaaaggcgatagaacaaagcacatcctaccaaaattcttcttcacacacgatctacaaaagagcggcgatgtacgagttctacagatccgttcgaatgataatctgtctgacttattcaccaaggcgctacctactgctacttttaagaagttagtctatcgtatcggattacgccgtctcaaagatctcgacgaatatactcataagggggagtaattgtatgttgcactctttttcccttaaccatggtttttcccattgggttttcctggtaaggtttttaatgaggcagcatttcaaatactttacgaattatgatactataatggtcatcagggggagtgttatgaataaagatggatgcccattataaggcccatcatctaagcccatcatctaaatgtttctagggttttaccctttccttgtactcttatataaagaaccctttatctcaatggaatatcacactcatttcctctatctctttctctatttataacatgtttccttttttttgtatacttactaggatataaaaaagaaattttgttttctctaaaaacattaccattcgttgataataaaccctaagaaaaaaatcacgcaagttcaag

SEQ ID NO: 13908 - DNA, 3000 bp, Unknown
  misc_feature (1)..( 3000): cDNA_ID_3020331_gDNA_ID_2214667_Annot_ID_189044 3000 nt of promoter + ATG
tcatatgttatcgtaaccctcgaacctatggttcaactctactcagtcatcgacctcgaacccatagttcgacataaacctgtcatcatgctacatgcttgatcatcgggatgtttagacatgttatacgtatagtataaacctgagctgaattgattcacataacctaaattacatgtgtgttaagagatttgtctgaggtgagaatttgcaaacatgtattatttttgaattattaaatatgaagataaatatacctaaatattatctaatctgtataataataacaatcagaataaatatattttatgtttgtgtcttttcatataaaagtttataaaatgtattttttatgtccaatctgaataaatcttttcctttcaagcaattttacaatagaaaaatatgtttgattgctaaaaaaaaaaaaaaaaaaaaaaaacctttttagtgtagtacttgtctaatattattagtctatcaatataatactactagtataccaacactaatacttttctcaattttcttgtcaaactagattttaacccgtgatataccgtggaaacaatttattttcttaaagttagtatatataaaagtttgcaaattatatctatctataaaataattttattttatagtttacaattcttattaagtaacgtcctgccaaacccgtcctctaaaaaaacttctttattttaataatgttgattttatttatgatatgtttatgaatcattatctaaatattttgtaattttgtaataattaattgctatcaaatatctctacggtttgctgcttataatcgaattgttatagtcataaaaaaagcaatatcaaaaatgataattttgtagtgtttaaatcatattaaatattttgcaatatcaaaaatgataattttgtactatttagtaactaatcgtatagttaatgcaaagagattttgagaaagtagttaaatgcaaacatttaattcaaagatttactttctaattatcaaaaaaaattattaaatgtcagtgacagccactgtaaataagtctcaacttgaagatttattttacaaagtggctgcaaaaatgtatatgtagaaactaatactttgctgaattaacggagacaaatataatattatgttaaatagtttgccatttaggacgtttctacttattagtcttccattacttttttttttttgaacaactattagtcttccattatttaaatacgtttttcttttatcaaagtcatacttaatacgtttttccttttttttgtcaaagctaatactttttcttttcaggatttgacttaaatttgatcgtaaatttttagcagaaaataaatttactctagctaaattaatagttatatatttaaaaataatattaaaccaaaacaaaatcagaaaaacttaagtttaaacttaaaacacatcaaaatataaatagctttgtaaaaccgttaaaaaggaaagaaaatcagaaaaaccaatgtgaaaccaatatgtaatttggtattagttagatttatatttatatagcaattcaactcttaaataacattttagttagtaatgtttttttgcaatgtttgaaaaaaaaaaaaaatgttttgcagtgtttgaaaatctagaaggtcccaagcaaaacaatttttatcaaatcgctgagaaaaattggaaactcagtctagccggtccaaatcagacaaaatctctcaaatcggttaatttctgatttaaaattttatattttctaatgcttaagagacgtatactgtagtacttgggattttggatttaattcatcatcttttcgaccttcaagcttgtcgtttatttttgacaattttcagtttgaactctatgaaattttgattttcttctaactcaaaatcaaattaattaattacattgctagtttttttagttttcaaagtgaatggaatataattagtaatacatatgactaaacatatcaaaactaatttaataagtttataaaacctaagttccaactagtcgttttacgcgctttgatatctatcaaactttgagttatcgcctagcaatattttgaaaatgacttaccctagaacaactaatatctttactcatctaattttccaaattttccttgtaacttgatgctgtaatcctctattttaacgtatctatcgttgtgacatttccctattttcttatactactcagaagatgtatcaattgaatacaattttctgacgaaaaaatattttcttttatatcggctctttgaagttctaatttatatcgattgacaaaaaaaaaaaaaaaaaaaaattttatacatagtttttcctctctaagtatatagaagacaatgataagattaggaccaacaaacaggtcataaattatcagtttttctgccaaatatagcatcaatagaaactccattattgggacgcaatgtgaccacttgagcatcttatcatttttatttcaaaaccaccttattacactgagcttcccttttttcagcaacaaattaatgtcaaatcaattattaaaaatacaatataaattctgggagaataacaagtatttattagtcattacacataaaaaaccgtattttggtgtttcgtagaaagtgatatcatactagtctataatgtgtttcacaaaaaaaaaaaaaaaacttatatcaaaatcaaaatttcatgttcttgaaaagatttcaatatattttttttttttgtcaatcgatattaatatagactcaaacgaccctaccccaaaagatattgtaatttcaatattttattaacataaaagatcgcacacggtacaaccaaaatagttttcgaaaccaataaaaaaggaaataaaaaccgattctttttttttgcaatcccattataaaggagcaacgcacaagccacaagtaaaaagtgaaagtccaacaaagatacaaagaagaagagagaagaagaagaagaatg

SEQ ID NO: 13909 - DNA, 3000 bp, Unknown
  misc_feature (1)..( 3000): cDNA_ID_2991074_gDNA_ID_2214667_Annot_ID_189039 3000 nt of promoter + ATG
tatgtctctaagttacctataataagcttttaccttaagtttttttatataagtaatttaagaatatgtaacaagtgttattattaaaactccaaacaaataagccaatgaaataaagttcccaaattttttgtttaattatttagcatttttaacttcaaataatgaaaagtagggtccaaaatacagcttctctgtttatatatacaaatttatacatttttattcttacaacttatttagtgtacatttccatatgaatatatgaataaaaatatgtatatttctgtatatatgtacattaaatatgttgtacgaattttaatgtgcgaagcaaatagtgaaaaattacttatttttcaaattgtaaatagtaaagtgattacttttcaaattatgtttggaaaagtgactactttgcaaaactcactcataaagatatggtattattatttaaaattttgaaacaacatacaaagatatcaaatgaactcatgtcttctttcaacattttgctgtatattctaacagcaaattattaactcataggtttagtatataaaaatcgaaacaaataaaaaacattagttatgcttatctcatccagttacgtacatgtcccgacggtttattacgatctcttctaaaccaaattccatcaggcttagcagtccatgagcgatactgattacatcgttcagttgcagctgctctgtatacttgaagattaaaatgaaactccattttatccccatggttcaacatacatgtccacactgtcctttctcttctgttggaaacatccgaaaacacaatggtaaaattttgattgacttttaaatattggacacctttatcttgctcgttaatactaccacgacaatgatgcttgagaagtttaccgggagcgagttggttatgaatttctacaacatttggtgtgttgcaagcttcattgaacgaaaaatgaatggcaataactaacgtaaaaattatgaggtgattcatttttcttagatctaagataactgttttgagtaatgaggccatgagtttgagatatttataattattttgtgtagaaaatattataataattatcaaataatctatttgtggccttagctaaatttaaacacaaacgtgaagcaattaaacttttgaccaaaagagagtttcttgtcgaaaagtatggttgaccaataacattgaaccaaagaaattaagttttctaaattatagctcggccctgaaattaacaaaaatctaaggttatagatgaaatttacttgcctattcatttactacaaatttaataattaatttcaaattttacctatttattttttggtttattggaaaataatttttattcgaacaattatagtgtttcgatcaataaatttcttttcaagtagctcaaatattctcatttttatttgagtaatatttccaaaaatttggtataccacttggtttaattggttcacgtttgtgttcaaatatagtgaaggttctaaggccataattaaataaatacttcaatagacatacacaaaaaaaagtaaaaccacaaaaaagagacatataaaatcaatatcataatgcaaaatatcaacatgttttatttatttatcaacacatcaagagggtttatagtccatagatcaactgtaatatatagaaaatgaatggttacttagatcaatcagcccattaacatataaaaagtttgattacctagatcagtcacacagagtttatagatatgggattattaacaatattctttgtcttaattatttttaatgcatgatatatgattgatcacatagtctttgatcttaagttaaagtgttaaattatactcatcaaaattgttgctaggacatagataagcaagtgtctttatcacaataatagttggtgataaatcactctctgaaatctgaatatatcaaacttgatttttaatgtgtgtttaatctcctgatttaaaacgaaagcatagaatattaggtgattgtttatatctcatccacagtgaactatccttagatgaaaatttgttgaaaagtttgactatctacatatacattttttcagccattttaacaaataaatcttagagttggacttatttacaacccactgccattagcattaaatcttttttccaaaataattaattttactttaaattcttaatttaaattgttaattgcattatcaatcaaatttaatccaaacaaacttcacatcatcccttaaaattagcataaacgtatttgttaacaatattttaaaacaaagttttttgtttaaataaatattattcttactaaacattttttgtttaaataaataaatcttgtatttaaacttatttacaatgtcatgctaccgtattaattatttaggaatgaaaatatttaattaacgatttaaatcttctaaatcctcgcttttagagttattatgtcattacctaaaaggcaaaaaatattattatttttaaatattattatttatacatttaaacttataaaaagtttaatatatcaaataatttaacatcattatacaatatatagagtttaaaaaaatctcaaaaaaatttccgtcatattttgtgattcgaaattttaaaaatgaacatatattaaccaattggcgaaaaatgtgtgggttcaccatcctgcatcgattaaatatttagacaatgattcataaacatatcataaataagatccacattaataaaataaattttttttttttgcaggacgagttttgctggacgggtttggcaggacgttacttaataacagttgtaaactataaaataaaatattttttataaatagataaaatttgcaaatttttatatatactaactttaaaaaataaattatctccgcggtgtaccgcgggttaaaatctagtttatgtatacaaatagagactaataaaataaattatttactcacaaattagatg

SEQ ID NO: 13910 - DNA, 3000 bp, Unknown
  misc_feature (1)..( 3000): cDNA_ID_3020440_gDNA_ID_2214668_Annot_ID_136595 3000 nt of promoter + ATG
tgtcccatctgagactgcggcaaggcctgctggtgaagattgtatgactggattctgtgtcgacgttgccccgacgtcaactggaggtgaaggagattgctggccagaagcttcctgcgaattctggacgcttgggcttgcgacaccctgaaagttgagtcgcgttcgagctccagtagtccgcgccgttcctgcagaaagagaatcaacccgctcggcgtatgcattgtgcgctgatctgatctcggaatggtttgctgctaaagctgcgagctggccattgcaatgttcttagaaaaacacgaacttatcggagagtgtcgttactgcgagctgttgccggtcggttttctctgacaactgctgaagcagctgcttgatgtcgtcgagggtggaggtttagtcgccggaactctgaccgtcggtgttgctcatggtgaattgatcgttgctctgaagttaaagacttaacttaccctccttctagcgccaaattgtggatgccagaatccgcaattagaattttgtggttgtttttgtgaggatcttaagtcttgtcggtcgaacaatgatcaaatgataaacggatttgtgtatttcagtatagtttcagtatagtttcagtacaaggtgttttcgtcccctttacaaatgacaattgactcttatttatactaatacaacgaatcaaatgacttaaatgattagctggtttcacgccgcagacctcgcccctattaacttcgtacgttgcggatcaacagctcgggcctttgaatgcttatcattcaagtcgatatccagccgttactaaattaattccgtatcaactttttgaaccactgggctttcattgggctctaaggccgggcccaatccttgtctggaagcccacaaattgcgggtcgagtcgagcacaagatccgacatccacaaaccattactttttgctggtctcgggttttgagccgggatccacaaatcctcccaaacggagatggaagcccctgaaccgacttttttaataagtcctttacaaaccagagatctaactgaacaaatacttctccagccataagacggagagtatgattttatattttccagaggattggatttcctaaaatatcttcgtttaaaaaccttggcaaagagagagtccggaaacgaaactagacgccataactgtttcgctaataatgcagagtttaaatcatctacatcccgaaaaccttagtcacttcccaatttactagtacacagtttgttccaagtcatccagtgtatacctctagattcaccattcgagctccaccaaaatcctgcgaccgcacttgttagtttggaagtaattgttttcgggagcctaaagcaatacatcacataagttggtaatgttgcggctactgatttaatcatcacttttttccctccttttgataggaatttagttgaccacccatttattcgactgtaatcgatctttaacaacggaaaagatctttgtcttagatccccctaaactctcaggtagtccgagataggaacccatgcctccgatattatgtatacccaagatcgattttatttctgcctttatagcttcatctactttatgcccgaactgaatcgatgattttacaaaatttatcatatgtcctgataccgcttcatattgttttagaatacccaatagttaatagacttattatacccacattagtcttaatttctttgaatgtcactatatttattttttaaatttatatttgtaattatgtttatcgcacataaatttttcatatagtattaagttttcttgattttactacttctaaaaaaataaaatgagattttcaaattatattataccaaataaattaaattgtgaaaattgaaccacagatttaaaacataatgtacaactatttcatataaaacaacattcttttctttaggatagttacagtaatataccaaaaatcaaatttaaaataaattaaaattttaataatgttctgtaataaagagaaaaatatataataaaacacgtactaatgcatcataaaatacacattttatgtactaataagtataataaacatgttatcttaactaaacataaccaagtaaaaaaaacatactactatatcaataaaagtaaatacatataccaagtaagttgaaaaaataaaactattgctcagttatttatatatagattatattaaattgaaacaacaattaactttctaacgcaaataatcaactcgctgtgtaccgcgggtcaatatctaatgatgtcataattctcgtagacaaatagacaatttttccatatgagtacatttgatgcaaaagtagacatttgaactgaaacctatttttgtttacaaacattcatatcaacaactaaacaaaaatcgaaactaacttgaatcaattaatcaagtattaaattaatatgaaaagtggactcaaatttaactgaatcgatttaaacctaatcaaaccagataatttttgattctaaaccggtttacctatgtcacaaaaaggaccatccatgtcatattttttttttaatttttaaaaagtcaagttgttttaaatatacttgagatgcaaagaaagatccgaatcatatatccgaagattccgaaaccaaaggcggatccgacggctccaagctgccatattcccttgttactctaccactaaattaagccccacataaaacaataaagacacgaaatataaatacctaagcaaaactataggaaccgaaaaaaaaaaaaaagaataattccagcatcattcctcaagtaatttaaaaacaattattaaaagaagcaacttggtcttccattttttttgctacaaaaaatttaaaaccccaaaagaacttaaaatcttttacataaagatcaccaaccagccacatagaaaacacaaccatcggtcttcttattattctttcttcaacaccaaatagtcatg

SEQ ID NO: 13911 - DNA, 918 bp, Unknown
  misc_feature (1)..( 918): cDNA_ID_3020430_gDNA_ID_2214668_Annot_ID_189070 3000 nt of promoter + ATG
ttggctttggtagattgtttcttaaaccttgctccgctatgttttatcaacgacttttgagattaggaagtggtagagttatgggagtctctgtcacgacagtggattgacctagtttttgaatctatcgtcaagggtatctacctttcacctattagccatctgatgaaccctagagttgcccttatcaatgaattcatccttaggacttctattatatttatttgtatctcctgttgattgcacttttatttacctgttatttgtatcccctgttgattgcattttagttacttaaattcgtcacctgttggttttactagacctaatgatcgagtagggctcttaaattctcatttttacttgtttgaatcctgacctaggattgttactagaaacccaccatcattataatctggcttgacttagttgcttctgtacacgtcttgattgctagcaataacagtggactggattgacatcccctaaagctacatcgacatcccctatagctgcatcgacatgttagtgtttgtaggggaatggaactgaacctctcacacattccgcataaataagtaggcctaaaaaacctacttatcaatttggcgccgttgccaattcctttttgcattgttacattcaagatatcagaaacttttaagatcaagttcttttccatttatcaagttactaactcatcttttcgtctacttgtttttatggtataggtactaatctttgtgcatgcaaactcgatccaaaggttctgcaaacctactaccattcagagacagaatagatagaatagctcgtgagttacaagaaaccaatagctcgtgagttaatagatagaatagctcgtggctgcaaacctactaccattcagcctgtgatcagcaaagaccagctgctatg

SEQ ID NO: 13912 - DNA, 3000 bp, Unknown
  misc_feature (1)..( 3000): cDNA_ID_3020440_gDNA_ID_2214668_Annot_ID_189066 3000 nt of promoter + ATG
tattgtcccatctgagactgcggcaaggcctgctggtgaagattgtatgactggattctgtgtcgacgttgccccgacgtcaactggaggtgaaggagattgctggccagaagcttcctgcgaattctggacgcttgggcttgcgacaccctgaaagttgagtcgcgttcgagctccagtagtccgcgccgttcctgcagaaagagaatcaacccgctcggcgtatgcattgtgcgctgatctgatctcggaatggtttgctgctaaagctgcgagctggccattgcaatgttcttagaaaaacacgaacttatcggagagtgtcgttactgcgagctgttgccggtcggttttctctgacaactgctgaagcagctgcttgatgtcgtcgagggtggaggtttagtcgccggaactctgaccgtcggtgttgctcatggtgaattgatcgttgctctgaagttaaagacttaacttaccctccttctagcgccaaattgtggatgccagaatccgcaattagaattttgtggttgtttttgtgaggatcttaagtcttgtcggtcgaacaatgatcaaatgataaacggatttgtgtatttcagtatagtttcagtatagtttcagtacaaggtgttttcgtcccctttacaaatgacaattgactcttatttatactaatacaacgaatcaaatgacttaaatgattagctggtttcacgccgcagacctcgcccctattaacttcgtacgttgcggatcaacagctcgggcctttgaatgcttatcattcaagtcgatatccagccgttactaaattaattccgtatcaactttttgaaccactgggctttcattgggctctaaggccgggcccaatccttgtctggaagcccacaaattgcgggtcgagtcgagcacaagatccgacatccacaaaccattactttttgctggtctcgggttttgagccgggatccacaaatcctcccaaacggagatggaagcccctgaaccgacttttttaataagtcctttacaaaccagagatctaactgaacaaatacttctccagccataagacggagagtatgattttatattttccagaggattggatttcctaaaatatcttcgtttaaaaaccttggcaaagagagagtccggaaacgaaactagacgccataactgtttcgctaataatgcagagtttaaatcatctacatcccgaaaaccttagtcacttcccaatttactagtacacagtttgttccaagtcatccagtgtatacctctagattcaccattcgagctccaccaaaatcctgcgaccgcacttgttagtttggaagtaattgttttcgggagcctaaagcaatacatcacataagttggtaatgttgcggctactgatttaatcatcacttttttccctccttttgataggaatttagttgaccacccatttattcgactgtaatcgatctttaacaacggaaaagatctttgtcttagatccccctaaactctcaggtagtccgagataggaacccatgcctccgatattatgtatacccaagatcgattttatttctgcctttatagcttcatctactttatgcccgaactgaatcgatgattttacaaaatttatcatatgtcctgataccgcttcatattgttttagaatacccaatagttaatagacttattatacccacattagtcttaatttctttgaatgtcactatatttattttttaaatttatatttgtaattatgtttatcgcacataaatttttcatatagtattaagttttcttgattttactacttctaaaaaaataaaatgagattttcaaattatattataccaaataaattaaattgtgaaaattgaaccacagatttaaaacataatgtacaactatttcatataaaacaacattcttttctttaggatagttacagtaatataccaaaaatcaaatttaaaataaattaaaattttaataatgttctgtaataaagagaaaaatatataataaaacacgtactaatgcatcataaaatacacattttatgtactaataagtataataaacatgttatcttaactaaacataaccaagtaaaaaaaacatactactatatcaataaaagtaaatacatataccaagtaagttgaaaaaataaaactattgctcagttatttatatatagattatattaaattgaaacaacaattaactttctaacgcaaataatcaactcgctgtgtaccgcgggtcaatatctaatgatgtcataattctcgtagacaaatagacaatttttccatatgagtacatttgatgcaaaagtagacatttgaactgaaacctatttttgtttacaaacattcatatcaacaactaaacaaaaatcgaaactaacttgaatcaattaatcaagtattaaattaatatgaaaagtggactcaaatttaactgaatcgatttaaacctaatcaaaccagataatttttgattctaaaccggtttacctatgtcacaaaaaggaccatccatgtcatattttttttttaatttttaaaaagtcaagttgttttaaatatacttgagatgcaaagaaagatccgaatcatatatccgaagattccgaaaccaaaggcggatccgacggctccaagctgccatattcccttgttactctaccactaaattaagccccacataaaacaataaagacacgaaatataaatacctaagcaaaactataggaaccgaaaaaaaaaaaaaagaataattccagcatcattcctcaagtaatttaaaaacaattattaaaagaagcaacttggtcttccattttttttgctacaaaaaatttaaaaccccaaaagaacttaaaatcttttacataaagatcaccaaccagccacatagaaaacacaaccatcggtcttcttattattctttcttcaacaccaaatagtc

SEQ ID NO: 13913 - DNA, 3000 bp, Unknown
  misc_feature (1)..( 3000): cDNA_ID_3020444_gDNA_ID_2214668_Annot_ID_189065 3000 nt of promoter + ATG
gtggattaaactgattttaagtacttagtatatatagaagtaatgtcatcttaccatgtacggtggcaagtgtttagatcagtgatgaccgtaacgaaaataactttcttgtgaagtccttgccatttcattacccacaatggtatgtgttgcatcagaggatgcacgctaataataatgtccggtttgtactccattaaaccggcctctatttctctgttcaccaaaagaagaaataatctccattatattgctaattcgtaacactaagggatgataacgaaaaaagaagaaggttaacatataagtacttggcataataagcggcaagagcacttagatagcttttgtggatccatttgggagaagtaccatgaaacgcaacagaccaaagaccaacatgtttcaccatgaacttgtactgtctctccatgtcgttcaatggccatccagtgtattctttccaaacatcttttatgattatctatagttataaaaaaaatgacattagttcctagagagaatattgtaacatcaaagagtcagagctagagaaataaataatgcaaatttttaatcattattgacaaacaaaataaatggaacgtgggacaggttttaagacatagattgttgacgtcagctcgtatctccgacaccctggcaaactccaagattcatactaggctacaaaacttccaagtagatatttgtttcttttcgttttcaaattcaagacgactactgcgacaactttaatattgacggctgagatttcattagaatcagaaactcctctatgatatattataacataatctattggaaaattttgtcataatataaatacatattattcgaggtatatatttacaagctttgaaattttcaaaatgaatatttcaaaatattgttgttgttttacacagaaactaaaagataaaagtatgattaagttttgttgcttatgcaatattttttcgtttttttgtacgttatatatatggttaaggaagcatattattggctcaaccctatgcgttggattcaaggcaaagagaatgaaaatgaagatataaataaaaatattaatatttttacccgatagtcatctccgaattcgatcttgaaagcgtcgcggatggcctcggctgaagcacggtggccaccgccggtatcactcatgagaataagaacagttttgatcctctctgctcccatctgctccatctccataacttcttctttgtcttctaaccctctcttccttagacgactctccttctcataatcacttgatctctgacgatggatatactcatcttctactgttgagatgttaaaattgctatagactcgtcgaaacaccttctcagtgattgaatccgaccgtgtacgaggtgacaccactttcatcatgactatttggtgttgaagaaagaataataagaagaccgatggttgtgttttctatgtggctggttggtgatctttatgtaaaagattttaagttcttttggggttttaaattttttgtagcaaaaaaaatggaagaccaagttgcttcttttaataattgtttttaaattacttgaggaatgatgctggaattattcttttttttttttttcggttcctatagttttgcttaggtatttatatttcgtgtctttattgttttatgtggggcttaatttagtggtagagtaacaagggaatatggcagcttggagccgtcggatccgcctttggtttcggaatcttcggatatatgattcggatctttctttgcatctcaagtatatttaaaacaacttgactttttaaaaattaaaaaaaaaatatgacatggatggtcctttttgtgacataggtaaaccggtttagaatcaaaaattatctggtttgattaggtttaaatcgattcagttaaatttgagtccacttttcatattaatttaatacttgattaattgattcaagttagtttcgatttttgtttagttgttgatatgaatgtttgtaaacaaaaataggtttcagttcaaatgtctacttttgcatcaaatgtactcatatggaaaaattgtctatttgtctacgagaattatgacatcattagatattgacccgcggtacacagcgagttgattatttgcgttagaaagttaattgttgtttcaatttaatataatctatatataaataactgagcaatagttttattttttcaacttacttggtatatgtatttacttttattgatatagtagtatgttttttttacttggttatgtttagttaagataacatgtttattatacttattagtacataaaatgtgtattttatgatgcattagtacgtgttttattatatatttttctctttattacagaacattattaaaattttaatttattttaaatttgatttttggtatattactgtaactatcctaaagaaaagaatgttgttttatatgaaatagttgtacattatgttttaaatctgtggttcaattttcacaatttaatttatttggtataatataatttgaaaatctcattttatttttttagaagtagtaaaatcaagaaaacttaatactatatgaaaaatttatgtgcgataaacataattacaaatataaatttaaaaaataaatatagtgacattcaaagaaattaagactaatgtgggtataataagtctattaactattgggtattctaaaacaatatgaagcggtatcaggacatatgataaattttgtaaaatcatcgattcagttcgggcataaagtagatgaagctataaaggcagaaataaaatcgatcttgggtatacataatatcggaggcatgggttcctatctcggactacctgagagtttagggggatctaagacaaagatcttttccgttgttaaagatcgattacagtcgaataaatgggtggtcaactaaattcctatcaaaaggagggaaaaaagtgatg

SEQ ID NO: 13914 - DNA, 3000 bp, Unknown
  misc_feature (1)..( 3000): cDNA_ID_3020490_gDNA_ID_2214668_Annot_ID_189053 3000 nt of promoter + ATG
atgtcacgaaggagtttaccgatggattgcgaggtttcatgtaccaagcaacaaatgtaagtgtttcaacgataaatatttggaatttaataagtgaagaagcatctatataatagaggatttatgccaaactcttttttatggttgcgtcatggggaaggttgtagagatagtgcggaccgtagtaatatgaattatggtgttgttgaacctattgattattataaaaattatggtcatcatcaagaatttgatcaagggtataaccatgaaaatagatttcatgatatggttacagatgcatttcacgaaagtactgctgcatttagtgaaaatattattgtagaaaccaacgtagatgcacaacgcttttatgatatgttagatgctgctaatcaacccatctacgagagatgtagagaagggcaatctaagttatctttggcatctaggatgatgacaattacagctgataataacttaagtgaaaattgcaaggattcttgggctgaacttattaaagaatatttacaagcagataatatatcggctgagagttactatgaaatacagaagttggtttcaagtcttgggttaccatcagaaatgattgatgtatgcattgactgttgcatgattttctggaaagatgatgaaaatctgcaagaatgtcagttttgtgagaagccgagatatcagcctactggaggaaggacgcgagtaccatataaacgtatgtggtacttgtcaataacagatagattgaaacgcttataccaatcagaaagaactgcagcgaaaatgagatggcatgctgaacattcaacagtaaatggtgaagttactcacccatctgatgcataggcgtggaaacactttcaaacgatatattcaaactttgctagtgagtgtagaaatgtgtatgtctgggaggcaatattttttatggccggttatcgtgacaccatacaatcttcctccagatatgtgtatgcaaagcgaatttctgttcttaagtattctagtgccaggccctaagcatccgaagcgagcactcgatgtcttcttgcaaccgttgattcatgagctgaagaatttgtggtacgaagatgtcctgatgtttgattactcgagtaagcagaatttcaatatgctagcaatgctaatgtcgacgattagtgactttcctgcatatggaatgttatttgggtggacaacacatggaagattatcgtgtccatgttgtatggatcggactgaagcgtttaagctaaagcatgggcggaaatcatgttggtttgattgtcatcgtcagtatctttccatgcatcatccgtatcggaaaaacaaaaaattaattaggaagaataaaattgtgcgtcttcccccaccagtttatctttctagaaatgatttgtttgaaaatatcgattattatggtgcttaggaaacatgtaaacgtgggtgtaactggcacactccggcgaatatgcctgacagatatagaagtgcccacaattggcacaaacagagtatcttctggcaactcccatattgaaaaaatctcctcttgcgccatcaccttgatgtgatgcacatcgagaaaaatttcttcgataatttcatgattacgcttctgaatgtgcagggaaaaactaaagatagcatgataacaaggttcgatttggtagagatatgcaacagatcggacttgcatataacacgagatggaaaattaccggttccgaagtttcgattgactccagagggaaaaaagcgttgttcaaatgggttacatctgaagtgaagttttcagatagatatgtgtcaagaaaattaagatgtgtagagcaacgccaaaagttctcgggtatgaagagccatgatatgtctataatttgcatgttttacacattcttttatcaccattttgagtctagtttcatccatctttcataacattcatcattatttttgtacattttgcatctttagtcgagtctaggactagatcaccagtaacagagagggaagcagtcagctcagcagtccatcaagacacttttactcgatcgcagaggagaggaagcagtccattcctgacaattctactcgatcgcagaggcgaccaggcaatccactttgctagtccaccagtatactcgatcgcggaggagaagaaccagtccatcctgatagctcacacacatcctcgatcacaaaggccaagaagcagcccagaccattctgtctaccaacctactcgaccaccacctcgaccctttgatcaatccgcattcaaccagacaacctgaggaagaaaaaagaagagaagagaaggcccaatcgaagcccactttgaagcccattaggaagcctgctttgagccgacactcttgatcatatcgtccatgggccgtttagtgggctcgaagcccgctttcttatccttatcgttttttagtataaataagcctctaagggttttgccctagacacccggagacttacaaacccttttacagagattttctgcaacttattcagagtcgcttttgattccttcaactttgtattttgatttttcttctaagttattcagattttgctttcatttgcttgttcatctttgtttcattccctttaatcttttaggtatgcaatcttcagtcgtttctatattattgtctttaagcatgttgtctgaggagtgattaggatttctgaggatgggatagagtagttgtggaacccttggtcgaatctgttggttaagtgtagatttattgaatcccttatggattagttgtgtttacagcttattcctttctgatcaactggaatccgatcccagacattccagcgctcaaaaggcgtttaatggaacgttggatctactaattccattgataatcgtctttatcccaagggattgaccgtttagaacagttattggctttaacagtcagttcttattgcctgcttagttagagatcgcta

SEQ ID NO: 13915 - DNA, 3000 bp, Unknown
  misc_feature (1)..( 3000): cDNA_ID_3020536_gDNA_ID_2214669_Annot_ID_189083 3000 nt of promoter + ATG
ttagtatctttttaggttgagccagaaggatgcttgagtatcaaactaagtccaaaaaggggagattgaggatgcagattctgacatcaacgaactaatggacatcaaggagctgttggacatcagagagctgttggatatcaggacggtgcatcaaatctacatcaaacgtctgagttgctgacatggacgcgtgagctgacatggcggtgctggagtggttgatgtgacgtgccaagaagctttgctgaattggcatggtgatcaaacacgaaagttggttgagaagatttggtgaatattcttctcaacaagttaaggaaagagataggcttgaatatcaaggagtatctcgaacaaggaaaagggataggcttgaagatcaaggaagatcccaacaaggaaagggataggcttgacgattcaagaaagatctcgctcattgattctcagagatcctaggaattagggttagcgagaatagcataaatattctaggattaggcattgagccgcctaagcactctagaatattgccatacgtttaaagctttcgaagcctagtaaaagcttagaaagtgggtgtttgtaatccctcctcttcacaagcgtgtgataagaaacagaggagtgattaggcttagatttgttcttagtcggggttgatcattcgggtagaatatgtcaagtaattgccgaggtaatagaatccttgtaaaagatttattatcaataagaacaagtaaaaaacatttgtttgacgcgtttcaaacaaaattgtgtatcgtctataccctcttacttagaacttttcactattatatcagttgagatcagttatttagtttcttaatccaattaagttctattttggatgacatgatggttgacgacatctaccatttccttggagaaagttgttcatatgttagagagaagacgatcatggtatctacattatatatcaattaaatgtagggtaaaacttgacaattatttattgttttatttatattttagattttaatattttatcaattaagattatattttgagttttcatattttttttattaatagctttacttgtgttattttgaaaattagtaaacgagctttgcaaagctttttaatatttgttttcagtagaattaacaaaatctcaacgagtttaaggaagtttggttaatttcggatttctaagattaacaagtaaccatgcaatgatcatatttttgttattccaaaagtgaacaaatcactagtcgatggaagtccctactacgtgtggttatgcataatggtaatggacaattaaatcctcaaatgtctttgtttttaagaccagatttaaacttgaaatgcacattgaaacaacaaatcgagtgagagcaaacaatgcaggaaaatatgcagaaagttgccgtagcgaatgattttggagaaatagaaactataaactttttctttggattaaatttcattactactattaccaagcatgaaagattcacctccggatatattaaacttttaagaattttatatggaaacagaaaaaagatatacgtgcacattttatctctttagcaatcataagtcatttgtgttgggatcaatcactatacaacctcgaacaaaaaaaattcctttctagaacaaacaacattaatcctataactatccatatgaattctgatttaacccaaatgtttttgggaaattgattagtttaagaataatgtgacttaacataactagcagacgacattcataaagccattagtgtaatgtatctatccaaccccatgaacatgacttgtcatattaaaatagattttttatatttgatagaaaccagaggttatatggatgtgagcctaaaagaaaaaggggtgatgcaactataattgactcatcatttcagattattattttcctcatttgatagaaccattgttgatacacactaaaaatatgtgtagcaaaaattgtactctttcctagacttaaaataatttgctatgccttcggttggttaaaatctagtgataaggcaataatttgttttattatgtcaactttgttaatactagtttgttgttttaagccaatccacgttaagtggtatttctttaaaaaatttttattgtatgaacatttgcactaggtgtgggttttacgttaatagtattcttttgtcatattgctttctatttgtatgtgagtttcgttgctgtcaaacatgtttatatataaactcacaataaaatagcgaaattaattgaatttctattgtaattaaaaatttaaatgttatttaggtaggcatgtcttgacccataccaattaaactctacaatgcggataacaatattagttttgaatggtaatttattattaaagcaatacagtttttgacagttttcatttataaattttttatcaaaagctttacaaacagttttactttcagcttttgtaaaagtgtgattcaaacttctgatttagtttgatgttgatttggtttagctggttatttgttggatcatggttcagtgccggtttagtattggtttaagaagaagaagaaatcagtttcagaataacagaaggatcagaagactcttctggaattatagggtttggctttccttgctctgttataaatagtcttcatctttttcaattgttcgttgaaacagaaaattcttatctcaattcttctctcttgaaaacgatcttgagctctgggttttgagcttgagtaaacattgattagtagtgaattgctggattgattctggccccagacgtaggttcatcacatcggtgatccgaactgggtaaacaatcgtgtgttcattttgttctttgtttgtttgcgttctttgatcgatctcttgagtttatgcgaattgaaacttgttcgagttgtgttgaatcgagcttagagtcataggattgtaacagattggtatcagagcctaaggttcttta

SEQ ID NO: 13916 - DNA, 3000 bp, Unknown
  misc_feature (1)..( 3000): cDNA_ID_3020516_gDNA_ID_2214669_Annot_ID_189091 3000 nt of promoter + ATG
ttcgagatttttttgacatttttcccaattaccaggccacaagcccaaagtttttaaaagcatgttatagaaaaaagaccaaaaaagagaagaacactatacaagttctctgaataaatttacagtgtcttaaccactaggacaagggaaatcttttactaaagatccgatttattgtatttgtatatataatctacagccgcacgcaaataagtttaatcgagttgttcttcttctttgtctcggagaaggatttgtgtttgtatcatctcattttagcacggagagattaattgatttgaatgagaaagatgaagagaatctttggtgcaaagaataacaaagagctagcctcctccgtctattcaggatgcctctgatcgggttcctctctctctctctctctctctctctctctctctctctctctctctctctctctctctctctctctctctctcttttctttcaatttcattgttttcctcagctttatttgagaagtaaggattagtatagtgttcttcgagagccgtcgatttctgggttttatcgtaaaattagcgatttagcttttgagtacggtgatcatacttgtattacgtattacgtataagcatttgatgttgcattatctattgcatatcatattctcttgaatttaactttttagtcactaatcacaagaccgatttgctatgtttaaaatgttcgaaaaaataacataaagacggatttgctaatttggaaaatgcgcaagagaatattgatttttttttcttaatggtaagtatgtttgttattcttgattgtatttgatgtgataattctggataatttaataataaagtgtctttgtggcataaaaaaatttaaagggtaaatttgtttctttactaggttattaacccccgcgtatgctaattgatatcaaattaactacctgactgtttaatataatccccgagttaatataatcctcaagacatcagcaaatattaagagcatctacattgcacaacataagagaatgtctttaattacaaatgaaataaaagaaaaaaataagaaccaatgacattgtgccacataagctaagatgtctcaaaagaaatgtctttgatgtctccccagagacacaattctcttttcagcattaatttaaagacatttacctttttattttattcattaaaatctaaagacactcacaatttgttgggcaatggaggtggcctaaagaaactcttctttgatttcagttttcccatagaccttaagtatccgtgttttgaggattgagattatgtcactggtaagtttttagtcaatctatgttcttatcattttaagaatgaaattttattagtagtttatgttcttatttttttatatctactctattaacatctaattctatatttagatgcaatgagtgtggtgtcaaatatctcggctattaagaaattcccatttgtttgtcgccaaggtgaaaccgactatgaatcgagataattctcttttgatattttggacaatatttaagttttagtatttataagtatatttaataatttatctgccgtctgaaaattgaacttagatgtattgattagtgtatttttgtatcatattggttaggggagagaaaataaaatgctttgctgttggaagatgctgtgaaatcttggttacaaagtggtctaaatgtatcggtttagatgcatataactatgaaccaattgttgcaattgttcggttttggagaatcgctgagattgagggttagtttttttcaatactattgcaatcctatttacttatgatttttatatttattatctaattctaatcatgattttgtaacaggtggaaatgtcttgatgagtgaatttggatattcaaggctttacatcaatccaaccactttccatgagatagatattcgaagctacatgtaagactttaaacatttttctattgcattaattaaccataacatcaattaatcaatacaattttttctttttgttttttacagccgcagtttcaaagattatgatgaagttccagagaacccaatgatggaattgattgaagagaattaggagtttgacctagcagctcctattcttttttaaattacattttgaacttctgtttattttactccaaactttgtcattttaagttgttttttttgttgaactatgcttatgttttgaacctatataattattgtattcccgttgcctttattatctagcttactttttgttaaactcctaacaaagtttgcaattatgacattaaaaactcctaacaaactcctaacaaagtttgcaacgatgacataaaaatatagttatagttcttcatatttttgttaaactcctatgcttatgatttgttatttccgaccatgtttagcataaatataattactgatgattaattttaacattttaaaaataatttttttggtaccaaaaataaagcattaaaaactttgagacaaaccattcttggaaaaattcaggatcattatttattaagttcattttttcaactcaatgtcattgtcttatcaaaaacaaaaaacaaatatatatgtactctttagatttaaaaccctacaaaagaattatcttccaatgtcctttctatcatttaagagaaattttttttgtggaaacccgtgtactctttttaaagtttctttttggatagatatcattatcttttatgacttaaaaagaaatcaatacatatatcatagttaaaatttaacttcttttaaatgtaatatatctataggatttcagtctattatatatatatatatatatatatatatatatatatatatatattgtgctcttatacatactaggttattaaccccaatgatgctgagaatgtcgtggatgaagatgaagatggtgatgatgatgggagcgagacgaagagaacaagaaagagaaggacccgaaaggaatg

SEQ ID NO: 13917 - DNA, 3000 bp, Unknown
  misc_feature (1)..( 3000): cDNA_ID_2990903_gDNA_ID_2214670_Annot_ID_189100 3000 nt of promoter + ATG
caacaacttgttacatgcgactaaacaaattatattgaatccatatacagatttgccaaatactatttctatttggtcccaattagtgatgtttatatggatttaatagcccatttagttatatgggtctgttgttaaaaaatagcccatgtagacccgtttatggaaaaagataaatgggctttaatttcgacccggcccaaaattacaacgtgttcaacaacaactctattatacaaacagactacgtcgttctcttccactcatctgaaaacaaaatccaattctctctctctccctccagattcaaacgatccgatccaaaactttgagatccgagaagatgtctacgttcagcggcgatgaaactgctccgttcttcggcttccttggcgccgccgccgctctcgtcttctcctgtacgccatttccttctcctctcactcgattctcttccaattcgtatcattccctttgatctgatccagatgattgcttctagagactttttatgagaatcgttggcctactaattgatcgatgtattagtgttcttagatcagaatctggattttaggtattgatttgtgattgtgattgggtcgggcgtaaaatgagatgttgttactggattttggttttaggtatgggagctgcttatggaacagcaaagagtggtgttggtgtggcttcaatgggagtgatgagacctgagttggttatgaagtctattgtccctgtggttatggctggtgttttgggtatttatggacttattattgctgttatcattagtaccggcatcaatcctaaggctaagtcttactacctatttgacggatacgctcacctttcgtctggtcttgcttgtggtcttgctggactctcagctggtatggctattggaattgttggtgatgcgggtgttaggtttgttcctcacagagaatgtttgaatggaaaacgttaacgtcatctgtatcttgacttgtttttggttttgcgattctctcagggcaaatgctcagcagcctaagctatttgttgggatgattcttatccttatctttgcggaagcgctcgctctatacggcctaattgtaggcatcattttatcttctcgagctggtcagtccagagcagaatgagagcacaaacaaatgttaaaatttccaggtacttccttatcgatcaacttataagtgcggtatgtagtatcgggagccgatattttgtggattcttggtttgggaagcagatgttgccacctcgctttccttggttggtggttacttgagtgtaggatgttatttggttggtacggtaataaaaaaaagagcttggcatttgttttgtattcttgtattgtctgcatctgtcttgatgaacttgataatattttgtttgtaaagaagtttgcttctgataccatctttgaatgttatgagattaatgctagcttttctactgaacaaaacattatattttcggagggtgttaagcaaagtaatgaaaatattaatcgttcctagggttcctcctaagccaattatctccgaaatcctttactgcagctagatcttcttatggaatctaatcgttcttgtttttatagcatcgcatcgaatcttcttcgtcttggaatggaatcctttcttgttttcgtctgtttggtgagatttgctatcgattgtaactcgtgtattgtgttgtacaagtaattcatcgctggcgtttagttaatcgaatctcatatctaactatgttctaaccttgattgggagagttgcttgcctgaaacaacagaagatcttagtcaattcatttctttcttaagcacttagcttggaaggcagcttagtcggatccaagttagggtaaaggcagttccactccaattcaaaatggagggaggacttgaagtagtcctagattaccacttcaacaacatgatgagtatcctccaattatgggaatctgataccttcttatctctcttaccccataatgaatccgaatcaaaggaaccccacaacacttttggaaagaagaaaccgtttcaagtatctaacaaacgttaaagccatggttagaggaaacgtgtatgaaatggtttcacttttctacttaaaaacaatgaagacaaagagtgtcgtatatcaaagaaaaaatgtttcaacatacaatcttcaatctatatagtatttttgcaaggattttgtgcggacggggcaaaatacattcgggtctatttggtacccgcctatttagtaattttgttctttataactttgttgggttcggttcaaataaaactcgtacctaaacccgtttttaaaactcttacaacggatatttcgataattaacaattagatatttagaagatttggttaagatttaaaattatgaatctccgataatctttgtttaattttttaactattttaaatcatcgtataatatattaagttttttaaaaaatctcaagcttttttcttctacatattttgtgattcgaaattttaaaaacggacattacccaattgacgaaaataggtgggttaacgtcctctagatcgtttaaaatattatagacaatgattcaaaatcatatcataaaaatatcaacattaataaaagaaagatttgacgggacagatttttgaatcaacattaataacaattaaaatatcattaatttcttgcttcaatacggcttaaatccttaaaaaaaatttttacaccttcaatattagatatatcaaataagtctgatttaaaaaagattgtataaaaccaaaaaatgttatgtggtataatgttacttataataacaattgtaaaccatacaatataaatatctcagagaatgatacaatttacaaactttaatctatgataaatgataatttaaatttaaaaatcactattttaaaaaaaagaaatcatgggacagattaagaagttacggaacatgttatatcggaaggggattatg

SEQ ID NO: 13918 - DNA, 1307 bp, Unknown
  misc_feature (1)..( 1307): cDNA_ID_2710647_gDNA_ID_2214671_Annot_ID_136611 3000 nt of promoter + ATG
ggagagagcatttaaagaagaaagagattttggttatctctttgtctctctgtgttcatatttattgcagagatagtgattttttaaattgacctttgaacatcccttttacatgttttcgagatttgtttttcttattaaacagccaaaaagtatctggcttttttctcctctctcaaagttttgatttttaagtgatttagggttttttcatcccctggaggaagaagtttgagtctttgtatctactttgatcaagtaaggtttgttacttcactgttctatgagaagattcttcttaaagtcttgaccttttgattcatttggattctacttattagatctgtttatattctccatagtcttgtttctattagtttatttgttggtggtactagatccaattttgtgtttttaacctttatttttctgttgtagattcttctttctctgcaaattccaattgtttattgatgttcttatccaaaattttttatttgatagaaaaaaaatgattgatttgattgcattgcagctttgtgagaaaagaagtttaaagctttttttcttttttgtcttctttcttatgacagtgagctaaagattcttcattctttgcttaagagataaaaactttgctacatttgtgtaaccatgattgcaaatttgctaacaaatgattcttacaattgttacaagtaatctagattaagccatgtttttgcaattttttcttgcgtattgttatggtattacagcttttatctaaatgtctttttctttaaattagtaaaaagttggaaagtggtcattgtagtggttgattgcatctttttgctcatgatgatttgtttttggacttgagaaaataaagaatcttttcgttcacatgtgtgactgaccataagttaagttatgtatcctttagaatattttgtgccttaaggtttgtttctgtcacaatcttcctggcccattgcttcgttgaacaactcttcatatggaggttgcttctgtatctaactttgagatttgctgatagatagattgattctatcctctagatagaagtttgcttatacttgtcttcttattcttgttatctgtttctttcttatgagtcctgcttgaaactgtttgatagagattgtctctttgatgtgtagattgttggtcgcgactggtgcttgaagatatagctttggttctttatgcaaggtttactctcttagaagaatgagagcaggtataaagtcttaagcttttgaacattttgcttttgctttgatggtctttgaattgttatg

SEQ ID NO: 13919 - DNA, 3000 bp, Unknown
  misc_feature (1)..( 3000): cDNA_ID_3020630_gDNA_ID_2214671_Annot_ID_189118 3000 nt of promoter + ATG
tgcagaaccgctacataccacatatgtaaacaatttttttcaagattggttcatctgagtcataaataatatttaatgacaaaaaaaacaatattttaaagtatttgatttgttgttgaattatttagattattaagatttgttttgtattttaaggagaaaattgaaaagatatggaagttgtaaaaatttgcattgaccatttgaccaatctgggtcaacaacaaacgaagaaacaaattaaaaaaacacaccagcttatctattgttagttttttttttttctgttttcaggtgttttcttaaatcacaagctacaaaccctatatttatcttctgcaacaagtcagcatcgaactctcagatcatttatcaattcatcttcttaatttacttgaccctttctctttacacgataatggcgagagataaagaagatcaaaacaatgagaatccttcaattgtccagaacatgtcatttccattcaacaccattttcttgatctcaagcgcaatcttcctcgtcacagccgctttctggttcgtagccgtcatgacattacattacaggaccgatgaatgtaaccggttcgtcacaactcccggaatattcataagcttctcattgcttgctatgtccctcactggattctacgcagcttacttcaaatccgattgtctctttcgaatccacttctttatcttcttcttgtggatgttcgttgtcgtgtctaaagcaatctttgtcatctttctacataaggagaccaatcctagattgtttcctgggaccaagatttatgagtttaggtacgaggattactcaggatgggttagtagattggtcatcaaagacgatgaatggtatcgtacaaggagatgtcttgttaaggacaatgtttgtaacaggctaaaccataagatgccagcttctgagttttatcagatgaatctaactcctatacaggtaatataacctaagctacacattaactaaatcaaaccgaatctagttttgattccggtttaatgtttttttttatttcattctaattttgtttctttttttatgacagtcgggttgttgcaaaccaccactttcatgtggattgaattacgagaaaccaaataattggacagtttcaagatattataacaatttagaagttgattgcaagagatggaacaattctgcagatacattatgcttcgattgtgattcatgtaaagctgtgattattgctgatgtacataatacttcattttccataacagttaacattattcatatcatctttagtctttgtatcggcatgaccggttggtttgcctggttaaggatccttcgagaaagtcagaaatagatttgtacacatatgtaagacacatataaataaattgtttctttttattatttcttataatttatatcccttgctcaaaaatcgctaggcgctagttgggcggtaagggtgagcctaacgcctagtaggaaaatcggagattatacgggattaatcggatattagttttagggttatttcatatttttaaaatatattaatccattataattaagaaaattatataatattgttttttaaattgtattaaacacatgaaaacaagattttctattcaaatttataatttttatacaaattacgaacataagttggatattttaaattttaaattttaaaatgaaaaaaaagaaaaaataaaaataaaaaaattgggctagccatcctctagacagatttaggcgggtctaaaccgacaaaaatcggatcaacgattaattttcccaatttagacaaaatcgttgcagactccatctgatctctatgcggccgattttttgaacaaggcttatatgtatacaatcaatttaaaccgattgaaagagtaaacaaaaggttataattttagtaactgtttgtttacttggttggattggactgtccgtcacctgccatttctgtctttgcacttaggaattagaaagtttatatgtatatttttcctggacggccactgaatttgtggatgtaatatatgagtttgtgtatcactgtattgtggataaaaagatttagggctaagcgttctttagaaacacagactgaaaatgtgaaatgaaagcatgtttgttgatgatttttgtgaattacaaaaagaacttagagaggatataatgtaaaaagacccccttcttcataattgggccttagttataattcccttggaattttatggtatgagttttttttgtttgacgagatccaacgccaacaaatacgaagctaacaaactctctcatctaacaaactatttctaaagttacttttttatttgtttcaatatatcaatcaatgaatataaatataaaaataaagaaaaccaaactattgtgatatcatataacaaccaaaataataaaattttatccaacctcttctactatatatgtatttaatctatatatagtccaattatagaaacacgagaccggcatgtacgcatttctgtttcccttctatctcaaaccccaaacgttccaatttctaaatacagttctctactttagtaatgtttaataatgtttctttcaacatttcagttttctatacccgttgtgacaagacactcaaattttccaggacttatgtttgactattttttaggcaaggtaaaaaattgcataagtctcgaaacttttgggtgttcgggcggattggttagttagaaactaatgcacgtcagcctctgaggttccgtgtaatagattctcatgttgtcctttaaaaatgaaactcttccctttgattctttttgttcccaaaacacatttttctacatcttagagtcttagagaagaaaggcaagataatcaatctcatggcgatgtcgatctccggagctgtgtttaatggtttgggttcttcgttcttgatcagtcgaggcaagagaagcggcgttggacttggcgtagtagct

SEQ ID NO: 13920 - DNA, 3000 bp, Unknown
  misc_feature (1)..( 3000): cDNA_ID_2705559_gDNA_ID_2214671_Annot_ID_189117 3000 nt of promoter + ATG
aataacttgaacttaaatctttgaaatatttggtctattaaagtcaagaaaattttctatatatataaaaaggaacatcaactattaagctatttcaagggaaaaaaaaaatttatataaaaaaaaaacactttataaaaaatacacaaatttaccaacgtgatgttggtctagtggtaaatctccctggaagtgctgggttcgagacatgttgggaagaaactattctccaaaaaatatgaatttaacctggtatgcatcccacttctaagagatgtaagatttttgggtttgaatttccagatattcaaataaaaaataaaataaaaaacacaaaattaggactcatagttgtgcttgcggatgttaacacaatttgcttcgacaagatatatacacaaattaggtttggttaattcactatccttatgatattcatctagcatctgatcaataggctgtgatcatctcagattaaacatagtataaccgatcgacttctaaaacatcaagacaacttacataaatagtaaaggatttctaacttctaagagattattctatattggttctctctaaaatcttgattaagatgataatttatgggaaacttttcacaaaatgttaatggaaaataatggtagataaagaacgtgggaaataagagaagagagacaaaaaaagacagaaaggcaaagactcgacaaattgggtttgatgaagtgtgatgccaaacttgtgtttgtcccaagacaaacaaccccgagaacgagcctcaatggcgtgaaccccttttctataccttgacataataaattcatatatttttaataaatagtatcttcaaccttttttgaaactctcacttttgtgtttcgtgcacttatctcacatagtcacattaagatattatatacaaatataataggtatatagatagatagatacatatatatgtgttagctccttttagttgatataaaagaagagaagaagaagaaaaagaaagatagcacaaaaaagcttctcatatagctaaaaatcactttgaagaatatgaagctaattagagtcaccctctttctttgtgcactagccattttattgcttgtaactccaacatcttctctacaacttaaacatccctactcatctcctagccaaggtaattaagttcactttttttgtcttaaacttttaaggtttgaatatgaagtggtaactgactttacttacaacaatacaggtttaagcaaaaagattgttacgaaaatggcgacgcgaaagctcatgatcatctctagtgaatatgtaagagattgttgtatgtatttatctcatattgaagctccagtttgatttctatgaaaagtttctaatcaaaccttctctattgcaaataataggtgatgacatcaacatctcatgaaggttcaagcgaacaacttcgagtcacttcttcaggtaaatcaatcatttgagaaattataagctgtttcttaatattatataaagtatttagacctttcttcttctttttcttccttaaagaaatcgataattagcaaactcacataacttaagcacacttctatagtagtcaaacgaagttcaaacaaatagatataaaagtcaaacatacgaatcattgaccatgtcagaagaaaatctttatcaatgtttcttttgctttcttcttcagaattttgttattatctttctaagtataatatataaaactaaacgaaaagattcgaaacctttctgggactttcaaactgagaagtataatatgagatgattttgtattaagtctagtttatgttttgatttcacaggaaaatctaaggatgaagagaagaaactaagtgaagaagaagaagagaaaaaagctctagcgaaatatctatcgatggattatcgtacgtttagaagaagaagaccagttcacaacaaggctttacctcttgatccatgaaaacattatattatttcaaaataactaataaaagttctagctagattaatatttgttattaggatggttattggttaattggttgtagtaacgtagtttagtttctttggaccattgaggaacaagttttggcgatattattgtaattaaaggaacatgttcgtgttatttttcttatattaatgataatggccgacaaaacactaaaactctggtttggggtttgagcttatttgctcttcgtttcacgcactgtaacatggtggttgagttggttacaataagtcaataatatatttatcaaattgatgatgcttacatatactaaagacgagtccacgtatgacaattagtatttacagtttatagttatgacaatatcaattatcaagagtcaagacgatttgttcatagttatgacaattactagtatttactgtttcgaaaaaagaaaatcagcgtaaagaacaagtaaatatttaacataattaccaaattactctggctcatattttcatctatttttcttaatttttataatattatttaggtttaaaattcgtaatacaaatattaatacatataatttggcacgaaaaattcgtgcagaaccgctacataccacatatgtaaacaatttttttcaagattggttcatctgagtcataaataatatttaatgacaaaaaaaacaatattttaaagtatttgatttgttgttgaattatttagattattaagatttgttttgtattttaaggagaaaattgaaaagatatggaagttgtaaaaatttgcattgaccatttgaccaatctgggtcaacaacaaacgaagaaacaaattaaaaaaacacaccagcttatctattgttagttttttttttttctgttttcaggtgttttcttaaatcacaagctacaaaccctatatttatcttctgcaacaagtcagcatcgaactctcagatcatttatcaattcatcttcttaatttacttgaccctttctctttacacgata

SEQ ID NO: 13921 - DNA, 3000 bp, Unknown
  misc_feature (1)..( 3000): cDNA_ID_2710639_gDNA_ID_2214671_Annot_ID_136613 3000 nt of promoter + ATG
gtctttatttgaagaccaagagtcgacgatcgtcttcaaaccgatcgcttatggaatcctctcgaaggagtttccggttatcatccatgatgttaatctactctcttattactttcatgtttccccttcctttatttttctattttaaactttcaacaagtgagttatgtggcaaagcttcaagttgttataatcgcaagttaacttaatatcagttgtttgacaaaaaaaaaactgtaaaacgataaaaacttggcatcggtaaaactttatctccttttaaaatgtcccagcgaagcaaactaaacaaaatttgctttaaaatctacttaaacattataacatagttctcaattcttaaatatgctaaagtctaaagactatgtatcgtaagctcacaacaatgtgtatgaaatacactagcaaatcacgatctagattaccaaactgtggaagaaaaaattccacactcacaaaaattaacaaaatttttaaaaacaaattccacactcattcatgaacatatatagttctaaactaatcgccagtgactagtaattgcgaccagcgagtgcgatcaacgaattgttctgttattcgtttgacagttgctactttgttagtttggtagtcactatgatttggtcgctccatccaacgactggtcgtttgatagttgttgatcgaagtcacagtcattagtctctaacgtgcctttaatataaggaatcttaaacttaataataaagaacacaaaactggactaatacaagatgccctaaggagcaacattaattgtttcgttaaatccataatttaatttatagtacagtttgttacttataaaaaacttacacgtattagttttgttatagtacaatttattaacttaatttgattcaaagtttccagtatttcccacaattcaatgtcatatggtcaaacatttcagcgacttgggtcaacctcttttccatgttccaagacatgtgtctcgactctcagcgatttcaagatcattgtctcaatcttgttgctattttattttacgtatataggggtataaattatatatgattaagcttttcttttaaatttatgtacatcttttatagagttgtattttaaaacgagcctttatcaagttttagatttgaattagtggttatttatccattggtcacacgagggtgatgattgtgattagaaatgtcatgatggaataatccaacctaatccaatcctagctagtagatcttgctgattggtctcatacagttttataaaatgcaagctcaacgtttgtagtcatgcaagccagttcaattagtgacaagtaacaagacagattttgcagattttacttagtacggtctagttggagcatatctgatcttgatttgttttcaaaacataattgtgagctggtcttgacaacctagttttttttttcttaatatatatagctaaagtatattttgaaccgaaatccaaactaatctcttagacctgtaaaacattgattcatattttgtcatttaaagccttacatgtcaagaaagaactgtaaacggtatttgtaaaaagagtaaaactcgatcattggccttgacccataaaattcaccttaaacaaaccgttggaccacacgttcttagtaaattgactagtacatggagttgaaaccttttaagacgtgataagatcaatgatgccattagcaaatgtgttttgtaacaaactagaaagtgatggtctcatcttcacccattttggtagcacttttaagtaagtaacttaggcgtgtgaatgtccataaagtgagagaaaagagccaagggtttttggcaagttttggcaaatatgatgtgatagtcccaacaactttgtttatacctacctactcgcaaagagaagcacgcataaataatataaccttatgtcaataacttgaacttaaatctttgaaatatttggtctattaaagtcaagaaaattttctatatatataaaaaggaacatcaactattaagctatttcaagggaaaaaaaaaatttatataaaaaaaaaacactttataaaaaatacacaaatttaccaacgtgatgttggtctagtggtaaatctccctggaagtgctgggttcgagacatgttgggaagaaactattctccaaaaaatatgaatttaacctggtatgcatcccacttctaagagatgtaagatttttgggtttgaatttccagatattcaaataaaaaataaaataaaaaacacaaaattaggactcatagttgtgcttgcggatgttaacacaatttgcttcgacaagatatatacacaaattaggtttggttaattcactatccttatgatattcatctagcatctgatcaataggctgtgatcatctcagattaaacatagtataaccgatcgacttctaaaacatcaagacaacttacataaatagtaaaggatttctaacttctaagagattattctatattggttctctctaaaatcttgattaagatgataatttatgggaaacttttcacaaaatgttaatggaaaataatggtagataaagaacgtgggaaataagagaagagagacaaaaaaagacagaaaggcaaagactcgacaaattgggtttgatgaagtgtgatgccaaacttgtgtttgtcccaagacaaacaaccccgagaacgagcctcaatggcgtgaaccccttttctataccttgacataataaattcatatatttttaataaatagtatcttcaaccttttttgaaactctcacttttgtgtttcgtgcacttatctcacatagtcacattaagatattatatacaaatataataggtatatagatagatagatacatatatatgtgttagctccttttagttgatataaaagaagagaagaagaagaaaaagaaagatagcacaaaaaagcttctcatatagctaaaaatcactttgaagaat

SEQ ID NO: 13922 - DNA, 3000 bp, Unknown
  misc_feature (1)..( 3000): cDNA_ID_3020634_gDNA_ID_2214671_Annot_ID_189115 3000 nt of promoter + ATG
cttctcttatttcccacgttctttatctaccattattttccattaacattttgtgaaaagtttcccataaattatcatcttaatcaagattttagagagaaccaatatagaataatctcttagaagttagaaatcctttactatttatgtaagttgtcttgatgttttagaagtcgatcggttatactatgtttaatctgagatgatcacagcctattgatcagatgctagatgaatatcataaggatagtgaattaaccaaacctaatttgtgtatatatcttgtcgaagcaaattgtgttaacatccgcaagcacaactatgagtcctaattttgtgttttttattttattttttatttgaatatctggaaattcaaacccaaaaatcttacatctcttagaagtgggatgcataccaggttaaattcatattttttggagaatagtttcttcccaacatgtctcgaacccagcacttccagggagatttaccactagaccaacatcacgttggtaaatttgtgtattttttataaagtgttttttttttatataaattttttttttcccttgaaatagcttaatagttgatgttcctttttatatatatagaaaattttcttgactttaatagaccaaatatttcaaagatttaagttcaagttattgacataaggttatattatttatgcgtgcttctctttgcgagtaggtaggtataaacaaagttgttgggactatcacatcatatttgccaaaacttgccaaaaacccttggctcttttctctcactttatggacattcacacgcctaagttacttacttaaaagtgctaccaaaatgggtgaagatgagaccatcactttctagtttgttacaaaacacatttgctaatggcatcattgatcttatcacgtcttaaaaggtttcaactccatgtactagtcaatttactaagaacgtgtggtccaacggtttgtttaaggtgaattttatgggtcaaggccaatgatcgagttttactctttttacaaataccgtttacagttctttcttgacatgtaaggctttaaatgacaaaatatgaatcaatgttttacaggtctaagagattagtttggatttcggttcaaaatatactttagctatatatattaagaaaaaaaaaactaggttgtcaagaccagctcacaattatgttttgaaaacaaatcaagatcagatatgctccaactagaccgtactaagtaaaatctgcaaaatctgtcttgttacttgtcactaattgaactggcttgcatgactacaaacgttgagcttgcattttataaaactgtatgagaccaatcagcaagatctactagctaggattggattaggttggattattccatcatgacatttctaatcacaatcatcaccctcgtgtgaccaatggataaataaccactaattcaaatctaaaacttgataaaggctcgttttaaaatacaactctataaaagatgtacataaatttaaaagaaaagcttaatcatatataatttatacccctatatacgtaaaataaaatagcaacaagattgagacaatgatcttgaaatcgctgagagtcgagacacatgtcttggaacatggaaaagaggttgacccaagtcgctgaaatgtttgaccatatgacattgaattgtgggaaatactggaaactttgaatcaaattaagttaataaattgtactataacaaaactaatacgtgtaagttttttataagtaacaaactgtactataaattaaattatggatttaacgaaacaattaatgttgctccttagggcatcttgtattagtccagttttgtgttctttattattaagtttaagattccttatattaaaggcacgttagagactaatgactgtgacttcgatcaacaactatcaaacgaccagtcgttggatggagcgaccaaatcatagtgactaccaaactaacaaagtagcaactgtcaaacgaataacagaacaattcgttgatcgcactcgctggtcgcaattactagtcactggcgattagtttagaactatatatgttcatgaatgagtgtggaatttgtttttaaaaattttgttaatttttgtgagtgtggaattttttcttccacagtttggtaatctagatcgtgatttgctagtgtatttcatacacattgttgtgagcttacgatacatagtctttagactttagcatatttaagaattgagaactatgttataatgtttaagtagattttaaagcaaattttgtttagtttgcttcgctgggacattttaaaaggagataaagttttaccgatgccaagtttttatcgttttacagttttttttttgtcaaacaactgatattaagttaacttgcgattataacaacttgaagctttgccacataactcacttgttgaaagtttaaaatagaaaaataaaggaaggggaaacatgaaagtaataagagagtagattaacatcatggatgataaccggaaactccttcgagaggattccataagcgatcggtttgaagacgatcgtcgactcttggtcttcaaataaagacgagagtgctggtagttcttctgccatcgaaggctgacgaacaacaataaagcttgatgccactagggttaagcgtttagaaacattttccctaaaggagaggattgatgaaaaaagtctctccttcgaagaggaggaaagaagaattggtctctcaatatatgaggaagaacatctcatatatgaggaaagtttctccaaaaaaggagaaaaatctctccaaattgtaggaaagtaacaaagaagactcgttaaaatcacaaagataaccggtaaaagtaatagaagcaaagagcaaacgttaccatgacatgactcatggtccaaatataatgggtctcgaggtacaaaggaagccataaacattggcccagctcaaaaatcatg

SEQ ID NO: 13923 - DNA, 3000 bp, Unknown; identical to SEQ ID NO: 13920
  misc_feature (1)..( 3000): cDNA_ID_2705559_gDNA_ID_2214671_Annot_ID_136614 3000 nt of promoter + ATG

SEQ ID NO: 13924 - DNA, 3000 bp, Unknown; identical to SEQ ID NO: 13921
  misc_feature (1)..( 3000): cDNA_ID_2710639_gDNA_ID_2214671_Annot_ID_189116 3000 nt of promoter + ATG

SEQ ID NO: 13925 - DNA, 1221 bp, Unknown
  misc_feature (1)..( 1221): cDNA_ID_2710651_gDNA_ID_2214672_Annot_ID_136619 3000 nt of promoter + ATG
ggtaaaacaatttttgctaggtatttatgtgaaggtacaatatctttctaaattttatatgacgtattccaagttctttataattcgtactaagcaatgatttctcacccactacaatgccaatgataatctagattcctgtaacgtcgtattcatgactttattaaatttggtttgttttttccacaactccattagatttgagtgaatagaaaggggtcgtctaatggataattgatcaaattctttaccaaacgtgtcaaatggtccaaatttagatagtaacaatttcattgaataaaagtcttctagatcgtggaaaaagcatataaataattaaccaaattcagatccaaaccggaaaaatgtgtattgtaaaaatttaaaatctccaaaccggctttccttcggtttaccgttaaatgatctaattttagtttttaaaatataatttcagaactcatacgttttgttacgttagtactatgtgttgatcctcgagtttacaatcttcgtttctataatccaaacgtcaagtttaaaaataaagttaacgacgggataagtattaaatggtattctaaaaagcgatttaggcggtcgactaggcgctcacggctcacgcgacgtatagacaactgtctaatctgcctaaaatcctatatacctcgttttactatatttttctagttttcaactaattttatatttctataaatagttataaatgtttatatagtatttgatatagttaaaagaatattttgtataatttttgtttacgattgaacatatatatatatatatatgtatttttttaatagacattttatataatatttatgtaaaaaatcatatttataatgtctttattataaacgcttaaccgtctaaaattatctatgtcctaactaagcgttctaggcgctaggcattggatcactgtccgtttaacgcctaacgttttcttgaatactattaattaaagtttttttcaaaaaaaaaacatttttttaaaaaaattcatttcgaaactaaagaaaatatccaagaaatttccaaaaatggtggaacctacacgatatggttcacatattttccatgaaaggataactattttgacttttctcatcacgctcaataatagcgtgttgttaatcctttactctatctctcttcaaagctctattgatcttacatcttctctctattgtagtaatg

SEQ ID NO: 13926 - DNA, 3000 bp, Unknown
  misc_feature (1)..( 3000): cDNA_ID_2705593_gDNA_ID_2214672_Annot_ID_136620 3000 nt of promoter + ATG
tctgtggcctacgagatcttcaagacgcatgacgtgaacatctcatcccacggccaccctccgattgacgagtgtctcttttttgggtcttcaagctttgtaatggctccttatggagattactggaagttcatgaagaagctcatggtcacaaagctgttcggacctcaggcactcgagcagtcacgaggcgcccgtgcagatgaactagaacggtttcacgcaaacctgcttagtaaggaaatgaaaagcgagactgtcgagattgctaaggaagcaataaagctgactaacaatagcatctgcaagatgattatgggtaggggttgtttagaggagaacggtgaggcagagagagttaggggattggtcaccgagacatttgccttgtttaagaaacttttcttgacacaagtgttacgcaggctgtttgagatactcagaatctcaccgttcaaaaaagagacactggatgtttcccgcaaattcgacgagcttcttgaaaggattattgtggaacacgaagagaaaacggactatgatcatggtatggacctgatggatgtgctgttggctgtttatcgagatggaaaggcagagtataagatcactagggaccacctcaagtccttgttcgtggtaaattctcctttcacttggtggattcattgagaaatccaatacaacaacattaattgtcctgtgtttttttttattacaggagcttatccttggaggcactgacacctcagcgcaaacaatcgagtggacaatggcaaagatcattaagaagcctaacattcttgagagattgagaaaagaaatcgattctgttgtaggcaaaacaaggttgattcaagagaaggatctaccgaacctcccttatttgcaagcggtcatcaaggaagggctaagattacacccaccagcacctctcttgggaaggaaagtcacagatggatgtacgattggaggctgttacgtaccaaagaacacaacacttgttgttaatgcttatgccgtgatgagagatcccgattcttgggaagatcctgatgagtttaagccagagaggtttctagcttcttcaagaggaaaagaagaggagagagagcaagaacttaagtacattccttttggcagcggaagaagaggatgtcctggagtaaatctaggttatatatttgtaggaaccgcaataggaatgatggtgcattgctttgactggagaaccaatggagataaggtcaacatggaagagactgttgctggaattaccttaaacatggctcatcctcttaggtgtactcctgtttctcgaatgcaactgcagaaatcgcagttcgtgagttcatgaattttgattagtaaacaaagaagctttgcattttatgtttccatgtctaagttttttccggtctagttggttacttttggtttattgtgaaaacctataaacagttgtgtattgttcttctgttgagttgtggatcggtttcatatttaatgactttcaattttattttatttttttgtcatccaatttttattagagctcaaacaagtcaaacctgaggaatgttgtttacataagtgacatgaagcggttcagtgcaaactttccgcgcaaattatccgtttttacatttgcacattacgagaaattaaagataaagagaaggttgtgaattcttcattgtcgctctgtagttcctctagataaactaagaccgccgaccttttcggttgaagaagataccatcttcaccaaatctaaaaagtctgtaaaaaatgctacatcttagttgtcgaaaccaattatacacttcattgccaagagtatagctgactttcaatattatgttccttaatttaggtttatgtccagaaaggaagaaaatgtcaatttatttaatttttattttaaaaaaatctttgaagaagatgctgaaaattatttattctaatatggaaggaaacaatatttccaatttacaatatgaaattttttaaagaaggtttcctatttaattcaattgctttttgaagtaaattctgtttcaaatttaagtctaaatttgtacttctcaattaatacaagtaagttatatatagactatagagtatagaggaaaagatataaagacaacctcatttcttggcgtgttcaacctctttagtctttccaaagcgttactacacataaaagccttttatcttaagcatacgcttaaccaatatcacacataaactgaatacattaatgtaaatatgcatgtatatattaaagttgttcttatgattttttcaacaaagttgatttcataaaacggattgatgatgtatctaagtcggagaatgcagagcggaggttttgcggtgtatcgacagggccttgcggaagtcttacaaatatataacaaagttgagaggaaaacatctatgaatccatgtccggcgattattcgatttggaagagactatcataaccaaatatgtccacaaggtctcaagttatcaaatccgcttaatgccgggagatactttagtaatgtttccaatgactccaagatgcaaccttctcctccaaaccagtggtttaattttccctcttggtactcctctttatctctctgtctcaatccctctaatatacgtcgaataaaacaatatgtaccatgcaaggttatgatatacgtacacaccaagttgcattagataattcaattcataaactaaagtttggagaataaatggcaggggaagatgggttataggttctgcgatatccttagtgttatctttctggaacaacgaaaggttacaaaaactgaaacgaatagaaggtaataaaattttaacatctttcatttgcattggctaaaaagaacttgaatcacattatatgttaatgtcatgtgtggtaatcttaaaacattcttcgaaagagcactaatcttgtctttgccatagtactttataaattggaatgatgtgatg

SEQ ID NO: 13927 - DNA, 3000 bp, Unknown
  misc_feature (1)..( 3000): cDNA_ID_2705589_gDNA_ID_2214672_Annot_ID_136621 3000 nt of promoter + ATG
acttcatcccaataatacttgtgaaaggaaggaacaaaaagaatgaataggcttcaaaaaggaggaaaatggaagtgggtgaagatccaccaccacaagcccaccagaaatcagaacgcaaattaaagccaacacgctactatttaagaaacagttccatagaaatgtgttatgaatgaaatcaaacctccttgtatgtctttgaaacaacaaaatctccattgtggaagggacgtctactttgtgttcatgttaaattaacattgttaattatgtaacccatcatctaatcatgtttcttaattcattatgcaatttctgtctaaggcatatatttagtgtttgaaacctgtcaacaataagatctattactccgttttttttttttttttttgtaaattccaagattaaaataaaacatgatactaaaaatgtgttaacgatgcaaatccactcaatgtactcttcaagttttgttaatatttccgcgcatccagtttaggatagttacatttggtgtatcaaaatcattttttccaaaatatttttttcagaaaacgaattcatttaagttgctaaaacataaataatctttggaaaacaaataacagtatgcagaacaatatcatgaaaaatgtaaacttcctaatattttcttagctgaatgtttgacccgacggacagaataaatactagtacataaataaaaaagaagccaacaattagatagttgttatatgatattaaatatgatttatgataattatagaacaactagagtgattaaaaagagtgagtgtaatagtggggttgattggcgatagactttcaagtttcaaggctttgagagtgttctaaagtcttcacagtcttattttgccaatcatgtttttttttttactttaattttttttataagttctcaaagccttattattattattattttatttatttttttgggcaaaaagtcttttttttttgttctttatttatcttatttttacagcttcgaatacatagtttttaaacaaataaatttaaaagctttctttcttcttcttcccatgataattaaaactctccacaagtttacgtatatttttttcaccaatcatttttaataaattaattattattaattttctatctttcttttaaaatctattttactaataattattttatttttatcatcaacattaatgtaggtgtaagagagtttacataattaacatttttcaaaaaccatatatggttcatataggccattcaaaatctgaataacaacaaaaaggatttaagtgctattcataaagaaagaaatcttcagaagtaatttgtgttggaaacatgggaaaaatcagttggataatttgatgaagcaaaacaacatttatcataataatcccgaattttctcagtttatcgcacttcttaatgcaatttttggttattgaaagaagaaatgaatgagtaatacatatccattttgtttgtcgagaatatttatttagtcatttattttaaaaagtttgtattttattttttattattaataaaatatttgttttgtcactatgttacaacatgatttaattttaatatcactttatatttataatatatatttaataataataaatataattaaataacaaacacagcttctatagctttttgttatcaataagatcttaaaggccaaagcttctaccgtcaatggcgctgccatataccactcatagcccggcagtcccgcaatatgtgtaaaatggtctcctcccctcccttatacacttgacatattgtagaatcacagagatggcgtcgatatctttcagcatttgacataatagcttggtttcctaccagccacaagaagattttcaccctctctggacccaaactactccacacacatgtccagaacctttccatgttaggtcgtgactcacaattgcaggttaatagtgagtatgcagatttgacggtgaaggctccatcaacactcactccccatgacaaatgatctcttgctaaccttatcaaccaccaaaacccccaatcttaaacttgcattttctgtgatatatggcagaatacgccccagctcccagcctctaccatcccaccacaaatcactaaaatggggcaaagtgctttcacttcatgtggatttataattacttttagccaaacacataattatctctatctccggttacttttgttaatatgttttggaaaaccaagaatttctagacttgtttatagtattaccatgttagtatttgatatacactaaaacctgagtaaattaataatgtagagacagtgaaactttattaatttatagaagtattgcggttgcggatggtggtgccgactgccgagaatggcaaggattgagtctgatgaacaagtatttcatatttggctgtttacataacaaaccaatctggttcaataacattagacttctttttaattcttgaggtcttgcttcagttcagttatataaacgtcttgaacgaggaggaacagaagcaagaaaatctagcacttttgggagaaggtattcaaaagaagagtaaagacggttcgagtgacgcttgggacgaaactaatattacatgctgtggtttcgggtctgggaagatcacgggcttcggactagaatctcctggtattcaaaaaaaaaaaaaaaaaaaaaaagaaagaagagcaaagaagaacattgtgtacattgtgagtcaatcttaaatctctcgattcctcacatcacattagctgtcaccttgggcggtgaacgctaattatttagttattgatattattaatttgttcctcgactctctcacaacgctttcacgttcgttcagtcagataacattttttaatgtaatgaacaaagcatgcttggtcttatactatataacatattcatggattattcagtagttctgtatctgccccctttgtttttgagaaacaatg

SEQ ID NO: 13928 - DNA, 3000 bp, Unknown
  misc_feature (1)..( 3000): cDNA_ID_2705581_gDNA_ID_2214672_Annot_ID_136623 3000 nt of promoter + ATG
attgtaaaacatttcctttcaaatagcttttaaagaacatttacaattacctctggttgtctttctactccttcatcttcttgttttctttcttcatcttcctcagatctctgattattcttttcctccattctaatgtccaaaatcctctcaatcatctcgactctcttgttaagatcttcaaggattgtcaaaatcctgtcaagcttctcgctatcagatattttgttattgattttgttttgacctacttcttcaagggcagcacaaacatcaacgcatcttgtattccattcagttttcttcaatctgtagcccatattaacaagtcccaaaatatgttggaattctatgtcgtctgtgtggaaatcaggaactaaagacttgaattcttctgggtttccaataattgtattcacctccatctgcgaagatacaataacattacaaatcttgagaaagcagaacttcaaatctaaaaaccatttaaagaattctgtaaatagacaaaagcttacctcagaaacatcatttacaaggtttacgatcttgaaaaactctggagtagtagtgcttttccacttcaatatcaatggatattcagattggaattctttatctttaactccatatgctgcaccaaatgctggaactgcgctcaacacccatattgttagcgctagtccaaatcctctcaaatcatatttctcttttgcccaagttttctcgtccattctcagaattgaatttgatagaacactgaatgcttctttaccccacggttgggctgtgtacatctcaaaatcagaagcatgctgcaatcttggcaaaggtatcttctcttttccatatggtgtcaaaagaattccttcagtcaacactactgcagcaagacacaacttttcttcatcttcaacagcaggttcaccttccttaggttttaaaaacaatcgatcttcgagatcaccaagagtataggatcctttactagcccaaaagtatggttcttttacaggatcttttccctttcgtcgaagttccctatgaacaggttcacattgaattcctgtatgaacaaaagacagtgtagagactattattacaggttttatagtaaatactttaaaaacgattgtaaatcatgtttaacacttttaaaagcttttaaaagcttttaaaatcccttataaatcattcaatgccacttacttatgctttaaaaacgattgtaaaccatgcagacacttttaaaatcccttgtaaatcattatatgacacttacttatgctttaaaaacgattgtaaatcatgtttaacccttctaaaagcttttaaaattccttgtaaatcattctattcaacttacttatgcttaaaaaacgattgctaatcatgtttaacccttagaaaaggttttaaaatcccttgtaaatattctatgccacttacttatgttttaaaatcgattgtaaactatgcaaacacttctaaaatcccttgtaaatcgttttaagacacttacttatgcttttaaaatcccttgtaaacgtgtttaacacttctttaagcttttaaaatcccttgtaaattattctatgctagttacttatgcctaaaaacggttgtaaaccatgcataccctttttaaaatcccttgtaaatcattatatgctactaacttatgcttcttaaacgattgttaatgaagtaaaccccttttaaaagcttttaaaatcccttgtaaattatctatgacacttacttatgttttaaaaacgattgtaaactacgcaaacagttatgcaaatgccttgtaaatcattctacgacagttaattaagctttaaaaacgattgtaaaactttattacctgttgtgagatagaactctctcaaggagaaacggataggttgagaatcaactctaaaccaaagagttgatccttttgttttcactctctgctgcatgagatagtgaaagatttttccagaaaatctgattcccttcttagccttcatttttggtcccaattcaactagaggaccaagaaacgaacttctaatcttctgaaataaatactcgcctaaagcttcctctactttactaactaaattccaatccgagtattgttgaacggttcccagtgtaatagattcctcaccttctctgtagatttgttcaggcaatgcaaggatttcactctctgaatccatctgcaaaacatgttatgaaacagcgtcagatctactataaaatcgactataaaatcgactataaaatcgattataaaaacggttaccgtcggatctatcgatatctctggggattgtttgcgtcgtagagaaatgatctgaatccttcagcgaagaacatgtttatcggagaggaaattcgtcggcgattttggggtttctcagagagaaaattcgtcggcgattgtgagtgaaatcggagaggaaattcgttggcgattttgagtgaaatcggagaggaaattcgtcggcgattttgagtgaaatcggagagaaaattcgccggcgattttgagtgaaatcggagaggaaaacgaagaagtttgtgccaaaacgaagaagtttgtgaaacgaacgtgaaacctaatcattcagagggtaagacagtcatttgccatattaaaaggggcagtttttaaaatggccttcaggaaaggacatttttacaaaaggttattagaataaggatagttttgcaaatctcccatctcccttaaaaaaatagtgcaatctacatctcaaataagatgatatattatcctttaaaaaataacataaaattacataatttctcaaaaagaaataactccgaaaattacacaaatatttagagatattattaactctgatttactttaatcggcgcgtgatcgagaaagatcttctttaacctctttgcaacaaatctactcaaaaccctaacccctttttcaaattacttccatctttagatcgaatcaaatcaatg

SEQ ID NO: 13929 - DNA, 3000 bp, Unknown
  misc_feature (1)..( 3000): cDNA_ID_2705565_gDNA_ID_2214672_Annot_ID_189137 3000 nt of promoter + ATG
tgtggtcctcattagtgcttggctcaacacctccaaagatcttgttgtatccaatgaggaaaaaacaacaacatcctagcaccacatagcaacctactttttcgcaagtcccaagctaacagagatggaaaagagagacctttaatgctgtaaaaagagatgggaaaagatcaatgagggttgttgcaagtttgtaggaagctatgtggctgtaaccaaagagaaaaccagtgggcagaacgataatgatgtggtgaacttggctcactagatcttctacaatgattacaatacaaagttcacccttgagcacaattggagagaggttaggtttgatcagaagtggtgcgtccaatatgctacatacggtaaagagaagcgacaaaaatgtgatgaacactcttccccatcctatgtgcaacttggccttgaagaggatcaacctcgccccttggggtaaaggcagccaaaggcaaagtgaaacccaaagccaaaactaatttggaaggtgatgaaaacaagactatgacagagatgcaaaatatttggtctaattaaggagaaagatttagctttcaaagagaagctacttaatggtaacaagaagctactcatgttaaagagaagctaagtgaagagaagttactagataggctacaaaccaaaactgagcttctatctgacatcgagttggctcttaagcacaagttaataactgatatgttgtcctaagtttaagtttctaattgaagttgtatatttgagtttatgttctttttttagtgtatgtttaatgcttttgtttcagttgtcttctatgcttttgtttcagttgtgttatatgtttaaatttcagttgtattatatgctttaattgcagttgtgtttgatgcttttgtatccaatgtcacatgaatgaaatgagtttattaattgtgtcctaagtttaagtttaagttgtgttctaagtttcagtttcggttatgtttggtctaattatttctattactatgctaactgtctaattatgttgattctaaataattttgcaggatctagaagacacaactagtgccaacatcacttgtacaagacaccacaagttttcaaagccaccacttagtttgtttgtttttttgtgcattggtttgaataattgtacatcacaaaactatattccgatattacaccacttgtattcattgttcgttacactttgtgtttatatatatagtacataatctttattacaacaaacaatacaattctctctattattctctaaaacaatcttccttttctccaaaaaaatatttcttttctccaaaacaatcttccttttcaccaaacaatcttctttttctccaaacatttatcttcatagttcatcaaacatgagatcttcttcatcttataatcttgacgataagtttgatcaatttttcaatgaaacattatagagatatgttgatcgtcaaccaaccaagtcaacaaaaatgagcatatattgcaagagatcgtgaactaggacacatccagttgtagaacgattatttcaaagaagatgcgacattccctcctcatatattgtgacaccgatttagaatgaacaagccattgtttatacgtattgttgacggactctccaatgaaatttcatgctttgaacaaagaagagatgttatcggcaggttaggtttatcggcactacgaagtgtacaacaacaattcatatgattgcatatggttgttcagtggatgcggttgacgaatacctacagattgtgaaagcacttcgatatcatgtatgatacattttgttgaatgaattatatatttgtttgggaaagagtatctaagtagacctacacgacaagatcttaaacgactactccgtattggagaggtacatgaattttttgggatgataggaagcatcgattgtatgcactggaagtggaagaattgccccaccttttggaaaggataatatacacgtgtatctggcaaaccggcaatagtgttaaaggctattgctttccaagatctttggatatgacatactttttttggacctccagatttcttaaatgatatatatacttgattgcttaccagtttttgatgataaattacaaggtcgagctccaaaagtgaaatatatcgtcaactggacctactatcatttggtttattatctcactgatagaatttatcctaaatgggctacatttatccaatctatttcaattccacaaggtcacaaagattctttatttgttacaaattaagaagcttgttgtcaaaatggttaacgtgctttgggagttttgcaaacttggtttgtaattgtcaatccagctcttatttgggataagaaaaaaataggaatgatcatgcgagcatgcataatacttcccaatatgatagtagaggatgaacaagataagtacattcagtttgatgcagctgaattcacacaaccaaaatcaaccagctctttacaaatggatttcaactattttacagatatgctttcaaatctcggcaatattatggccgctcgagcccgagttcgtgatctggctatacatccacaattgaaagctaatttggttaagcatatataacaaacatttggcgggaattaagctaacaattaatcgttattctgattttcgattttcgtattttatatatgcttttatgtcatgtatctttaaaattggtgtatttgcaataactattcagttttataaaataaaatatttataatttttattttaataataatttttttttaaaagcccacttttttcattagacaaaaaaaatttaacaatctatccaaaactcttaaatttgaatttgataaaatttataattaaaagatttggaagagccccataaaaagctcttggacttgcttttagttttaaaattgttaaggctaaatatcttttttttttttgtcaaccatgtacatatatcttggtgatg

SEQ ID NO: 13930 - DNA, 3000 bp, Unknown
  misc_feature (1)..( 3000): cDNA_ID_3020668_gDNA_ID_2214672_Annot_ID_189136 3000 nt of promoter + ATG
taataaaacgttaattgtatacaaaatcataccttagatcttcaaaatctgtcaatatggactggtaatggcagaattgcttttcttctgagctcaaccttttcgttaaacttgcgtattaatgcattgttttgtttaaaggctggaatgcatatatacgcaagagcagcagcaaaaggaaaacgtattcaggtaaagtcttgcatcttttcccatttaaaagtcttccttgctatttcgaaacgacactatgtcaaattgcttataatatattgactcagtcaaatatgggggcgaaaaatcatggacttgtcttgcctgatgccaacatcgatgcaactttaaatgcgctacttgctgctgggtttggtgccgctggacagagatgcatggcactgagtacagtggtttttgttggcgatgcaaaatcatggtactgcttactttatatattcaaattactccagtttctcgaatatcttatatttcttgtgataaacacattttcctgtaatctttttctctcgtacggtttccagaaccacgcctttagggtgcttaagccatatataggatagttaagataacaccattttctttaatttagattgactattgttgtgtcctaatactaaatgtaactgaagaatatgtatgaggcctgttgattttcatttgacagtcatgaaagattagctttaacttgtctaatactaaccagggaggataaactcgttgagcgagctaaggcccttaaagtcacatgtgggtcagaaccagatgcagacctgggtcctgtgattagtaaacaggtattttcgcgcacaaacctctgaacttacatgtgtaaaaattatgtttagttttgcattctgtctgttgttcaatatgtatacgttattgttaaattttgatatgactaggcgaaagaacggatatgccggttgattcagtctggtgtagatgatggtgctaaattgctgcttgacggaagagatattgtggtattttcccattctccatatttactgctattgcaacagactcatgccttaaatatagcactaccctccacattcttatcaaatagtaatcatcaagaaccgcagaaatatcttgatttaataatctttgtgtaatcttgaaaacaacgcaaagatcaactggtccgagaagtttatatgttttctcttataacaaacaggttccaggatatgagaaagggaattttatcggtcctaccattctatctggtgttaccccagacatggagtgttacaaggtattttctgacattaaggcaaatgatccgtactctacttgaatcttaaaaattcatttttcttcgcaggaggaaatatttggccctgttcttgtgtgcatgcaggtcagattggaaaactagtcttatatcattcatttattcgtgaattgtgagattaatgccctctgatgcttttgtgacatattcatttacaggcaaacagttttgatgaggccatatctataataaataaaaacaagtaaaacaccctgttctatcatcatcttaatactaaaatttaatcgtctcatcatcttcaacaatttgctacttacgccgtcaacaggtatgggaacggtgctgcgattttcacgtcgtccggggcagcagcaagaaagttccagatggacatagaagcaggacaggtatgaagaactttgggccctataaaatacaacattacttgtatgcatttgattacatgtttgatatcttcttttgttgttgttaatgtttgcccagatcggtattaatgttccaatcccggttccattaccgttcttttccttcaccgggaacaaggcctcattcgcaggagatcttaacttctatggtaaaattcttgtcacaactaaacaaaagaagatccattctcctttctctttgcttatatatatactttgagtgaactatttttgcaggcaaagcaggagtggactttttcactcagatcaaaactgttacacaacagtggaaagatattccaacttcagtatctctggcaatgccaacgtctcaaaagcaataatgagaccttaacttcaaatactttttttacttttggattatcgaatcagcttcaagaagaaccctttgtttatttttcagctctctagtattttctcatgcttagtttccttcttttaatcactatggtgactagaactctagaagtaaccatgggaataagaaaaagtaaaaatctcaaatttgcctaatttgtcaaataaaacccctaaatgacattctttgagtcgtaaactcataaaagtcaaagtgaaacttatatatacaagttattatgtgtcttcattcccaattgaaacccaaaaatccctgaattcaataaactcgaattacgaaattttgagttttattttgactgttttttaattatcatgtaaacaactcaatctacatggaccatgaccaaagaaaactgaaaccttaaacctataaagtagtatcattatttagtgaaaactagttcccaaaaaaaatcactagtttaaaccttattgtattttttgaactttaagatgttgtagactcatcaaagtcaaagttaacgatctttaatttattgtgttttttcttttccaattaaaacccaaaattcaataatctttggatcgaaaatttgagttttgttttgactgtttttctaattatcatctaaacaaactatacacgaccatgaccaaaaaacataaacttttcgccttccactataaaagtatcatcatttagtgtaaactagttccaagaaaaaaatacacttgtttcaaaccatattagagttaatagcatttatcgatatcatcacatgcatttaccgctaacctttttctataaattgactaaagtgtctctcattttatgtcactcataaaattgctatgttttctacttagaaatcactacttgtttttgaactctcttactctttcaaaatg

SEQ ID NO: 13931 - DNA, 3000 bp, Unknown; identical to SEQ ID NO: 13928
  misc_feature (1)..( 3000): cDNA_ID_3020680_gDNA_ID_2214672_Annot_ID_189133 3000 nt of promoter + ATG

SEQ ID NO: 13932 - DNA, 3000 bp, Unknown
  misc_feature (1)..( 3000): cDNA_ID_2991029_gDNA_ID_2214672_Annot_ID_189132 3000 nt of promoter + ATG
tattacaaatgtgaaaactgaaaaaaagaaggaaatttgtattatcatttttagtttaatacttttaaaatcgaggtaaatattacaaatgtgaaagttcaaaaaaattatatgtattatagtattttgtttaacattttttaaaagttgagataaatattaaaaaaaaagtttaaaaggggaacttatatcgtcgtacattagtttaaatcttttaaatatcttttcttccgttttttattaaaaacatattgcaccgaatatttcaaatatgttaaaatacccgaatatgtttagtgagcttatcttcggaaaaaaacaaattggcccggtataatttacaccgtcatatgtaaaaccctaaaactatatgttacaaatctctataaatataggttgtcattcatgaaaaacaaacataacagtttattttatgcatattcgttatgatttatagttttgatttgtaccataaagttggttctttctatgatgcatcatctcatagatctttgcttattgttgatcgacgacctcttaaacgaggattatagcctttttatttgattcacccataaatattgaacctaatttgtggtatattttaagcaaatgaatatttttttaactttttagtttttttttaattactaattagtttaagttatattttgatctgataaaaagtatttgtgggtcttcccacgcgtcagacccaaaaagtattaaaggggtcagctgacccctctaaaattctatatttgcattgtagccctttaaaattattttgttttttccctttttaaattacaaattagtatgtaaaccttttaagttttatagtatttttcttctactttgtcttttgacactatttcttactttttttttttttttttgattcatccataaacattgaacctaatttctggtatttttttaaagagatgaagttttttttttaggtttttagttgtttttaattacttattattttaagttatattttgattctataagaagtatttatgggtccaccgcataggcagacccaaagaagattaacatttgcattataaccctttaaagtttatgatatcatttatattttaagttatattttaatcttcttaaaattacaaattcgtatgtaatccttttacgttttatcgtatttttcttctactttgtgttttgacactatttcttacatgtttttaaatttttttgtttgtttcacccataaacatttaacctaatttctggtattttttttaaagagatgaagatttttttttgagttttttagttgtttttaattacttattattttaaattatattttgattctgtaaaaagtatttatgggtccgccgcataggtagacccaaagaagattaaaggaggtcaattggtccccaaagttcaacatttgcattataaccctttaaagtcttttaaaatattattttatatttcttctattttgatcttcttgaaattacaaattcgtttgtaaatccttttttttttttttgggcatttgttaaccctttaaattacaaatttgtatgtaaaatccttaaatacttcaaaagatgatcaaagttaaagttattttaaaatttatttgcattatttcgttgaatgatgtggtagaattagtctttgatcttaaagatttggtcttgaagaatacacatatataatttgcaagtttatatgggattattttgtagatatatttatgtaaatataaaaaaatgttggaaacttattttttcctatgattccagtcggatgattgagtggttatggatagcgccaccaaaatatttcataactttgatgtttttatgagttacaattgatgtataaatcatttataataagtacgttatgtttcatcgtttgtaataaattaggcacacattaaattctctaagctatgtctaatattagtaaattacttttcgttttgaaaatcgtgaattagatgattgagttgttatggagatcgaaagtgttgagctattttggtgttttaagtgtaataatttatggataaaatgtttgtaataagtttggcaacttttaactatgtctaagattggtgattttactagcagtataaataagcgagatattatcataaaaaatcgctctagcggtttgcatagtataagcgagcttcatctggcttatttacctttgcaatatcctcttttgtttccgtacggggaggatggtttctggttagtgatggaaatcggatttgttgatacgagaggaaggaagagaaaaatggtcactatgagagagttttgatgaatagagacgatgcagattttatgctaaaatattcacaaaaagtgtgtgatgatgatataatttagttgctctagtttctaactttatttgttgaatattttgtgactatacgatctattgtattactgctccaacttagccaatttaaattcgtttgtactgattgccaagagaaggtattttagtattaaaaattttcatatgtgattagtaataatgtaatatcttcgtaaaaatactcttttcatattgatttctttaccattttgaatttcttgatttcattttaatatacgctaaaaaccgatttcggttttgtattactaatcaaacacgaaatacaaggcataaactaaacgtgaatattttgttacggagtcaacaacaaaattggagttaattcagttttgacgacttaccaaaaccaggattaaattgttcaatacgcaaacgtcattcttaaaactctcatactaaataaatagtgggcgtttttgtaaacccgaaaaagtagaggggttcttttccgaagtcttgtaatttcccagaccgtcgacgacaaaactctacacatgtccattaacgtctggatttcgattgtcaagaagttttgtaaaacgcaaactccgataatctttctctaatctccgatcgtgttttcttagtgag

SEQ ID NO: 13933 - DNA, 3000 bp, Unknown
  misc_feature (1)..( 3000): cDNA_ID_3020693_gDNA_ID_2214672_Annot_ID_189127 3000 nt of promoter + ATG
cggtttcatatttaatgactttcaattttattttatttttttgtcatccaatttttattagagctcaaacaagtcaaacctgaggaatgttgtttacataagtgacatgaagcggttcagtgcaaactttccgcgcaaattatccgtttttacatttgcacattacgagaaattaaagataaagagaaggttgtgaattcttcattgtcgctctgtagttcctctagataaactaagaccgccgaccttttcggttgaagaagataccatcttcaccaaatctaaaaagtctgtaaaaaatgctacatcttagttgtcgaaaccaattatacacttcattgccaagagtatagctgactttcaatattatgttccttaatttaggtttatgtccagaaaggaagaaaatgtcaatttatttaatttttattttaaaaaaatctttgaagaagatgctgaaaattatttattctaatatggaaggaaacaatatttccaatttacaatatgaaattttttaaagaaggtttcctatttaattcaattgctttttgaagtaaattctgtttcaaatttaagtctaaatttgtacttctcaattaatacaagtaagttatatatagactatagagtatagaggaaaagatataaagacaacctcatttcttggcgtgttcaacctctttagtctttccaaagcgttactacacataaaagccttttatcttaagcatacgcttaaccaatatcacacataaactgaatacattaatgtaaatatgcatgtatatattaaagttgttcttatgattttttcaacaaagttgatttcataaaacggattgatgatgtatctaagtcggagaatgcagagcggaggttttgcggtgtatcgacagggccttgcggaagtcttacaaatatataacaaagttgagaggaaaacatctatgaatccatgtccggcgattattcgatttggaagagactatcataaccaaatatgtccacaaggtctcaagttatcaaatccgcttaatgccgggagatactttagtaatgtttccaatgactccaagatgcaaccttctcctccaaaccagtggtttaattttccctcttggtactcctctttatctctctgtctcaatccctctaatatacgtcgaataaaacaatatgtaccatgcaaggttatgatatacgtacacaccaagttgcattagataattcaattcataaactaaagtttggagaataaatggcaggggaagatgggttataggttctgcgatatccttagtgttatctttctggaacaacgaaaggttacaaaaactgaaacgaatagaaggtaataaaattttaacatctttcatttgcattggctaaaaagaacttgaatcacattatatgttaatgtcatgtgtggtaatcttaaaacattcttcgaaagagcactaatcttgtctttgccatagtactttataaattggaatgatgtgatgtatgcaggagaggcggagttggttgtggaaggggtagaggctgtagcagaaatggtggagaaagtagcgacggcgactgacgaaatggctgaagaaatggcagagaaactgcctgagaaaaataaactaaaacaagtggctttggttctagaacacatttcagaggttgctgcccatgaagcacatctaacccaagatttccttcacaaggtacaccacaacactttatcattagaaaaattgatctatgaaatatacataaaaatcttactaaaatctaacactaacaaaggctaatgtaaaagattacattttgaaaatatgatctatgtttttgggtatcttttattggtttatcatttgggggatgttttggaaccaaataataatcaaacatatatatacttttgattgtgattgactaagtcaaaacttacaaattgcaggtggaaaaagtcacacaagatatagatgacttggaggcaatgataaagcctttgatagacaaaaaagtggcaaatgctgaaacaaagcaacaaactaaagaagaagaagcaaaccatgagtcgccttcacgccactaatctcttcatatatctcatctaatttggttgtaacaaaaaaaatcttcttcgaaactgtctcttaatttattttttcattctttcaaaagatactgtatatttttcattctatagaaacaaaaatataagacttatttaatgatttgctgtatagaaaatccaataactgaagaaacactagaaccacacaaaaaaaacgccactttaaaactagaattttgtgcaaaaaactctggaagtagataatttttgctactttaccttcaaaaaatgtagaaaaattttgtaaaatccaaaataatacgcaatctaaccttttttttttcacaattgtcaaatttttaaaaggttgatatataacaatagcaaatcaaagctctcaaaatgagtagttcaattatacatttagaattacaataaacaaatatatgtaatcgtgaaaacatttacaatatatgtataaggactagattgtgtattatttggaatttcatatgattatttttattttttggaagtgaaaagtaaaattgtaaatttcggcattttttttttctttcttaaattttatcatacaacaaaaaattaaaaattgcttttgtaacacagagaaattaataagataaaaaaaaaaagatcacccgacgtcgttttagaggtaataaacctatcagaaattcctaatttgctcttctttcacttcctctctcacacaatcaaccactgaatccggctgttcaaaattcgcaacatttgagctccctcatttctttctctgtattgtcaaattcttatttctctctaccaattttcttttgtgggctctcgtcttttggggttaagcttctgaagttctcttaaaaatcttcccttttaggtttcaactgttgttgagatctgtcactatg

SEQ ID NO: 13934 - DNA, 1221 bp, Unknown; identical to SEQ ID NO: 13925
  misc_feature (1)..( 1221): cDNA_ID_2710651_gDNA_ID_2214672_Annot_ID_189126 3000 nt of promoter + ATG

SEQ ID NO: 13935 - DNA, 3000 bp, Unknown; identical to SEQ ID NO: 13929
  misc_feature (1)..( 3000): cDNA_ID_2705565_gDNA_ID_2214672_Annot_ID_136627 3000 nt of promoter + ATG

SEQ ID NO: 13936 - DNA, 3000 bp, Unknown
  misc_feature (1)..( 3000): cDNA_ID_2710655_gDNA_ID_2214673_Annot_ID_136629 3000 nt of promoter + ATG
aatctgtagaggagtaagtagaagagttagtgaggataatcatattcgtcaacatgcaaaagaagaataccaagttaaccagttccaaaccattatatcagtcacgccaatcatgtcatacacataattcataccgatcatatcatttacgttggtcacatcattcgcatcgatacaacgaaacatgcatagattcccaatacataacactcaaactaataattttcaagattaaattacaaacgatatatattgatgcaacttaaataacaaacgtaaaaaaaaaacctatacacctattttgctacaaccgaatttcacatttgatgacaaaaataaaagatccgtcatctttagaaatatctctactgtctttgaccgacgcttttatctccggaatgcgaagcttcacttttctttgaaggattatggattcatcacttttcttatcatttttaaagacaagtttcgcttcatgtttttgggtatgtcgatggtctcatcaaaacaagaatctcctcttacatggtcttagttattaaggagtatcatgattcatggcttgctttcacataaaggattttggggtcttgaagttttttcttggcatttacgtaggtaaaatttctttaggaatttatctatattaacatattatgctcttgacatcaccctcgagagggccttctagctgccaagtcgacagtttgttctctggattcgcattgatccaacaaaacatgcatattcttggtcataggttgagggttatgactttcattgatcatgtttgttttagacaccttattgctactttgctaggttgattttatctcagtgtggaaacactaaaacaaaatgattccatatacttttatttgcatttaaatatctccaatgttgagtaataaagagttgtattctaacttgtttttctaaccaatttttttatgcaaaagaaattcaaacatcctaatcgtatggccaaatatagtttgtattttacaaagtctccatattctatacattcaatagatattcacctaaatatagtttgaattatgtgtcgtctagtgcaataataatcctaaacataaaacaagagagcgagagatagtgaagaagtgccccgaggattcggcgtttggtcgtgtggtctttgttgcaaaaacaggttgtgtggctctctcccttttatctccttatctctcctcttcccttttccacctcttatctttcttactttcttatattacaatatccctccctaattccattatatattttgttttatccccaaaccttttcaaagtcaactccgtctcccaccccactctctcattatataaatatatattttgccaaaaaattcgtgatggatcctaatcttcgtggatcagaatagtaacgtgcagttcaactgcggataaagtacaatgcagttctaatagtaacgaaaatatctacatacactgcaccgcacaatgcggttcgatcaccgttcggaaccttttttggaaacaactttcctactaagtggattcgaatcaaaattctcatctttcaaattaactattagaccaagaacctcttggtttatccaactatcatccttttttcattctgaattttacagaaaaaaatgtggtggctaagtaaacataggttgcatgtatgcatgacttactaatactattatcatggttccaatttttttattttatttcgactaatgtttttaagtgctttcatctttaaacaaaatctgagccttgtaattgaactcaattatatagttttggtaagaaattaactatgaaagatgatgtctagtcaaaggataccaagcttttaggagatgtattggaaaatgatctgagttttagttgagtttttatatgattttgatgattttaggaaagttgatacgaatttttataaaatcttttcaaatttcatctaaaaccgtataatttggatttctatatttttaactaaaatgtttttctcaaatcttctccaatctttcaaaattaataagaatcaaattgacaaaccgttttcaataacaataaatttttaaattattagtttaataacactaaattttattattaaaattattaaaatccataattagataacataaaatttgtaaattttacacaaatcacttaaaatactagattaaatacactcttcgtcaataaacaaatttagtaagcgggttatacggcgggtacactcaccaagagtttttaagaagattagtcagtggtaagagagtcttgatctctgattaaaaaaaaagagtgatttgattattattattttgaacacgacaaaacaaactaatgtggaaaaactgaaaaatataagagagaagaagggcaaatatgcaaaggtaacacaaatgcattgtgagccatacgtaagctcaaagatttttcacgttgctcttatctgccacgcggccaagattccaataaggcaagctacttgattgggataaactaaataacaaaataaactacttacaaaaacatcatgtaatttaaaataaataaataaaataaaaaaaagaaaaagaagaagatatattaaagaggtttgtgaagacgaaggagtccaaaacctccctcaggagcttccgccttattcagaggttaaacttctctcttccttgcaaatttacttcttcgttttctccgcttgtttgtgtctatgatcttgcctatgaaacatctttttatagtacacatatatgttgtcttattggaaatatgatcggctaacatatttgttattgttattaacaaaaaaaataacatttgttattgttcaccggagttgatagtagcaatagtacatattacatggtcatatatgcatatggctacatgtttgagttatattcgattatctggtgaaagatgagattgtgagtttgtaagtttttgacagtgtagaggaggatccaaaagaaaagaggaaaaaatg

SEQ ID NO: 13937 - DNA, 3000 bp, Unknown
  misc_feature (1)..( 3000): cDNA_ID_2705601_gDNA_ID_2214673_Annot_ID_136630 3000 nt of promoter + ATG
ttacaaagaatgtcatcacattaaagtaatttttttttattattttttaatattgttgatatatttttaactttataaaacattattattatttaaaattttaaaaaaaatatcatgagaccggacagatttggattgatatgaaatatttcgggacgggtttagactaatataacactggttaaatatttattttattattttatcattaccaatttttttagttacaacattaatataaaattatataactttaatactaaattaaaaactttaaaatttaatattattatatatatgaataaaacattaacccgtggtataatgatgttgggaatttaatgaaaaaaaacctcaactttggccagatccatttttaaaccctgaactatgtttttagtaaaacaaaccctgaactaaaacctgttaataaacttaaccccacagtaataaacttaaacctgttaataaacttaacattgatataattatggtaaaatagagaacaatgaattatgtttgacaagatcttccttttcaaattatttaatttaatctttgcatatttagacttgcagcaactgtcaacaagtcggacacaacaaacgttcatgcaagcgtaaagcagtgccaaaaccacccaagaaacctcaaggacgaccaaggaaaaaacagaaaacaatggatgaagagaaccctatcactcaaccaatacaatcttctcttcaaagttaatgcttgacaagtctttactttagaatatcttgtccctctgaaacgattgtttttttttgtgacaaatattgttgtgttgcaacagcttcgatagttatgttggttggatttatttaagcatgactctttggattattttaagttgttgtgtctttctttcagcttctaaaatccaaactaattaagcaattcaaaatcatttagaacactaaacgttttttttgtaataaattcaaaacagttttaaagaacatcatgtggtttttgcgctaaatacaaatgtctcgttgttgttttttttggaaattaatatcccattaatatttaatactgtggggttaagtttattaacaggttttagttcagggtttgttttactaaaaacatagtttagggtttaaaaatggatctggccaaagttgagggtttttttcattaaattcccaatgatgtttactaaactaactaaaacaagtaataacaaataaactttaatcactatcttctgatctcattgatgacacgtcactatcaatatcttctaattcttctttattatctcgaaggaattctggttgcttatatccggctctggtccaatcataagacatgcttgagcttcaggagaatctgggttcattcttgatcgagtttcatctagtatttgacctccaatgccaaaagctcgctcgctcttccatccatgaatgatttgaaagtattacctgcatctgcatcactaaactcaaaatttgtagataaataattttcaaagagcttttggactaacatagatatgccatgagttgtccataataaactgaaacatgtagtgaagaaccctaatcttgatcactttggatgcttcttcatcaaaaagaattagtgatccttgtaaactataaaataaaaatatcattaatacaatttacaaacttttatatatattacataattataaaattttaaaatccactaattttagaaaacatattatcctgtaatatatcgctgatcaattcctagttgtttataatttttggtgtgatcatatatattttcagttggtatatgtcaccatgcaacctaatttgtttctttcaaataattatattctaattcatatagttttatctttttgtggtctggaaattcaaaagtttaaccctaaccctaagtaaaatatctcatgcctacccttaaaaaaataaaaaataagcagcagtccataattccattatagagaaaaccaaaaccaaaaccacaatctcatcaaccaaatattattaatcgtccgataacccaatctctcttttctccaaacgcttttttttttctctcacttcaaaatctccccgagacctctcgccttctctcgcagccgacgatcccatccaaaaccaacgctctccggtgatcgtctttcctttacctcgccgaccttctccgtcttctcaattacgatctatcatcaccagaatccgttttctctcttttaactccgatacaaaacttccgataatcccaaataaacgttacgaatttcagactcttttttccagtttctgtttgaattcgatttcgaaggattagattctccggtgagatttttagaagcgtgtttgatttttcaaatcaaagtttgtcaaaactcttagcgtgaattttctccagagtttatcatctcttatgtgactgtgttttaatagcttcttctctatagctcttcctttgtgcttcttctctgggaaacttctctattcgtatacctaattctagggttcgtttatcctaacaattcgagatttagagggctttaggattcgatttcgtgttttaatcgtgtggatctgctttcaattcgtttatcgtttcgttccactgaattgagtttgttgattgcttagacttttatcctcgtcttgttgtttgctcaattgaagagcagagtagcttccgttagatctgctttgttgtggcattgatggagaggagaaatcaattcatgttacgtgctcctggaattctggaataatcttaattttcagttgaaacaatgctttgcttctcttattttcctgttaatcaataactaagtgtgaagtgtggtttttatcgaatttttttagtatcattttgatgcaggttattaactcattcgtcttcttctttttcttagttctactgagacgttagaagaattgtggctgttgtcgactgcaaggagagcgcttactttaattgctgatttcatgagacgagatg

SEQ ID NO: 13938 - DNA, 3000 bp, Unknown; identical to SEQ ID NO: 13936
  misc_feature (1)..( 3000): cDNA_ID_3020724_gDNA_ID_2214673_Annot_ID_189150 3000 nt of promoter + ATG

SEQ ID NO: 13939 - DNA, 3000 bp, Unknown
  misc_feature (1)..( 3000): cDNA_ID_2705609_gDNA_ID_2214673_Annot_ID_136632 3000 nt of promoter + ATG
aagagaaaaagctaaagacttttatggccgtccagattttttctggctttgcctgccaatagggattatcatctggcaactaccagctctttccggtgttggccagctcttgtctggcatcattcgactttcatagcgatgatatctggttttgctgtcggcacttctttgctgctttttgtttttttataaattagttttttttgaataaaagttgcggttaaacctcatcggatatgcgtagtagtggtggtgtttgtggcaattctccactcaaaagggtcttacctatccttgggtttacggtttatggaaaataattaggcgatttgcaatttagttgaagattcaatgcaatttctcaacttattactattgcttttagctgtttcgttttattaaagcttcgattgatttagttaacagaagtagaatagttggatatcttatctcttttacgttgttttgcgatgaatctcaaaaaaaaaaaaatgatgattcaagcaagtgattgagattaatggttccatattagatctttacttctgttttgtagttatcggagaattacagaagaatttatactcgattcattcgatgttagtttcaagctccggtggaatcgatggcttcaacggcgaaagaggatgacgaaaatcttttgtctcctcattttccacgcgttatcgatgtcgtgtcttgagatcttttatttcgatccaatctttttcttaagcgatgcaaatggttgggctcgtattgggccttattagtttcgtttttacaattaaacgagattaaatgtcggtttaaggttaaaccttaaagaatatgtacctaataaaaataaaatactaatattatctatgaaaaaaacgttaaagtgattattaaaataaaatttatgataatatattattagtgtttatatgtcggtttgagtttattaaaacgaggttacgatttaatgttacaattataaacaatttaatgttaataagcaaatgttagagtttagatttttacaattaaatgaggttaaatgttggtttctggtattaaggaataatttagattttccaattaaacaaggttatatgtcacatgactagggtttagattttacaattaaacaaagtaatatttcagattgagtttataaaggaggattaagctttagattttacaattaaccgagattatatatttatttaggtttaataaaaagtggttagtctttatattttacaattaaatatggttaaatgattgttttcgttttataaaagtgattttttttgtcaaacataaagagtgattaagtattatattttatctacatgtacatttgtggtagattttttggtcaaaaatcctaatactatttactaataacatacaagtcctcacaaatcctatctcaaccaaatattttattcctaagaacttacaattcgttagtttgcattacataatttaattaactatttcctttattacatattagtccctacaaaatctatctaaaaaagatttttgtctaaatttatatctttaattaaatcttatctttattaaactacattcaattaattactaatttctttaaatctgtttatctacattaaatacaaatatatgacttttctttcacttttatttgttcttatatctaatttcttaaattttataaaaagaaatatagttaataaaatattagattttttccagcatatgatgtaattaaaaaaatttaaaacagacttatattactcaatcgatgaagaaaaaaaaataagtgaaaaaggtcccacattgcttaagatattgcgaaaatggttcagactcttactataaaaagaaccaaaatgattttgaatatgaatgaactagaagcatgatttattaggcatccaaaattaaaagtattatccggcatactctgattctttattttagaaaaacttgaatctttaaaaaaggtcaaatttttattaatatttaaactttattaaaagttaaatattacaagttttaaaactttcaaaatttaaactttataaaacgtttaattatttataacttaaaacttttatgaagttaatattataaatatatatataaatatattaatacaagacggtatactacatgtgaaatcctagagataacaatcacaattataacgtttggatagaaattattttttttgaaatttcaaaaattacaaattatttaaaatttataaaaaaatgacaaaatgatgtataatttcacgggacggtgttatatagtggaacgagtttggatcgatattcatatgagatggcatactatgggtcaaatcctagaattaacaattaaaatataattttaaaaattaaacaaaactaacaatattaacaaaacaaatataacttaaaatttcaaaatttatagttataaaaatcatcccaaggtgtatcacacataaaaaaacaatagcatataactatagatcatcttaacaacaaaaattcaatcttttgataaaaatataggttgtggaccccaacatttcttttaaagggatcaattagcattaattgtggatgtcggattcagacactcaagtatttatttatttagtgggaaggattattcttgaggacaaatatactataaaatagataaatgattatagaaaaaactatgagtattgtaaaagaatgtgtatagctaatttacaccaagaaatgcgtgtgtctttacatggtcttagacccacaatttatacccaaagaatacatttaatacctatttactcacaatcattctactttaaatatatctgtttttagtctttgaattaactatttgaacgtttaaaccgagtccactccgagccttctggacctcagctctcgccccattcggtttctccaatttgagtaatcctgacttcgatgctgccttcatctcgcaaaccaacatctcgcccatactctcacctcgaggatg

SEQ ID NO: 13940 - DNA, 3000 bp, Unknown
  misc_feature (1)..( 3000): cDNA_ID_3020713_gDNA_ID_2214673_Annot_ID_189153 3000 nt of promoter + ATG
cgtttagtgttctaaatgattttgaattgcttaattagtttggattttagaagctgaaagaaagacacaacaacttaaaataatccaaagagtcatgcttaaataaatccaaccaacataactatcgaagctgttgcaacacaacaatatttgtcacaaaaaaaaacaatcgtttcagagggacaagatattctaaagtaaagacttgtcaagcattaactttgaagagaagattgtattggttgagtgatagggttctcttcatccattgttttctgttttttccttggtcgtccttgaggtttcttgggtggttttggcactgctttacgcttgcatgaacgtttgttgtgtccgacttgttgacagttgctgcaagtctaaatatgcaaagattaaattaaataatttgaaaaggaagatcttgtcaaacataattcattgttctctattttaccataattatatcaatgttaagtttattaacaggtttaagtttattactgtggggttaagtttattaacaggttttagttcagggtttgttttactaaaaacatagttcagggtttaaaaatggatctggccaaagttgaggttttttttcattaaattcccaacatcattataccacgggttaatgttttattcatatatataataatattaaattttaaagtttttaatttagtattaaagttatataattttatattaatgttgtaactaaaaaaattggtaatgataaaataataaaataaatatttaaccagtgttatattagtctaaacccgtcccgaaatatttcatatcaatccaaatctgtccggtctcatgatattttttttaaaattttaaataataataatgttttataaagttaaaaatatatcaacaatattaaaaaataataaaaaaaaattactttaatgtgatgacattctttgtaaattcttactttactaacacaaaagtactataaaaaggtacttcaaaaaatttaatatatataatgctattttttgtaaaacaactattatatataaatacgtagtttaatcataattctagattgatatacttgtgttttttactaactttattattatttcaatagcctaaatttgggcattttgttaatattatttgagtcagcaatattagcttaatacgtgcacagtttatttttgctagaaaaaaaaaattttaataaaaatcagaaaagaaagttttaggaagtgataattattttgtacaattgcaaatttaaaacagaaaatgtggattgggaaataattagggtttcaaatttttaaaatgttacgtaattaaaaatttttaataaaaatattgaagcatatattgtaatataagatttgattcattttattaactgaaaataaatatttaaaacaaaaattcagggtgattaatgttggtgtcggatcccgcaccatggattcggatccagccaaagattgcggcacaagtagaagaagcccataagagggagggcccataagcatcctcgaggtgagagtatgggcgagatgttggtttgcgaggtgaaggcagcatcgaagtcaggattactcgaattggagaaaccgaatgggccgagaggtgaggtccagaaggcccggagtggactcggtttaaacgttcaaatagttaattcaaagactaaaaacggatatatttaaagtataatgattgtgagtaaataggtattaaatgtattctttgggtataaattgtgggtcaaagaccatgtaaagacacacgcatttcttggtgcaaattagctatacacattcttttacaatactcatagttttctctatgatcatttatctattttctagtatatttgtcctcaagaataatcctacccactaaataaataaatacttgagtgtgtgaatccgacattcacattttgtcgccgtctgtggggacggatgattcttgagtcatcagcttttttctgtgtgttacatacccgaagtgatccgcaatgtcaggagaggatactaccaacgcttcgatagccgaaaccctcaagaccatgcaacaaactatggccgatatggcgcagaagttttcaaacgtggaaaaaactgtcgaaacactgcaaacaacccaggtatcgcttagccaaaatgttagtactatttagtctcgtgtccgttctttaaatacaggaaattctagagttcgaagaactatcttcggatccccaaattcccttccgcgaaatgcaaaaagtgatcaaacgaccccggagggtacaaacgcggagaatcaaccagaagacggagaaacgcatcccgaggacgatgaccagttcggtgatcaacacgagcaggaaaacttcgaccagctcgaaaccatgaaagaagtaagtcgagagttgaaagaaatgaggtcgaaattccaccaagctacaagctcggagccggatatcaaccgggttatcgaggaggctaggcgaacaccgttcaccctgcgaattgcgagtttgagaatcagagattctcgaaaactcaacttagaaccatataatggtttggaagatccgaaaggctatctcgcagcttttctaatagccgctggtcgagttgatctaaacgcaggatattaaaaacttttctctgaaaatctgtctgggcaagccctgatgtggttcacttagttggaactaggatcgatcagtaatttcaacgaactatcggcagtatttttaaaacaatactcaattctgatggataagagcatttcggataccgatctctggaatttgtctcaaaggccgaatgagacacttcgggctttcatcaccaaatttaaaacgtgctttcaaagctcccaaggatctcacaacagtcggctctgtcggctttgcgaaagggattattgcattatttgaggtttaaggaagatctaatacttcacaaacgtgatactattcaagacgcactatttcgagcgaataattgg

SEQ ID NO: 13941 - DNA, 1251 bp, Unknown
  misc_feature (1)..( 1251): cDNA_ID_2710687_gDNA_ID_2214675_Annot_ID_136634 3000 nt of promoter + ATG
aatgtagtattaatcactacaattttccatttgttcttttgtaaggaaaaacaaaaaaacaaaaaaaaaaaaaaaatcgaatttttaaaaaattattacctaaagtcgaaagtgtctagatgatcagtggttgttcaacaaattgaccttgacaattctccttttcattaaacattttcttacaaacgtactcaagttcttaaacaaaagtagtcctaaaaaaagatatacatccacttgtgtaagaatcaatacttttgttttcttcctcgtagttaagtaatttacatgtatttgcaaaatcgatccccaaagtttgatattactcacactttgtaaccaagaaacaacaatactaatgagacacacgagattattatgcactgggttctctgggtcccactgcttctgcttttgtcggcttgcgttttgtgggtggagaatatatgtcatgagaaacgtatcatctaaccgttagatcaacgacgtctacatatctttcaatacaccgcgtaacactgaaacaaaacctctcttccccactttcttcttcttcttctttctccatagtcatttctaagtccaaccatctgattcttcgacatgaccttttgttcttcttctcttttctctctctcttaaacccaatttgagattgttcgatttcgatctacgagattcttacaagaacataagcagcttcggttttttgggattatcttatttggtcggatgatgatcttctcgatgtctgtgctaggtaaattctttattttattttgtttttgaagttgtattaaattctttaatttagtattaaatgttgaatctttatgcgaatcttgttactgggtcgtctcttaactccgtagtaaatggaacaaatttgccgactttttatgtaatttggttataagattttagcaaatgctttaattttggggttttgtttgtttcaaagtaaagtacttgagtctaaagatcgttggtgaagcataggactaatcaattttgagtctttactaagattgtaattgatatagaaatttcccaaaagtggagacttttagtggttattctgcaacattttattcctaattgttgtttctgtggaatttagtgtgaattcactgtaatgatttggtttttgtttgttttgatttctccttcaggctttgggaattagatatatttggggttaagctcgagtctctccggttttgagtttacttgagtttgttagtatttatg

SEQ ID NO: 13942 - DNA, 3000 bp, Unknown
  misc_feature (1)..( 3000): cDNA_ID_1018268_gDNA_ID_2214675_Annot_ID_136636 3000 nt of promoter + ATG
tcaaacttttggtttcattcttcgctgctcacgttctttctccatttgatgttttatgtattaggagctactatagatgttcaagccctggatgccccgtcaagaaacacgtagagaggtcatctcatgacacaaagttgcttataacaacttacgagggaaaacacgaccacgatatgcctccaggaagagttgttactcataataacatgctggactcggaagttgatgataaagaaggagatgccaacaagactccacagagctcaactcttcaatccattacaaaagaccagcatgtcgaagatcacttaagaaagaaaacgaagactaatggctttgagaaaagtcttgatcaaggtccagttttggatgagaagctgaaggaggaaataaaagagagatcagatgcaaacaaagatcacgcagccaatcacgccaagccggaagcaaagtcagatgataaaaccactgtttgtcaagagaaggcagtaggaaccctggagagcgaggaacaaaaacccaagacagagcctgcccaaagctaagcattcagtgttgtaccgagtggtaatttatatggctgttttaacatagattagtacaggcgatatggttatagactgtacagttgttgttcaggcgggaccagatttagattagtgtttaatggaatagtatgctttaatacctttatgtaaccacttccatttggttcaaataagagttacaggaagagaaggtaacacaacaagagcccttctttgttgatggagcctgtgtaatagttgtagcatggggatgtatatgatttgattcaaccttattaatggttatgagacaaaactatctattacttccagttctgtcttttgcattacattcttggagacgtttattctttcacttccatgcacaagatgagaccaagattcggtccatccaaccaaggtacagagcaccatctctttcttcaatcgcatacccgttgctgtaatctctcaagagggctctaatggtggctgaaatgattgagctcaaggggtatggctcaaaacccgccatggaaaaccttgacttccatttcccgagaagctcgtgtctttcgatcctctcggctccttcacaagctatgatgttgacgacatcccttgccatgcagtgctgctcgatattgatcctttccttgtgatttctcggaagcataacatcgatagattcgaacattgccgtgtaataacttaatgtctcaaggaacctaggaaggaaaggggaagtgttcgtgttgcattcttgttccacaagagtgactactttaggtgatagactcttcaccatcctcagcaaccggtccctgtggttttccatgcttacactctcatctggcaaatgatgcagcatgtaagcaaagttcactccaagggcttcgccatctcggacatcaagattttccacttcaacttcacaacttggccttgaaaccgcattgaacctgaatggaacatcaaacttctttgcaagtttctctagtctcttcttgactgtaaccaagacagatccatcaccaactccggtaattcgaatatttggagccccaccaggcctagctgcaaaagcctggataagtgctatccactggctcccttgtccaatttggaagtcaataatgtgaatcctctcttcatccttcattgcttctgcaatcgcaccattcgctgacatgtatccaaacttgaaatatggacaaacctcatgcagaacatacacataagataaaaattcataactctctggttctctggactggagagacttatatatcgaactaccagaagcagcaagcctagcaacaagcccttctaacatataagctcccaatctctggattggctcaccagaaatcgaaaccataccgcgcaactcacccatacaccatcgtgccattagaagattattctcagaaacagcttttgcacaagcaacaagtaccaacttcaagtctccccttgatattgcctccactatcaataacaaatctttagcatcatcaggccacatggagagttcatggcagatagcatcatcgatactctcagctatctctggcagtggctgcaacattattgaacctcttacattgtccatcacaaataagcaagtaagaatctttgaacatcaaccattatcctcaaatgaccttttatttatctgatcttcataacaaacacctgtagaattcatagacaaagtcattaatcagagactgaattagatatcaatattgaacaataatatccatggagatcaaaactctaacaagaactctagtatcattgaaatcaactcatgactctatgaatctacgtcagccatgaactacttcatcaataaacaaggcatacaagagttccaatcctaaacaaactaatttgacaatttctcttcacactttagagtaaagcttgctagaaagagcaatcatttacaacaaaccaacatcaaacttatcaaagaagaaatgttttcatgttttgtggataagaagaagcagagcatcaaaatcatcaagaaaagagaataaaggtttgatttttatgagaaaaacaaaccttgtgtaggttaagaagtgatctttcggtggaagtcgataagggatttggttttgcaagtgagagatccaaccaaagctcgcagctgaagcaaaaggaagaatctttttagttgctgtagtgaagaaaataacacatcacatacgacgtcgttttaggcttaaaccgaataagacccgatcaccgacttgacacatctcgcttaaagtctctggtcaaatgggaaatagtgtaagaagcaatctaagagacatcagaggacgacgatcgatggatcctcggatgtggcacaaagtcgccgctatttccggtgagatttaagataaagtaatgatcttttgattttgatcttgtgaggaaaggtactgattcggatagaattggtttaggt

SEQ ID NO: 13943 - DNA, 3000 bp, Unknown
  misc_feature (1)..( 3000): cDNA_ID_2705634_gDNA_ID_2214675_Annot_ID_136641 3000 nt of promoter + ATG
ctgtaagatcgccgcggagattgaaaccggatcggagaagagaagagagtgagcgtctagagaggtagatcatgattcgcaactttgtagaaacgtcggaagtttttttttttaccgatcaattcgccggcggctataaataatgatgagcaaaacggtcgctttgtttcccctgtgggagccgaagttttacaatttggaagttctaaagtgcaatttcgtaattacgtgaatatgttaggcaatgtttacaattaaattttgtagttacaaactatcttaggcaatttgaaagttatcggaaaaatggtcaaaatcaacataaaatgtgaaggctcacctcttatgccactattcgaaaataaaaaattagtagtaccactcttatgtttgagttccagtcaagaatgcacctgaaccagaaatttgaatttggagtgccattttttaatctgtatgctattctatatgtgttattcttatttcaccattaatgaatgactttttatttaattttaaaaaataaaataaaaaaataagaaaaacataaatattctgtatatggaccctacaaaaacgctggatttaatttagtggttatatttactcaacatgtgaaccccactaaaaaatattttgtctttttgcggcagaaaatactcatagttgtactgttgtaccatcgtgttcatagttgaacttttcacagttttcataatttacagttgaactagacggtaaataattaattataagttgaactcacactttgtctctattattttgcatttccaaagttttcataatattacatcggtaaaagcttagttttcacctattttacttcatataaggtgatcatatactaaatgttccttgtattagaaggggtgtattatatgaaaacaacattgttttttagaaaatattaaattttattgcattgatataaaattatttatttatagctttagatattcgtatataattttacgtgtataataaattatcaatttaaaaaatttaaacattttagcgttactaaatcgaactagttgaactaattatattaaatgttactacgaaaaccaaagaatagacatttgaactagttcaactaattaaattaaaaattatcacggaaacaaatacatacatgtttttaatctaatccaataagttgaaccaagttaaactagttgaattgttcatataaatccgagaaatataaattcaaaacacacaaattaatttttgaataattcactctaatgcccttttctcaatgcccttttgcaactctacccttttttgccattttcatttctaccctttctaatacttttctccccaaattacccttaatgagctacccacagacctaattcatttcttcactctctctcttcttcttccatcggaaattgtgaatgtcgttgaatcccatgccgtcggaaatagtgagtttactcgccgtgaaaacccatcttcgccgtcgtaagtagagctgtgtgtcgccgtcgaatctcttacgtttcccaggtttgattttataatgttagcttaaatcttcgttttcgaattggtttattcgatttttgttgttgattatgtgaattcgttatttgaatcctgattcaatcgacagtttgacatttgcttcagcttcgaatttgaattttgtttgagatttgatgattgaatttgtttctaaaatccttgtacattcgttatactgttctaaaatccttttgaattcgttatactgtttcgtgatagatttgcttatgtgaattcgttatactatttcgtaatagattttgattctgatttagtgtttacctcttttgcatatgctttcgtgatagatctatgccacttacgctttaaaacgatttgtaaaccatgttaaccacttttcaaagcttttaaaatcccttgtaaattattctatgctacttacttacgctttaaaacgatttgtaaaccatgttaaccacttttcaaagcttttaaaatcccttgtaaattattctatgctacttacttactctttaaaacgatttgtaaaccatgttaaccacttttcaaagcttttaaaatcccttgtaaattattctatgctacttacttactctttaaaacgatttgtaaacctttcttctctttgtagtgacagtgtttttgtggctgttgattttgttgttatttatcttatcaggttataatgctagaattgtattctgtttgtgccttgtggaagttgacaaacaatatgacttgggaatttgaattagacattgaattaggagcttctttagtgctcattgatgagcacattacctatcacgcgttggttgatattcttgtagaggattttcaaatagatagttcaaccaattctttgaagcttagttacaagttagtctccacgtctacaaccatacaatctcatcctctttatattaggaacgatagactgcttgcaacttttatgcacaaattctcacagagtggaggattgcttcagttatgtttgactgtagagcaaatttctgtgacagttgagcaggtttttcaataaccttcttgtgttataattttaaaaatccttgtaaaatcattattaagtcagtgattgtgcttattacaggctgagcctacttcaaatccttttgtttctcattctatccctaatgctcaggtactaatcgttttaaaaatccttgtaaaatcattattaacgtttttaaaccccttttaaaaatccttgtaaaatcattattaacgtttttaaaccccttttaaaaatccttgtaaaatcattattaagtcagtgattgagtttattacaggctgagacgacttcatatccttttgcttctcattctgcatctactactcaggtaataatccttttaaaaaatcttgtaaaatcattattaacgtttttaaaccccttttaaaaatccttgtaaaatcattatttaagaaagattg

SEQ ID NO: 13944 - DNA, 3000 bp, Unknown
  misc_feature (1)..( 3000): cDNA_ID_2710675_gDNA_ID_2214675_Annot_ID_136643 3000 nt of promoter + ATG
gttttgttgttgtaggccactatcaatcgcgggaaatattgtagatacaaagtggtttacaaccctagagacgccagggaaagcaataacaacaacggtatgtccaaaaatccttgtaaaattggtaacccatgaattacatatagtttttaaagcatcattaagttatttacgaaagggattttaaaaagggttacatggtttataaacaattttaaaagattagaaagtggtaaagaatgatttacaaggtattttaaaaaggatttacatgacttgcaatcgtttttaacggattagaatgatttacaagggattttaaaagctattaaaaagggtttaattgattaacaatcgttttagaagcagaacttagtggcatagaatgatttacaagggattttaaaagcttttaaaagtgtttaacttgatttacaatcgttaaaaagcataagtatgtggcgtagaatgatttacaaggtattttaaaaagggtttgcattttttacaatcgtttttaaaggggttttctaatatgataatttttatttttgttgtgtttagcatgttgatgcagctttggagttgatgaaaacgaggaaggaaagcaatccagaattattcaaaaacaaatcagttgtatttgttggatcgtctttcttaaatgtgattgatgagtcatacatggagtttttggataacaaagagggatttcagtttcagtctgaagaaatcagtaagctgataatagaggaagaaaccaagtgcatattggctcctttctgtatcaaaggaaaatgctgggttgccttgctcatccacttagaacagaagacagtttgtatatgggaatgtgcagcttcttatttaacagaagaagtcaagaaaaaatataattgttgcctactctatagttatgccatacattgtttggaacatcctcaaaaaaaaagacatggatgtctctccatttagcatcaaagtcctgaccacttttcatatatcatagtcttagaaatgaatattccgtaagtcctgacttctataacttctttgcttaagtaattcttttggtttttggttgtaggctcctagaaatgaagagtctggtatctatatgctgaagtttatggaatgctactcaatgtataccagccattcaaaccttgaagggaacataattcaaaacgttaggaataaattggctgctgacatcttcaccgaattagggtcagtcactttgtagaagtagcagacttctaatcaaaaagtagtggagtataagatagatttatcagcttttgtttctgatttcataaaactttgtcatttgaatatttcatgaacatctgtatggaacaagatttatgaagtttatttagttcaactcctgttttacaaaattactgtataatggttgtttgggttaacaggtgctttgatttgaatggaaaaggactttaaacatgcttttaaacagggtttttaaacgatttacaagctgctttataaggattttaaaagtgttgaaaaagctgcagtagcggttattatgaaaaaaatttacaatcgtttttaaaatgatttacaaccgtttttaaaagagatttacaaacgatttataagctgttttaaaagcgttttaaaagtgttgaaaaagctgcagtaactgttattatgaaaagatttacaaccgtttttaaaatgatttacaaccgtttttaaaagaaaatttcaaccgttgaaaaagttacagtaatgttaaacactgtatttgttactagttgggcctaggcctgttatttagaaaaacaaactgttttagtttaaaaaaaactaaaagccccaaaaacactaaagcccaaaaattcactataacctaaaaacaaattaaacagggattggctgctgacatcttcaccgaattagggtcagtcactttgaaaagatctacaaccgtttttaaaatgatttacaaccgtttttaaaagagaatatcaaccgttgaaaaagttacagtaatgttaaacactgtatctattactaattgggcctaggcctgttatttagaaaaacaaactgttttagtaaaaaaacactaaaagcccaaaaaacactaaagcccaaaaattcactataacccaaaaacaaaaaaggaagggaaccgtgaaaagacaacaaaaacgtaaccaagaaaaaaaaatataaaaaaatacaaactgtcgtcttcgtcttcttcctttcaacaatctgaagaaaatctgattatccagcaaaaaggaagcaattgaaggtaactaatttacgaaactgaagtttaacatttgggtttattcgatttttgccgaatctcttttttgttctagcatttctaggtttttcggttgaaaacgaaacaagtaaaatagattgatatttgggattttgaaggagtgttggaagttgttatataattttgatagatttatgttttaaagtttgatgtttgggtttcaaaaaccttcaaagaagatttcaaatgccgattaacttctctgttgtagcaatttcaaagttttttcgtttggaaacttcaacagtaaatagattgatgtttgggtttgtgttttaatttatagatcctcacttaatttatgggttaccagttgattggagttggtttggaaaaggtttttttttttctattttcagcggctatgttctttgaaaaggattaaaattttgtttttggaatggtttcaaaacggtctttaaaaaggattatggagtaatgactgtgttttacaagggtttttaaagtcttaaaacgacttgtaatgactttgaaaaatggttttacaagggtttttaaagttctttaaacgacttgtaatgactatgtttatgtttcaaaaactacaaatgcataatagattttcaaaaatggtttttaaaaccatttcaaaactgtgttaatttaatgactgtgttaatgtatttaatcaggttttgagaaatatg

SEQ ID NO: 13945 - DNA, 3000 bp, Unknown
  misc_feature (1)..( 3000): cDNA_ID_1808156_gDNA_ID_2214675_Annot_ID_189190 3000 nt of promoter + ATG
ctttactttgttttttgaattcattgttactttgattcttcgattagctttagtttacggctttgtgttgctttgcttgctttgtgttgcttttgattcttcgattagctttagtttacggctttgtgttgctttggttgctttgtgttgcttttgattcttcgattagctttagtttacggctttgtgttccttatattgctttgtgttgctttgtgttgcttttgattcttcgcttagctatagtttacggctttgttttgcttatattgatttgtgttgctttgattattctattagctttagttgtgttgctttgattataggtcttttgtgtgttttgatgcagaaagctaggatctagatttggctatttgagcatatagatttaaggattgaaagaagaatcactgtaagtcatcatcatatattcttttgatctacacgttttttgctatgaatttgttgacattgaactttgtgtttactttgtgtctttcgtttatgaattgtttagtgtgttattgttttaaggagtttaactggtgatgatatgtaactgttaagtgaatgagtttaagaagctttgtctactatctttattgtcaatgatagtttgatttaagaagctctctgttatcctgtgacctctacttttggctggtctctaagcttggtttgtcataattgttaaaatggaaaacagtttaagaaacacgtgagtattggttggtctctaagcttggtttatcataatgattgtgtcttttgtcaaaagtctttaacatgagtttgctttagtgttttggtttagtaatggtatagagtaatagtaatggtattgagtaatggtatagactatagagtaaaggaaatcgatgaagtttgtttgtttctttcctgacattagctttgaaattggagttaagacgctatttagtaaatgagaaatcgagttttggagttaagattcattgaggttaagtaatagccaatatggatggttacttgatatattttggtaagaccatactctggtttctgtttcatattttgtgtcatgattgaatcacttttgagaatgtgtcatggttgaatcgttaggtagtactagccaatatgcatgcttgctcttattggagaattggtgatgattcatagaggaacattacttactgacattagcacaatttaagatctaacaaagtatcttttttgcttcataatctaatgccaatgtgtttttttctttacaggtttagtaatctgaaattgaagtttgaaaatgggaatgatcaacaacgaaaaaatttgaagatcaaagccaaactctctttttcaaactctactttgattaatatgagaatgtagctatagattatttgttacttaacataaggcattttagtcatttatatattgatgagaatgtgaattatccatccaaatgatcaaacaaacaaagctccatctaaatgatgcatttagatgaactagcaaatgatcaaacaaacatcattaagatgaatcatccaaatggattatttggatggatcatttggatacaaattccaaatgatcaaacaaacatgacctaataataataattttaataaatgtttgttgcaattgtgttttatttgttacaatcttttaaacaatctttttaaactaaaatatatatatttgtcgtttgtcattttcagaaaactgcaatctgaataaaaaatttctacggtttttttttttattgtatcacctcataatcattcgcaagttgcaactatttagttgaactattgcaatatttagtttattataaattattgcaatttttgttttgtttaatgagtcgttgtaatttttaatttatttgatgaaccattacaatttttgatatatttaatatatacgatcgcacctcttggtataatttttcatatatatttttaaaattttaattacttaaaattaaaattaaaaaaaactattacaaccgtttaattgaaccattgcaatatttagtttatttgacgaaccattaaaattattggtttattttatgaactcttgtaatattttatatataaatagtagcgatctgactaaatgacttatacgtttgggtttctcaattttgtaactgtgtttgcattgtaatggctcatgacctaagcctaatttgggaggcccatatatataaaaactctgtaagaaacaaggttcgaatttgtagcaaatgtaatctttctctaccattatgtgactcttgtaagagccatagccaaggaaaattacttaagttaggtaatgttctgtgaaatatatttttcctcctctgtaaataaagtgtgtttttctatttacttgcagtttgacttcttgatctggtaagtgttggcttttaatatatgatttagtgtgacatagcgaatcatgcaagaaataatatgtagtgaagaaacaaagcatctctaatagcaactaagaatcatagacctctggatcctccagtacatatcatcgtatagtttaatttaaaccaatccataatacatgcatttttgttttgtaattaaagttttaaaacccacggtttgaaattttatgttcaaaccggtctggtcgagtagtcatcacggtttaagataaaagataaagaaacgcaatcgaagataggattattgatatatcatcacaaagaatagccaaaaaacaatccaataaaataagtgttaaacactatcctctcactgaagcacaagatcttccattgccagatggcaccaccacaaccattaccaatctcctcataggaccaatgaaatctaaactaaactctttcaacgaatcagaaccctctgacgtgtacatttgataatcccctaacatgaaaatcactctgttataaaacccaattggtttcaccatcccatcataactcacactctctcttcaatcctttcctttcattgtagttaaacaaagattacgattatg

SEQ ID NO: 13946 - DNA, 3000 bp, Unknown
  misc_feature (1)..( 3000): cDNA_ID_3020759_gDNA_ID_2214675_Annot_ID_189188 3000 nt of promoter + ATG
gaaaagggagaattacgatggtcactacaagacttaacaaaaatataacgtaaattcaacataataactaaaagataagcactctttcaattattatgatcataaaatgacgccaactcacatatgtacatatgtcaccttcttctaactctcactataattcattgtttactagataaattttctttttctttttttgtttccttgtaaggagtaaaagtatattaaagttttcttacaatccatgaatgtaagaataatgctaaataaaacagtatttcatcttaaacattccactcaaaaccatgcataattaagaccaaaattcgatggatactgaatattgaatatgcatacgtttttcttattaaattggtactgaatattgaatattgaatatgcatatgtatatttaaatgttgatatacaatagaaaccttgtgttttatttatacgtttactgaatattgaatatagttaggaaaaatttggactaacgatacagaaaagaaacgcaaaacatattgggagacagttatcttattaagttattattccgtctgacccaaacaaaactataagaaaaattaacatcatctgatagcttctttacttgattagggagatgtggattagagttttttttttttgaaaacactttatattagatttaactatgaaaataattttcagaagcaatgtgagatgtgaccgtgagattcccgaatgataccatgatggccaacggttttataagtaccataaattgagaacataatacaaacactaaaaacgaatacacacagttgatccatttcctactttttagtctctagacaccaaatatacttactttaacatgtacatgcttcctccacattcagctaaatgtggtttagatgtcttgatagttcgacaagatgctttcatatgtatggcggaagttagaggctttgttcaggttctcaatccttatatcatggtgttggatgctatgcaaattgatcgtatgcaacttttatttgactattagaatctaaaatggtagttctcccttgcaaaaaaaaaaatcattagattctgataagcaagaaaacccaatccctcatcaaaacatgatatagattcataagaagaattttattgtccattttaacttaacattggcgtcggtgttttgctttctcgtccatcaacgaaaaaacaaaaaagagaattatatttgttttgacttcacatctaacatcactggtttatatatgtgtaattatcttcagctcggacaaaaaaatatctaagactagatgacacatatcaaaaagaaaaaatataattaaattgaataaatatagaaaatagtttattttaattttagaggaatgacacatatcgaaataatagagcgccacttgtcatttcttaaagcatgagtttgagaaaaccttactttattatattagactagatgaatacccacactacgcgtgggtttgtttcaaaaattgttaagaacaaattatgttgattgttcttgttgctaatttttgtttacttttttatatgttattgtttagttaataaagttaatcttatgtagttacaatttgtctgattggatttttttacttaaaatatcgatttatacatttatatatatatatatatataattatttatatttctaagatcctaatattttttcactatcatgaatacatacatcgataatataagatttttttatacaattatatgtaattatgttatttgtgtgatgtgaaactcgcctaacatgattataaatataatttcttgttttgtgtactctcctgatctagtacttccatcacatcgtgatagactcattattatatacaggatagacatatattgaataagatctcaagagttttcatatgaaaataagaaaaagaaagcaaaaactaaaatgtcatttaagtcaacatttttatatcgtctactattgcatatagtcatataagagaaaagtcgtgtcttgaattctttggtatgtccaacgtctcaaaggttcatcacttgaaaaaattacagaacttaccaatattaccaacttaccataagacacaaaataaaaaagatagaaagtcatatgttgagtcatatatgaacaacaaaacataataaggagaaagactcaaagtaaaattactaaactaataagtatttatacggtagcaaacaactaaattacaacaataataaaatggttactattgataaaaactttttagtaaaaataagaagaatataaagaaagtagtgctttttattaacataattttgtattttttaaaaaacattttgattaaatcacttaagagaataaccgatggaaaatttaatgttataaagaacttttattttttctcatttaatttggctaatttttaatttaaataatgtagaatgacatatgttatttttttgtataatgatatgacactcatatagagaaaattggccttcgatatatatgatatgatgtttcaaaataagtaagtatatatctatgtacatttaatttgtctcttacttttcaaattttagtaaagatatgatgtaattgctacattcaactaaagatataggcatcatcgtactaaattgttgttactcgtccaaaaaaaaaagggaatgttacactattaggcacttttagaaaatctttttacgtttgaggcactttctaagattcaggcacttttccttgtttctggaagataaaaggacaattatatcctttcaaaattaaaacataaattgcttaaccagttcaattggttttgttttctgtgttatctaataaaacacacgtgtaatacatgttctttctatttcgtgccggttgagatctcgacatgagaaagggagtaatctcacaattacagcaaataaatggatattttttaaaaataaataatatatagtgtcgctcttcatctctaaaaccaaattctt

SEQ ID NO: 13947 - DNA, 3000 bp, Unknown
  misc_feature (1)..( 3000): cDNA_ID_1018268_gDNA_ID_2214675_Annot_ID_189169 3000 nt of promoter + ATG
attgagctgagtccagtggagaggtcaaccaatgattcacgcattgtggttcacactcagactctgtttgatattgtgaatgatgggtaccgatggcgtaaatatggtcagaaatcagtaaaaggcagcccatatccaaggtagtgactgcttacatgtttgaaatataatgtcaaacttttggtttcattcttcgctgctcacgttctttctccatttgatgttttatgtattaggagctactatagatgttcaagccctggatgccccgtcaagaaacacgtagagaggtcatctcatgacacaaagttgcttataacaacttacgagggaaaacacgaccacgatatgcctccaggaagagttgttactcataataacatgctggactcggaagttgatgataaagaaggagatgccaacaagactccacagagctcaactcttcaatccattacaaaagaccagcatgtcgaagatcacttaagaaagaaaacgaagactaatggctttgagaaaagtcttgatcaaggtccagttttggatgagaagctgaaggaggaaataaaagagagatcagatgcaaacaaagatcacgcagccaatcacgccaagccggaagcaaagtcagatgataaaaccactgtttgtcaagagaaggcagtaggaaccctggagagcgaggaacaaaaacccaagacagagcctgcccaaagctaagcattcagtgttgtaccgagtggtaatttatatggctgttttaacatagattagtacaggcgatatggttatagactgtacagttgttgttcaggcgggaccagatttagattagtgtttaatggaatagtatgctttaatacctttatgtaaccacttccatttggttcaaataagagttacaggaagagaaggtaacacaacaagagcccttctttgttgatggagcctgtgtaatagttgtagcatggggatgtatatgatttgattcaaccttattaatggttatgagacaaaactatctattacttccagttctgtcttttgcattacattcttggagacgtttattctttcacttccatgcacaagatgagaccaagattcggtccatccaaccaaggtacagagcaccatctctttcttcaatcgcatacccgttgctgtaatctctcaagagggctctaatggtggctgaaatgattgagctcaaggggtatggctcaaaacccgccatggaaaaccttgacttccatttcccgagaagctcgtgtctttcgatcctctcggctccttcacaagctatgatgttgacgacatcccttgccatgcagtgctgctcgatattgatcctttccttgtgatttctcggaagcataacatcgatagattcgaacattgccgtgtaataacttaatgtctcaaggaacctaggaaggaaaggggaagtgttcgtgttgcattcttgttccacaagagtgactactttaggtgatagactcttcaccatcctcagcaaccggtccctgtggttttccatgcttacactctcatctggcaaatgatgcagcatgtaagcaaagttcactccaagggcttcgccatctcggacatcaagattttccacttcaacttcacaacttggccttgaaaccgcattgaacctgaatggaacatcaaacttctttgcaagtttctctagtctcttcttgactgtaaccaagacagatccatcaccaactccggtaattcgaatatttggagccccaccaggcctagctgcaaaagcctggataagtgctatccactggctcccttgtccaatttggaagtcaataatgtgaatcctctcttcatccttcattgcttctgcaatcgcaccattcgctgacatgtatccaaacttgaaatatggacaaacctcatgcagaacatacacataagataaaaattcataactctctggttctctggactggagagacttatatatcgaactaccagaagcagcaagcctagcaacaagcccttctaacatataagctcccaatctctggattggctcaccagaaatcgaaaccataccgcgcaactcacccatacaccatcgtgccattagaagattattctcagaaacagcttttgcacaagcaacaagtaccaacttcaagtctccccttgatattgcctccactatcaataacaaatctttagcatcatcaggccacatggagagttcatggcagatagcatcatcgatactctcagctatctctggcagtggctgcaacattattgaacctcttacattgtccatcacaaataagcaagtaagaatctttgaacatcaaccattatcctcaaatgaccttttatttatctgatcttcataacaaacacctgtagaattcatagacaaagtcattaatcagagactgaattagatatcaatattgaacaataatatccatggagatcaaaactctaacaagaactctagtatcattgaaatcaactcatgactctatgaatctacgtcagccatgaactacttcatcaataaacaaggcatacaagagttccaatcctaaacaaactaatttgacaatttctcttcacactttagagtaaagcttgctagaaagagcaatcatttacaacaaaccaacatcaaacttatcaaagaagaaatgttttcatgttttgtggataagaagaagcagagcatcaaaatcatcaagaaaagagaataaaggtttgatttttatgagaaaaacaaaccttgtgtaggttaagaagtgatctttcggtggaagtcgataagggatttggttttgcaagtgagagatccaaccaaagctcgcagctgaagcaaaaggaagaatctttttagttgctgtagtgaagaaaataacacatcacatacgacgtcgttttaggcttaaaccgaataagacccgatcaccgacttgacacatctcgcttaaagtctctggtcaa

SEQ ID NO: 13948 - DNA, 3000 bp, Unknown; identical to SEQ ID NO: 13945
  misc_feature (1)..( 3000): cDNA_ID_1808156_gDNA_ID_2214675_Annot_ID_136651 3000 nt of promoter + ATG

SEQ ID NO: 13949 - DNA, 780 bp, Unknown
  misc_feature (1)..( 780): cDNA_ID_2994313_gDNA_ID_2214676_Annot_ID_136653 3000 nt of promoter + ATG
aataatatgcaagaaacgtacatgtgtgattgtgtggttactgttttttgagaattcaaaaaaaaaaaaaaaatcatcttaaacaatcgaacttgattaattcataagccaacaaaattggaaaaaaatattttagtttattttaagtgttataaaaaatttgataattattttagttattatatttgaaaataggtaaaataggttcttaatatgtaacatgtacatttttgcatatttctaattcggtgtcatccatacaaaaaacaaatggcaaaaatcagaatggatagagaattaatccgctaaaatgtaaatgttaggcccaaattcggcccattacacaaaaatctcagagggttaaatacatcaccttctcgacgctaattcctccactacgtctctctctcttgctctccctcttcaagtcggctcctttattgctacaggtttgttgcttcttcgattcaattcttctttcgcctccaattagggtttgtttcgacctcaaattatgcaactttgggattatgtgattagaatttaaatttcggtgtttgtgaatctaaatctagttgattagcattcttattgttgttcatacgttttaacccaatggttcgtcttttagatcttctgttgtcatgatctggttttatgaaatagaaagtttcgtttttgatgaatcgttggtgggtttttccttacttgatctgatctgatctgatctgatctctctgctttatatcagtgaaaaagtttcgagctttagaaacaatg

SEQ ID NO: 13950 - DNA, 3000 bp, Unknown
  misc_feature (1)..( 3000): cDNA_ID_2705655_gDNA_ID_2214676_Annot_ID_189204 3000 nt of promoter + ATG
atctctatcgaaagaggcgaagagatcctcgatactttcgaggagtcggaggtgaaatggagttatgttcaatcggagaacgagaaaggagataaagtgaaacgttactacgagctcacattcgagaagaagcttagagacaaagtcttgaactcttatttaacccacgttgtagccgaatccgaggagatcaagaggaatctgagagtggtgaagctttatagcagagatgtgtatgctagtgatgatgatgatggaatggctggtgggaattggggatgtatcaatctcgagcatccgtctacgttcgatacgttggcgatggatccgaatgcgaagaagaagatcatcgatgatttggagaggtttttgaagaggaaggagttttacaaaagagttggtaaagcttggaaacgaggttacttgttgtatgggccaccaggaactggtaaatctagtttgattgctgcgatggcgaattatcttaagtttgatgtgtttgatcttgagcttagtagtatttatgacaatggtgagttgaagagggttttgttatctacgacgaatcgttcgattttggttattgaggatattgattgtaatgctgaagtgagagatagggaagctgagaatcaagaagatgaacaaattaagggaaaggtgagatatcttttggatttgagtttgagagaatctattggtttttagttctgattatgatattgtctttgagcaggtgactctatcagggattctgaatttcattgatggtttatggtcgagtttcggagatgagagaatcattgtgttcacgacgaatcacaaagaacggcttgatcctgctctgctacgtcctggaagaatggatgtgcatatcaacatgtcttattgtacaggtttaggatttaggacattggtctctaactaccttggtttagatggcttaaaccatcctctttgcgaggaaatcgaggcgctggtcgattctactgaagttactccagctgagttagctgaagagctgatgcaagacgatgatactgacgttgttcttcgtggagtaataagctttgttgagaagaggaaggttgagagaagcaagactaagaaggaggtttctatttgtaaagcaactgatgatgacgaaaaacagaatggttctttgggttgtgtaaagaagaagaagaaagggggtaaacagaaaggtaaagggaaaggtaaaggaaaggccaaaacttatttgatataagagataactttgaacaatatgatctgttgtgttgtgttgtgtaacatggtaaatcaaacctgtgttcaacattatgccaaataaataaagctttgtatggttctaaacattctacttttgactgaagcttccgagaaaatagattttacgtctctggaactatttttaccaaaattatctcaaattagtctttttttttttggcatactaaacagtctcgactttaataaagaaaccaaaccaaacaaaacataaggaagaaacagaggtgcataaagaatggatgtgcatatcaactcaatctattaaagcttgtaggatcaacgtttttaatttcgggtgggttaggagtagtgatctcttaatcacgaattcaaatacctaatcgggtttaccattcaaagtagacaatcttaaccgttcaacaatattggtatctctacttcattttggtatctaaatatgagcatattccatctcaaaaagaattataatcacaataaaatatttcaaaaaacacttataatcacaaaaagaattacaccacttttactattttacatttttgttactactttacttatatttaaattacatacacatttactaattaatatacatatttaaacacattaaaacatattattataatcactaaataacgaccaaccaataaaaatcccaatcagtatttataaaattttaaaataaaagaaatattttataaatttacaatataaaatataatcaaatacttaattaaaaaccatataaaaccgaagcccgcgataaaccgtgggttaaatcctagtatattagtaaaagcccaacaattttcttattattactctaacacatccacattctcataaggccacatccttcttatataacaaacacaaacttgcacctcaagtttctccaatcacacataagacatatttctaaattctatattgtcaatttgcttttctcttcaagcaaatttcccttttgcttatatgattctttttgtcttcaaacaaagataatttttcctttttcttgacttaacagactctcctaaatccaagtaatcatcatccttccttccagaatcttcagaattcatgtactactaacgactagtacagaattactgaaaaattgcatcttcagttgtttctcgctaacctcttcatagttcttttttttttgcttatttttaatactttctatttatttattttcattttaatacaaatggcaaaaaaacgttttaagatctttctactcaaaatttggatcattttaggtttcttatacatttgagtgttaatcgaattatttttgtttacatatatcaaattaggaaactctcagtattttatatttaaagattataaacgcttggattcttggttatgttttgtgcttgaacgaacaacacaccctaatgacatcaccgccttactaattgacgtttccttgtgacgcaagctccttcctccgcaagtctcttactgtttgttcacttgtttgcttccctagaaaatacttttgttattttcctattggtctactttaagaaaaaaaaaaataataataacttaaaaggaaaaataaagataaaattaaagaatagtattttttcatttgagtctatatatgaagttataaaaccccaattttaactcatcccatcacttctaaccctagctaggtcaaaggaaattccgcaagataattgtggatttcgattaacagagatg

SEQ ID NO: 13951 - DNA, 780 bp, Unknown; identical to SEQ ID NO: 13949
  misc_feature (1)..( 780): cDNA_ID_3020832_gDNA_ID_2214676_Annot_ID_189196 3000 nt of promoter + ATG

SEQ ID NO: 13952 - DNA, 3000 bp, Unknown
  misc_feature (1)..( 3000): cDNA_ID_2705651_gDNA_ID_2214676_Annot_ID_136660 3000 nt of promoter + ATG
cacataagacatatttctaaattctatattgtcaatttgcttttctcttcaagcaaatttcccttttgcttatatgattctttttgtcttcaaacaaagataatttttcctttttcttgacttaacagactctcctaaatccaagtaatcatcatccttccttccagaatcttcagaattcatgtactactaacgactagtacagaattactgaaaaattgcatcttcagttgtttctcgctaacctcttcatagttcttttttttttgcttatttttaatactttctatttatttattttcattttaatacaaatggcaaaaaaacgttttaagatctttctactcaaaatttggatcattttaggtttcttatacatttgagtgttaatcgaattatttttgtttacatatatcaaattaggaaactctcagtattttatatttaaagattataaacgcttggattcttggttatgttttgtgcttgaacgaacaacacaccctaatgacatcaccgccttactaattgacgtttccttgtgacgcaagctccttcctccgcaagtctcttactgtttgttcacttgtttgcttccctagaaaatacttttgttattttcctattggtctactttaagaaaaaaaaaaataataataacttaaaaggaaaaataaagataaaattaaagaatagtattttttcatttgagtctatatatgaagttataaaaccccaattttaactcatcccatcacttctaaccctagctaggtcaaaggaaattccgcaagataattgtggatttcgattaacagagatgtttccttcaatatccaatatctctttatcaccatcgtcgctgtttacagcgtacgcgtccttaaccggattcttgatgctctttagatcactgttcaatgatgaagtaccggagaggctccgatcatacatcaccgacttactcaaccggtttttcactccgaaatcaaagaatttgactatggttatcgacgagatcatcggatttaagaggaaccaagtgttcgacgcggcagaggtgtacctccggaacaaaatcggacccgagacagcccgtttacgagtaggtaaactccctaagcagaagcacttcacaatctatatcgagaaaggagaagagatcttggatactttcgagaatagcgagctgagatggacttatgttgaatcagagaacgaggcaagccaaaaagagaaacgttactacgagctcacgttcgagaagaagcttagagataaagtcatgaactcttatttgagccacgttgtagctgaatctgaggagactaagagggatctgagagcggtgaagctttatagccgagatgtgcgtgcgagcaaagatgatgacggaatggctggtgccggttggggatgtatcaatcttgagcatccatcgacattcgaaacattggcaatggacccgggtgcgaagaagaagataatcgatgatatggagaggtttttgaagagaagagagttttacaaaagagttggtaaagcttggaaacgaggttacttgttgtatgggccaccaggaactggtaaatctagtttgattgctgccatggcgaattatcttaagtttgatgtgtttgatcttgagcttagtagtatttatgaaaatgctcaactaaagagcatcttgttatcaaccacgaaccgttcgattttggttattgaggatatcgattgtagtagtgccgaggtggtagacagggaagctgatgagtatcaagaatacgaagaaggttattatggaagggtgagatgttttgaatttttgtacagttttgagagaatctattggttcttagttttgactatggtattgtctttgccatgcaggtgactctatcagggcttttgaatttcgttgatgggttgtggtcaagttttggggatgagagaatcattgtgttcacgacgaatcacaaagaacggcttgaccctgctctgttacgtcctggaagaatggatatgcatatcaacatgtcttactgtacaggtttagggtttaggacattggtctctaattacctcggtttaggtggcttaaaccatcctctttgcgaggaaatcgaggcgctgatcgattccactgaggtgactccggctgagttagctgaagagttgatgcaagaagatgatactgatgttgtccttcgtggagtagttagctttgttgagaatagaaaggtcgagataagcaaaaccaaggagctggaaggttctacttgtagaaaacttgatggtgacgataaacacaatgtttcttctaccaatgatttgaagaagacgaagaagaagaagaaaggtggaaaaggaaaagcgaaaggaaactaggaaaggcattaaagtttatcagttagattttggttcgggttaatcagtttggtttgatttgttactttagaaacataggtctatggttaaagtttatcacttttttgttctttaaataaattttgaatttttggttcggatacgttcacatatagacgtgacattttctgatatggtcgtattctagcaatagcatggtatttctcttccctccgtttctatggggaatgtacaaagaacaaaaaaagtgagagaaagagaaatggagaagagaatcaatggttggtcaaagagaaaacaaaaacatgtggtgtgtagctttcaaagaaaagattacgagatatttttggatagatttcattctcacttttctctctcaccaatctctcattcagaggtaattttatccttttttttgttcttctatatccatcatcatgatcaatactcttacgtgtttgctttcgatatattatcgaatggagaatttggttaaagattgtgtttatgattggaatgtgttttgagtcttgcaggcaattggaaaggactttggttattataagaacactcttttgtagagtgctcttctcgcctatataacacatcatg

SEQ ID NO: 13953 - DNA, 3000 bp, Unknown
  misc_feature (1)..( 3000): cDNA_ID_2705655_gDNA_ID_2214676_Annot_ID_136661 3000 nt of promoter + ATG
cacctcaaccattaccacaccatgccaatggctcgtccactttctttacaggtattctctttcctttttatgtatctatatagtataatcgaccataattttcatgtatctatgtagttttagtctcaaattgactctatgatcatgatattagtttttcattaaaatagaataaattttggtaacaattatctttcaaaccgttattattctgatacatgcctaattgaacgaagagtgcaaatgatttttgtttttagagaaaggtatgactttgttaggtttgtgatgatggtagctagagcgaattaagttgctttttttttttagctaaacataaagatcaaagttcaaactatagttagctgatctcctctaattttgtaaataagttggcaaaacagattctcgatcgcaaaaagaatattaaagtactcattgtgctcatttttttttttctcttttgttagttaaaaaatgtcttttcaatttttattgattcgtttaggggaatcggacaaaactgaaacggaatgtcataagtttgtctcactagtggatgttactatatgtgattataatatcctttggctgattcagcagagagttggtcatttaaataattattcttctaattaattacctttttctttatggacatatatcacatattaatactaattgtttttgaagcagtcatattagttctaattagtttgtaatatatgaatggtgctaattaacagacgatagacctgaaagtaaggatgtgttgcagtggatgtgagagggttgtcaagcatgccatttacaagctgagaggtaatgttataattcagagtgttttcgaaaataactaatttcttttcttccataaaatattttcgttaaattaacgaatattaaattttatattataaattatggttatagaataataactttatatttttcataaaaaattgtaatatgttttttgttttgctaaaacactcctatatagaaaagggtaatattgtgaatatatcaaactagtaactaaacgggcgttgttttggtggtgaaggggtggactcggtggaggtgaacctagagatggagagagtaacggtggttgggtacgtagagaggaagaaggtgctcaaggcggtgagaagagccggtaaacgagccgagttctggccctacccggacatgcctcgctacttcacttcctctgaccattacttcaaagataccacccgcgagtttagggagagctacaactactatcgccatggctacaaccttagtgaccgtcacggtaacattcacgtcaccaaccgtggtgacgacaaaatgagcaactttttcaacgacgacaacgtccacgcatgtagccttatgtaatttcctcacttctttttaggtatctatgtgtttatatttgttgtatcatttatagggttgattgaatagcttttatgcataagcgtaagtgagacaagtaaaaaggaacacaatgctttattagtcttgggcattcgttttttttaggttcggtttatctgttattcggttatccaaaaatattaccggctgaaccgtaaaacaattctgttcggttcggtttggaattagtaaactgtacatggtatcaaagtttggtccttttcctataaaactatacataaacatgctataagccagatggtatatactaaatttgtggccactgttgaaattgctaatggtctaatgagataatatgcattgtttgtttatgaccgatcctctttcattttacatgaaaatgtccatagttcaaccatttgtttttgcctctaggcctctgaaacagaaaaaatccgaacaaacaacgtctatcttgaacaaaccgaacctatcgcaatctgtctctctgtttgtctatcttgcattctcttacgatcagattgtgttgaatgaagctttgaaaattgaaagcttcaaacttcttctattgtctatagtgcatatggggaaaaaaaatgcttgggctcttgtgttttattttgggcctgaacgaacaacatacactaataataccaccgccccactaagagagaggcaaattttcaatactattattctagaatgatacaccattttatatcaaaaatctagattctcttctttctttttttaataaagtttaaataaacctaacatgttttttcatatattttttgttaaaaatgattttttcatattgatctcttttttcttaattgaagaaatcggatggtcgaatcttagagcatcattattggtaagttcttagattagttcttaaaatttttttttgtgattgattattaagaacgcctcactttaactcttatataagagttaaagtgaggcgttcttatcctaagaaataatttaaaagcttaccaataaagatgctcttagtacactaaagacgataaaaatgattcgtcaaaaaggttttgattggaaaacactgaaatgtaaagaaatgtaaataattaatattccactcgttttttttaacaaagtaaactaaattatccattttgaaaataaagatattccaaaagagtaaaataacaaaaataatattttgagtcgatgttatttgacgtattcgtcgaatatgttcttcatcgaacggaacaaatcaaacaaaaaaagaagcaagtggatccgtcacgtgtcactttactattgacctctgacgtgtacacggacgtcaagtaatttccttgcaccgcacgcttccttcctctgcaagtctcttactttttttcgcttccctcaaaatgtctcttattaattttctatccttaaatgtgaaacagacaaaagtgtttgccatgtgcttctataaagcctatcttctatttctcacatttttaactcatcacttctaaaaccttttctcaaatctctctcactctctttcaccggaataaaattctctaggtcatcggaaattttttacttcagccgacaatg

SEQ ID NO: 13954 - DNA, 3000 bp, Unknown
  misc_feature (1)..( 3000): cDNA_ID_2705659_gDNA_ID_2214677_Annot_ID_136663 3000 nt of promoter + ATG
tttgttgagcagagccattcaagaagcctgtatcggtaagtaatacgctagattctgcaagcagggaatccactttctcagataatgtattcatagaacaattactagcatattccttggtcacatttccatccccagtctcagatttttcgatgtctttactatgctgctcttgatcttgaagaggaacaaaattctccgatgctgacgttgttgcatttgacaaatttgttggagatgacacaaacttctcaggggtgctggctgcctgatttctctgttgttgtttacagagcagtgaaccttctatctcagaattagtatttccttctggacttctccgtgcaaacacatcgctaatgtcaacagcaggaatcaatgcaccgcaactgtgttgatctggtatgcctttcttttcagaaactggtggcctgtcatcgctagtgtcaacagcagggctcaatgcaccactactgcattgatctggcaagcctttcttttcttgaactggtgttctattatcatcgctagtgtcaacggcagggttcaatgcaccactactgcattgatctggtatgcctttctcttctggaactggtgttttattatcatcgctagtgtcaacagcatggctcaatgcaccactaatacattgatctggtatgcctttctcttctggaactggtgttctattatcatcgctagtgtcaacagcatggctcaatgcaccactaatgcatttatctggcatgcttttctcttcagaaattggtgttctattatcatgtttagataacaaagcctccaagttggtaatgggtatatccgcatgcttatccctgagtacacctatttcttccctcccaattgatggggtagtcagaaaacggtgtccggataattgaagctttgatttctcaattctttgagaaagagcagaaccaggtgacggtggaatcaaaccaagtctggatttgcttttctgaatggttgacaagctctcaactagtgcccgagtctccctgctcataaagcttccaccctgtgtaggggaaggagtaacacaagataaagactgaggcaacataccaactaaaaacgcactttgccttctaatagttgacgaggaaagggaagcctcttttgtgtaacgttggcttcctgattcctgcagacctatgggaatgcatccatttggaagggacgaggaaaaatcatcgataggtgatcttgcttccacagtattgtcttcaggaagcaattccttgctttcatctcccattagagctgctagtgtaggagatagatacccgtaatcatatctccgagaattttcaccgacgatactcatatcattcgagtctctaccaccacttcctttatcaactggtacaggtgattttggaaatagcttcttaggttctgttaacaccattgcacttcctgtatcagatctggaagtaacctcagttggtgttttctcttctactagaagatggctactcgtaggggtccttacatctccagactctgacctagcaagactccgaaaatgcatcgaaaacgccgtagaatccatcgtcatttcatggtgttcttcagagataggagtatccaacaatcttccaggattaataaaatgggaagacacaggaccgaagaaattatcctctggtaacgaaaacaaaatcgattcagctaaaaattcaaagaacaaaaccctaaattcacagagcaattgaagcgtaccgttatcacttgtagcggaaccaacagtgctacctcctgaagatggagaatatttcggcctcaagaatgatttatccaagataggttcgtattcaccatcaccatctccgtcagtatcttcgcggtcagataattcaccgaaaaacctaattactttattatcctcatcaggctctgatgtatcaccaccgttttggggtttcgcggcggaggtattgggcggcgtctcgtaatcttcgtcccggttgaaaatgtgaacggaagtaatttcccggtcggcgaagctcactcgtcttagccgcttccgccgttgcgctatagattcctcgtctgttcctattccggcggtgttgttcatcggatcttctggcttttccgatgccattgggggaattttcgaatttttagggtttgaaattgaattattaatgtgcgggaaatgcagacattttaagttttaatttgaacagtactgagaaggaagaacattttgattttgattgaattgattaaatcgggtaaatgaaatttcaaacatagttaggcctaaccatttgattaattagattaaccggtcgattaatatttattctataatacttttttctttgtacgattgggccttacttataaagggccgaataaaaaagcccatttaaagaaagacttctttttcgttttgcatgtgaatgtgttgttgggattagattcgattcttaaccatcggtctcgttcatttcgacttcacttttcgtcctctttcttcttcagatcatgtatgtatgtcgctagtagacatggatccatcaaatctctgagacacctgagcttgatgaatagccatagacaaagctcttcgatgcaaattctcttcaacagcaatcaacttcctctgtgaacgattcattctcttgcttctggatcaatctcctccacttctgataacaacatctttcttcttcatgcagattactctgttacccattattcacaaaaccctgaattttgcccaaagtgattccatcattgcttagctttagccgggttcttgtttggagctgttccttatgcaaaaaaaatctgaaagtttcttagcgaattgttacctctattaatttcaatggaacagaaattgtaagtatctttggttcgtttatgtttttcttagctgttataaagatccaaccctaactctttgaaccctaactttttttttttcctttgatttttgacagcaaaaccgattctatg

SEQ ID NO: 13955 - DNA, 3000 bp, Unknown
  misc_feature (1)..( 3000): cDNA_ID_3020861_gDNA_ID_2214677_Annot_ID_189216 3000 nt of promoter + ATG
agataattgtaaatattcggttccggttcagtttggatatatctggattcggatcggtttggctaataagtctgagaaactgtaaatacccaaaaatctggattctctcggattcaagtctaaattggtaaaaattatccattatcccaaaatgtgtctccaatacccaaactttcaaaccaatttacatgcacaaaacaacaaaaaaataataatagaactttaaacttgacatccaaaatctaatccaaagtcataaagattaatacttagagttaagagtagagaaatatgaatatgaaaacaataaattcgattatccaaaaataaaaaacatagaactaaaacgagaagtaggattgtagtcttgatggaagttgatgaatgggtaattcaatcaagcatgcaaaaggtaagctagtgttaaccctataaatgtttaaaactatatctatatatcgtataaatacacatgtcttatatcgggtttatcggtaccatgtttgagtatcgagtaatctccgacccgaaccgatatccacaggtttaccaaaaccatacctaataaggtaacttcctattcgtctaatccgcttcaacccgattatttttatccgggtatcgatttcgatattgggtctgggttttttttgcagccctaattatttcattacaagtaaattaaaaatatatccacatccatctttgaaacaatatctcaatttcttaaacttaagcaactacatcaagatccaccgtgtttaaattgactttatattaaaaacaaaaagtttggtaaaattagtcttcagctaggataacaacaaaaatatatacttagggtacaagtgatagtttttgttagatggattaatatggtaaaccaaaatatttatatgcaatttgctaaaatttccctttttgcattgaaaatataaaaagaaatagcctttaattacctgaaaatggatttatttaaaagagaagtttttctgtgttgtgttgtatacaaatgaatcaaatcaaattattcagtaagtttccatatttcattcatctttattccattcatttttttcatattaaaagagaatacagtctctgtaatggtttccgatttttttccttaactaggttcttaatttgtttgaatcttattgtacttccaaaattaacaaaaacaattatatttgattttgtgtttctatgtttttgtttttggtctttaaaatctccaatattatttattggcctttttcatggtacgtagttgataacttgatacttaaatagactactaaagcaaaaatataatccctattttattggtttttagtttactttcgcttaaaaactgagacatatattggatacgaaaacaaaaggtaaaatattttcaaatattaaataaaaaatttagctgaaaatttacaaactataaataacataatatacctgaagccaaccatatgctaagaatatttacataaaataccttaaatcgaatataatctatatgggtaattatatccaaaaatatcacgaaatattatttcgttgatgatagactttaaaaattgcatattatgtacagaaatacaattaccgaacaggaataattttttgattacattgaccacataatataacaaaacactaatattgttttgataaatatttgatgttttaggaacaaaatacatgatgttttcaactttcaatataaaattaattaatatacttttttgggtttagaggtttctattctgtaaattgtatttttttttcctgtagattgtattactattggtcgattaaatggataataaattaattttagtttggaaataaaaacaaataaatgaatccttaaacatcaactataaaaagacagaggagtatctttaaagaaacttggattgtgatattgcactgtaaatagaacataaaatgttgcagtgtaactttattttaatcaaataaacaaatgttagtaaaaaaaaatatatatgttgcaaacaaggattaaattcactagtaaattctcattaacaaacaaacaaaaacaaaaacaaaaacaaagatagtgccaagcattacatatataaacaataaaaagaccctacttattaatatctttccttaaagaaacatggattattatcattttggcagtgtatgaagtaataaatataaacaaaatgaaataagaaaatgcaagcaagtacaattgatgatataaagtaaccatggttaatcaaaaaaacctgaaagactgaaatagagttaaccatagttaagcttctctggttaaaagataattgctttgctatatattaaacaacaattggaacctcctcttttatcaaaaccaactctctctacacactttttcagattccatcatcacttgttcttttcacacccaataaaaacttgcatctttcttctaaattgttgatgatcgcttctcatatttgaccctagaggttcgtacttttctctcttttcactaaagtttcgatttttttccccaatttttagccccagaattgattcagagtgaagagatttcaaattggtttcataaagtttgcatcttttagaggttttgatctgtgtttcttgatttagagtcagattttgtgtttggtacgaatcaaaggcttgagcttttggtttgatggttgtagaaattgaataaagatctgttcttgaatccttttgatactgattagtgttaatttgaattaaagctttgtgctttggtttcgatttgctaagctttagagttaatttctgtttctggatcataatatgagaccttcaagtctcttgcttgctcatactaatcatagattgtcattgaaatctatgtgctttggttggaatgtcttgaagttttcatatgttgtgagctaatagcccttaatggtgtttttcagacaacatcatttctaccgacaaagatttgatatcgaatccaacaagtgaaagatg

SEQ ID NO: 13956 - DNA, 3000 bp, Unknown
  misc_feature (1)..( 3000): cDNA_ID_3020841_gDNA_ID_2214677_Annot_ID_189222 3000 nt of promoter + ATG
ccgtttaggaacacatggatctccttgccagctagttttactcactccataagtattttggatattcttgatagcaataactagaaataagttcataaacatgcatgatatataagaaatcagcacaaaacaaaaccaataattcatatagataatattttgaaatgacataccatcatcttgatttgtttccaattcggggaaatcgatcacggtgaaaacctcgagggcactacaaagcggaggaagagtagactttgacgtttttaataactctatgatgcattgccctccttcacatatttgtggtttaataaagtatatagttcctgtggcgaacgttttaggtctataccgttccaaggcaaggtttccattcaacatcatgtcgaattctcgggtttcattggcctgtagagtctgaatatcggcgaagtgcatgtaactataaaatttggccgtagaaggaatcaatgaccaggtgaagttgaagggcgcatttttacttatgggtgttgaggctgaagccattacaaattttggtggatcataaccatttgaactgttaacattgagatttgtagtcaattctgtccacgcatcctcatcaaagaacggataccaatgacgatcgttgacatcattcgggtacctgacacattaatttatgtattagaaacagatattacttattatgtacattgtaaccaaaactgaacttgattaatataaagacatgattgataccgtattattctccttgaagtgctgaaataattccgaaataagtatttcagcgagccactttgagtattgtaagtatcgtttataagtggtcgcagctctaagctattaataataggtatactctcgcctgtcttaataagacaaacctggagtaccttagatttggtactgtggatgatttcttctgtggtcactccgttcattaaatatacagctgtgttcacgtttgcccatagattaggaccaaggtaaaggtcaaactcgagttctttattaagaccatcgtagttaccatacacgaaactggctctgatcaggtagtttgtgccgagcgtgacgttcaaggtataacagtttcggactccttcggggaagtacctaagctgtaaaattggtttgttgtaggttgactccaattccttatcgattgtaccagttttaccgctctgcacgaaatcattgtccgttgtgtatgttaagtcggttgcagcatcgacgtaaggaggttcattgggggataacccacaatctaaactgatgaatcctagtaagaaatatgaattgtaacgtacataacaacgtaattaaatgtattaaaaacaaacaaaaaaatgtgtatgtagctagtagatatataccttcttgatttccagcttcaacgacatgtaaaagaccaaacgtgatgaagaataacacacataagagaattgcttgaggatgtgttttcatttttcttctttggtacaaccgtacaaaggagattgacatgtataaatacgtgtaacgcttttgagatttatatgcaatggacattagaggaaacaagttagcacgatgttatatttgcacgttcaacttgtgcaaaaaatagaactccatgaaaatgtacaaaccgtacatttaaaggaaattgacatgtacaaatacatagaaaactattgagagatatatatgcaatggacaatgggaaacaagttagcacgacgttatatttgcaagtttaacttgtgaaaaaaatagagtcagcgagctctcaaaccaatataagtaataataagtgtgttttgattaaaatttataacaaatacaaacatctaataatcgctccttgctcttttaaatgactagcttattgttgtggtcctgattctcgaatgccaactagcagagacggattagatagccaatcacctggtttagtgaattaaattcagaattaaccacaataaattttctcttacaatatgccttatacaatatttgaaaagtcagagagcgagaaaattatacttttcatatgtgtcaacgctaaatcattcttacaacatgtcagaaattacatcagctgccattactaaaaataaagtatttattactaaaataaatatatttcagagacttattacttatatagtaactaaagaaaatcttctacaattgtttcataaatcatactaaatatatttagtcagtgtcgatttcagatgttttgaatagttgattcggaatgcaagggtcgagaatgaaatttggtatcgtctgatttggaagggttatgagattatgagggatggtttgtgcttgaagataaatttatgaaattatgtgtcttcagattgtttggtttattgttctgctaattttactttgttatctaaaaattgtggatgcccatttgaacatggacggactaaatcataacccattgaaaaaatttcagtacggacagtccatatggatgcaagcagtcctaattggtagctctattaaaatgaacaagtattgaaagagaaacgcatttcctgagacctaggtcaaactatagacaccccttatttttgtataaataaaaggggggttattaacaaaatcgtgaaaccttcatttaacgtaaatggtgatacaaagcaagcttaaatactaagagagatagccaactatacacaagatatataaccgaagataaccgaactacattcaacatttaaaccggagagatataatctctagtatgatttatgggtttacattggccctagaatcgtatattgcttatcagatcgaaagttaggttgaaacgctaaacatatcagcgtattatgtgagatgagtaaggacattcatattgatgtaaaaaaactcttttctacttgctcattcttgaaaaaaaagatatagaataattgcttattcaatgtgacatgtaaaattgttcttcatggaaaaagtttcttgaatagaaaataagacatg

SEQ ID NO: 13957 - DNA, 3000 bp, Unknown
  misc_feature (1)..( 3000): cDNA_ID_2710703_gDNA_ID_2214677_Annot_ID_136665 3000 nt of promoter + ATG
gcacttgcaagtaaatgtgttttacacttcactaaagcttcccttaccactagaccacaaatgattgggcgtgagtcatgtttctgaaacctatatcatgtcttgattgtacaaataacgcatgattaagctgtagattctgaaaatagaatatattgaagctttccacagttagggccggctcattgggggtgaaaggggagcaatatttctggatctaaattattttgggtaaatttaaaggtccaatttttttagtatgaaaaagtgtcattttgaaagatttataagaattttttagcatgaaaataggtccaaatatttttttagtatgaagaaaggccaatttaaaagagttttaagatttattagcataaaaagggcacaattttttcttttagtatgaaaaagaccaatgtttaagatttgtacatggactctgaattcattgagctgccatagtgagtaaaatttggaaacaaaactaaaaaaacataacaaaatatctcgttgaattcaatacaaaaagcatatacaaacacaacaatgtaacaatttcaaaatatttgctcttaagaaataaaaatcttcaaccttgaagagcatatgttagaaccaagctccttctaccaaaactatataaaacaatcgaaatagagaagcatatgtaccaacaatgtggctagcgggtaactactcgtcaatacattaccaatataaaaacaaagtctgtcagaaacacactatattctggttagtatctaacaaactttgatgatgttagaaaatcaaatgatagactccatattacaaagggactacactgttattatggctattcttctttcagaggcccatactatgcaatgaaccatgtgacatattctcttcattcccatacatggctacttaaatgttttaccaatcagaaatttgtcgttctaatcacgtaataacctttattagtattcacccgtttttttaaaactccaacattcgcattctcatccgctgcgtttaagtctgtcgagcctataaccccctaaaaatgccataatcttcttaccaatcacaattgatatcatcattttgaacatttcaaaattctcccgttgggcttagaccttaattaatgggtctaaagtagaccacatatctaactatgagttgttgttgggctttggaaaactacacacgtgtgagacaatatctaccgcacgtgtcagtgcaaggcgccaaagccaccattatccttccgttatcgtctatcttctccaccttcccggaatccaattcaccaattcctaagcattcttcagaaatccgagctgctttttgccacatctattcgcttcgaatctcttttcaccagctcaaaaactgtcgctttcaattccgctcgtttcgtcccaccgctccgtgtattgctgaacttcttcatagcaactcaataccatggatgttactgaagttccatggcgtcgtcttcctcaattttccgtttcttcacgcgcctcgtggctcgtttcttctgggtttccgctttcttcgtaagttctttcattgaggcattttatcatacactttgtctgtgggattctaattcctgttcttatcttctttcgatttttgaatctattgtggaagtgggtttcttaggttctgaacgggattgaaacatttgtttgtactcagtttcttgagttcatatctcacagtgctctcccctgaaactcattttatagaccagggaaaaatatatgcatgaatccaaaggaaatgatactttggactaacttggaatctctgttgttcaacagatatatgttctctcatgttgagcgtggaaagacgtttaggcttaccttgtgctttggggtctctcgtttacgtccaaggtctgctattgtaagtgcacaacaaggtaattgggagtacaaaacttaaaagttttcagagaatatcatggtttaactttcctgtggtgttctcagtttgtcttttcatggaatttcagttgagtcatgcctcaacttgtgaagtttctttgtttgcattttcagccactgagatttttgttatctgtattctcagaacagccacctagtcgtctcaaaggattatgcgaggtcgtttggattgtggaagctgatctggcagccaatgaacatctctacgttactggagatccttctacattaggtagctgggagccagactgcgcaatctcaatgtatcctacggaaaatgataatgaatgggaagctaaagtcaaggtaatctattcttttgtttcacttaagccgtagcgaacataagtagagatgtatcttaatttacataaaacgtttgaacgtttagtcgtagtaacaaaaggaaccaacctcaattcttgaaagtgagttcagatgtcgtgtttgcttttaacttaatatgcttggcagattgcttctggtgtaaatttcaggtataattatctgttaaaagctggatatggatcttcatcggatgtcatctggagaccagggccacaattttcgttatcagttccttcctctgtcaatcaagacagaaaaataattataagggattcatggatgagtatgagtatttcctcaaaatcacaagaatcctacggatgggggtcttggattgatgatgcttacctttttccaaactgtgttaccccagctcaaagcgaaggtaaaatctcggtggttcctccttgttcagtctcttttcatcctttgcaaaatgttttaaaacttaaatgcttccagtggtttggcagatgaatgcacttccgccgatagtgctatagaagtcccgagaacacatctgaatgataagcaagtaggagctgaatctttcttatgtgatgagcttgcagccttttcgtcagagaactcaaacttaagtgcgttattttctgacaactatcagcctatcgaggaaccgtggttgattcaagaatctattaccttacaacatgaaaggaat

SEQ ID NO: 13958 - DNA, 3000 bp, Unknown
  misc_feature (1)..( 3000): cDNA_ID_3020864_gDNA_ID_2214677_Annot_ID_189215 3000 nt of promoter + ATG
ttgacaaatgataacatcatagtcctgacttcaaacaacaatgtcatgtcgcaggaaactattttttgtttgaatctaatgttaaattatattcaaagaaaaaacaaaagtttacacatgtttaatgcaaaaaatttcgtaacttttagtttaaatctatccttagcattgccttgtcgcaaaccaagtttggatgcactccgcgagcgatgagtttcctccccttgtgccgtagaactatttgtaatgctctgtagtatttgaacccaagtatttttcattttaaccttctttgcaaccaaatgaaataaattatatagcctcataagattgagccaacgaatctcttgaagcactttagcattgagagaaactcttctagttgatgcaagatattcaaaaaatagatattcggatggcaacaaatctaaactttatactatataaaaagattttaacccgcaatataccgcggattattatctagtatagaagtaataatcttctgatactcttcctcaaaaggtcaccaaacatttagcatctaacatatatggtagagcagccaagtaaacatttcccaatggccaacaaaatacaagtctaagatattaagtagattcgaacacaaggtgacatgaatttgaatcccagagcacaatagccaactcgttgagcatctcacgcctcttctcaaaatcttcgagcttttcccttccgatgcgttttgtggagaaagttgctttcttcaaccgtcttgcgttttctaggatgtatgtggcaacttctttctcatcacctcgttgccattcatatcctatccacaagaatgtctcaagatggaacaacaaacattccggtgcacattttggtggattccattttcgttcgtccggatttgttttgttgtcatgcagatatacctgggaacaatgcagtttatgtcatctaaatcaacaaattacctgaaagtggagttgtggaaacaaacaactagtgaaattgcttacatccgtgagcttgaggatttgtagtttaggagaactatcaagcatgatcgaaagcagattccaccactctctttcgtgtgtaagtagctctagacagcctagttgatcgaagattttaccagtaggaactttaacctaagtacatttccacaaaacagtgtaacattgttacatacattttagatacacaaaaacagtgttagcccaatttgcagagaaaataaccaagcgaaaatgttcaatcttaagcttacctcaaggggtgataagtgtaagataagacgtttggctgaagttagagactccagaatgttctcattggttataccagaaacgttactgatttttgcctcctctaactctagtgccttgtcaatcaaacaagactcaatatcaataaccccgttgatgttcaagtatttcaaaccaggggcatttatcacatagcttccatttccataacctccttcttgtctaagatcttctatggtcaatctttgtaatgacggcgacgcaattgtgaaagtcgccacatcggcattgctatatctatgcacgaccaaatcttgaagactagggcagccacataaaagattgcaaacagattcttcgtctttgaaatgtacttggtcaaggtatagctttctaagagacttcaaacaaacccgagaaggaaagtctaaatcgatagcacacttgagtttcaagatctcaagtgaatcattatagctaaacaaaacactaggaagcgtgacagtttgatcctcttgatagaaactatccaataccaatttacgcacaccgcgagcaaatgctgttgcaatccatattccaacatgcaaacaatctgttctaccttcaaatgacaaatgcaaactctctagaaccggagctttatgtaaagacaaagtcttgtaaacattctctgaaaacatagtgggatctatgttatcatcatcaaacacaggattgaaattggaatcaaacttgagttttggcaacatagtccaaagagatctccaacgtttagacaaaacactcgtggctatggcgttttctgtcggaagtgaagacaatatctgtagaagcaaagcatcaggcaagtcactgattctgtcctcattcatagaatcggttttgctgtcaaaaatcaaaggaaaaaaaaaaagttagggttcaaagagttagggttggatctttataacagctaagaaaaacataaacgaaccaaagatacttacaatttctgttccattgaaattaatagaggtaacaattcgctaagaaactttcagattttttttgcataaggaacagctccaaacaagaacccggctaaagctaagcaatgatggaatcactttgggcaaaattcagggttttgtgaataatgggtaacagagtaatctgcatgaagaagaaagatgttgttatcagaagtggaggagattgatccagaagcaagagaatgaatcgttcacagaggaagttgattgctgttgaagagaatttgcatcgaagagctttgtctatggctattcatcaagctcaggtgtctcagagatttgatggatccatgtctactagcgacatacatacatgatctgaagaagaaagaggacgaaaagtgaagtcgaaatgaacgagaccgatggttaagaatcgaatctaatcccaacaacacattcacatgcaaaacgaaaaagaagtctttctttaaatgggcttttttattcggccctttataagtaaggcccaatcgtacaaagaaaaaagtattatagaataaatattaatcgaccggttaatctaattaatcaaatggttaggcctaactatgtttgaaatttcatttacccgatttaatcaattcaatcaaaatcaaaatgttcttccttctcagtactgttcaaattaaaacttaaaatgtctgcatttcccgcacattaataattcaatttcaaaccctaaaaattcgaaaattccccca

SEQ ID NO: 13959 - DNA, 3000 bp, Unknown
  misc_feature (1)..( 3000): cDNA_ID_2705681_gDNA_ID_2214678_Annot_ID_136669 3000 nt of promoter + ATG
ttaaaattggtggtgggttgtctaagcacagagatcagcaatgctcatcctctgttcattcttgatacgtttatatcaagaccttttcactagaaactggttagtctaaatgtcaaatgtcacatgtgtatatggaagctaaccgtttagccaacgagttagctaactatgcttttctttgcctttaaggtttcattgttttgagatgtgtcatgaggaagttcatttgtttttggttgaagacgctaacggaagattgttccctaaagcagttttgatgtaattgttcgtagtttttctttaataaaatcgggttgacaatttcacccctcagcctaccaaaaacaatcttgacgttagttattacactaactatatttgaattttgaacaaagatatttgtctatgcaaaatataaaattaaagaaaaacaaaacgaccattatcgcaaagtgtttcacacaaaagaaatgtggttgcagatacgcacagcaaagtcactaatagagaactacaacggaatctggttcaagtactcgactccgaagtattcactcatcgtatggctagttcggaaaaacagagtagctacgggtgacaagctgatcaaatggaacccgcaaactattttacactgcattctctgttaacacattttggagacaagggatcatttgttttttatgtgtccctatttactactcatgtatttttaaccttatttatttttaatttgctaaataaattatttaatggatcgtcataaccgattcataatctaattcctacaccgtctataagagataacttgatttagtatagtcgaatgtaggtgggatatgtcgcagaggtaaaccaaccacttgactacaaacacttcccataccttcacaatattagacctgaaatcttcaaaatagaatccctaccatcttaaaccgaaattctaattttgttcaatgatatagacattacatggaataagttacgttgtggcatggagaagagtatgtaacacataaaagcatatgagctgatcaatgagaaataactaaacaatgcataaaagtaaatgcttcttgaatacattttatattgaccagttcgtctataagcttacacttgtgatcataatgcccataatcaaaaattgattcatctttgcacgtttttctaaacattttcagatgggaattctgaataatcaatcaactcggtgccgattcaattggatgcacaagcgacaaacaactgattaaacagctaaaagggttattgtccaagtcatttccaatgtatatatatggtaatttatcaaagaacattgctatgtatatggattttgtttgcttagctaactgcagaatacatatagtttaatttttagattcctcttttgatagtgatgacatgagttaaacaaatttggttaaactattttgttaaaccagttttctgatggtgcaacaaaacactatcaatcagaaacaactaaacaattatgaaactcacaatgaatatttgtcattgtggccacaataccagaccactcgatcgtcccgcgaatcccttctccatcttcgtttgatcaatctcactccacaaaatcgctagctttccatcgtactccgccatcacagagacatcaaacttgacattaagtgtcttcaaaccaaccactttaacccataccttgcgctttacgtcaaaacccatcaacccctgctgaaaataacaagcatagagcacatcattaacaacacacatacaccatacgatatcacttgggattgtcaatgtctcctttcttttaccttctctcggatcatacacaccgattctcccaacttccacagtgtaaaccttccaatccagcgacaccgcacttaaccgagtcatcaatccgcgctgcgttttctcctcaggatctttcgtagttttccaactccgcgacttcggatcataaacttctacttgtatcttgtcttcacaacctcctatcacgtatatctttccattgattactcccacggatgcttcatccgtgcgagcaaccttcatgcttggtccttgtctaaacattccagttcgagtatcaagaatccagagttccgacatcggttcgaaggatccacctacgaagtagatttctgacccaaccgcggaagagttgtacatagaatgatgagaagggaacggaatcggaatcttgaccaatttatacctaaacgtcttcatagccgtcttcatcgtcttcttcttaagagtgaaccaacggtagatcgtatctggtggaacattgattatgttttggctgaaggagacgtagacagaattctttgggaggagagttcgcaaacgggagagctcaggtgaccgaacaagggaccttagggttttggagactcgacagaggtttaggtaatagcttcttgggacacgttgcaagcagtccaaaacgatttcgtcgggcaatgaagtaaacgatggcaaggacggatcgttatcttctagcggtggcttaactgatttggaggaagattgtttcttaaacttcttcgaagaaggagacatatcgttttggcttcagattttattattaggagaaccaaacatattaacataagaatactaagagtttttatttatataggattataatttagaatattgacttggatttagataaactgatacttttttttgttttgcctttttttgtccttttctcagcaatttaaaatttctttttttttccttttcacttttttaggaaaaatatcttaaatacgaaggaataaaaaatatatatatataaaattgaagcatatttaagataattaatatatttgaccaaaaaagggaaagataatgaatagtgtattttaatataataaaggtttgtttttggtctgaaattcagcataaatccccaaattgtcagaaaaaaaaaaaaaaacgtttgcgaaaccctagtcttcttctgttgaagaaataatg

SEQ ID NO: 13960 - DNA, 3000 bp, Unknown
  misc_feature (1)..( 3000): cDNA_ID_3020887_gDNA_ID_2214678_Annot_ID_189236 3000 nt of promoter + ATG
aataatgaatagcagatgttgacgcctggtaagctcgttttattgcaggaaggtttcgcgtttgcgcactgcacaacttgcaaggctccatattatctgagagttcacagtgctggagataggaaatggcggacattgaagtttcgcttctttgttactcgagacattttatccatatttcttgctgttcagcttgtaagtattcatttttcatgtgtgcttctgtttcttacagtagtttttctttcatttggtaatatatctaactcatgccttttaaatgacttcatctgctcacaggtgattgctgcattggcctacatggtctatttcatagatagttaccagcaatcatggcttcgtcatatatggggttttgacagtgaggtcacgttttattacatgtgtggtatgatcccaaactttaatatctaaataaattcccctctagataagataatattttttagtaagacctctgccaagtgtagttggtaagacgggaatgctaagtttattattgtacatatgtcctacagtccttgttaaagctttgcttcaatcagaatcttagattccaatgtaaggagtttgctattagatgatttcattgcctctacgtagtaggaagtgaagcaagggttttgtgatcagttagatttagatcaaaagttaaggggttggctacgttacgaatatacagttagagttctggacctcgtagaatttttaactaaataagaattttcaaagcaagtgtattagaatttagtaattaaaattttgtgttttacacagctcttcatgaaaatttgttactaaagaaatttataccaagtgattctaaaattttacatgtgtgtatgagctactggtgtttatttacatgaggattttgttgtgtgcaggagctttattattctttgctctgctgggtctatctggatgcgtcataacctgctatgatcgaagggttcgcaatgacttagcacagccttgccgtgaattgtgtctctgttgttgccagcctgggtacaatttccatacttcttcctttgtttttgttttcagtcattggcgttttcctgattataagtgttcctcatttggtcacatgatagactttcgtaaaaaatagtttgctgaatatgtgggcttttgctttacctggttcctgggtgatttatgtttgaataagcgacatcagagactagaaatggtgagacaagccagaggaattctgttacacaatagttagtgaaaaattagaatactaactagatcctcttcttttgtctgctaaactctatctatattatctgccaaactactatgatcgagtttattatctgccaaactacaacacaacaaaagtacatacactattgaaaatattttgtcagctcccatttaataaacatatatatcatcaatatgcaggatatgcacagactgccatctaccaggaactatttgtatgtgggcagattgcaccgcatgtactgaaggctgtgcaagtgcagttagtgagtgtggaggttgccttggaggtgcaggggaagccggattgccattactcttcataacggcattagtaattctcggtctatttacagttatcggtatattctatagcgtattggttgcaaccatggttggacagcgcatttggcagcgccattaccacattctcgccaaaagaatgctaacaaaggtaagatttttatttaccttctacggtttctaattgtttatcattcaatgtttctttataccttctttatttggtgtttgtaggagtatgtggtcgaggatgtagatggcgaaatgacggggtcagaatggtctcccccggctttaccaactgagcatgtccagcagctgaagacgcttggccttctgtgaaactatatggcttttgattaaaactatgggagatttttaactgcacgcagggaaatgcatttgacaagtggtgagagagagaactcacagaacgatgaaatctaatagatcttttgtatttgtaaagaaaagactccaacttattaaagagtccgtgatctctcccattgagtcagagacctctccaattcacgaactgagcttgtgttgaatgtttgtttctaatataggtaaatatccgaaataactattttactttcggattattttaactcgaagcaagtttttacaatggcgattacagtttaagacggtgggattagttgaaatggcagcatgtaagaagcttagacggcgtttttaagcagtttaaacagtccgtaagctatctagagtccgtatgctttttgtggttatcatattttaagttaaaagtgttaacttcaaagttaaaacttttaaccgtagtgatcaaaaacatttggttccaaactttcaatgagtatcatcgatttcgaagggtagaatatctttttttgtgcaaagggtagaatatctagaagttgaaattgaaaaataaatgatatactattacaaacccaacaaagttaacaaaattttgttttcttatccaattaaagaaattcgaattccttagaaaataaatataaaattaaatgcttcttaattttattgttcatgacacaaaaaaatggatagagaatataatgtgataatgttaatgtattagttatttgtttgaactaatacactttttaagtatggaaatggatagagataacacgtatctatgaactacaaatgaaaaacacatgggaaaaaattaagttaattgctataactttaacatggtgagaagatgcatatagtaatcaatgtagtcaaccctatattttttttacattcattcactttctatttatttttatttatgcttagatgtatacccgtatatatataaacataaacattacatagccataaagcaaagaaaagagtcattcatttatcctctaatttacaaaacattagtacgtagctttctttttttttgttgcaatcgatatattgatc

SEQ ID NO: 13961 - DNA, 3000 bp, Unknown
  misc_feature (1)..( 3000): cDNA_ID_3020878_gDNA_ID_2214678_Annot_ID_189235 3000 nt of promoter + ATG
tcttaagattttcagagtttccccattggaaagaaaaacaaagccctcataagatcatgatcacaaaacaacgaaatcaaatgaccaaaaccaaaccaaagttgatttagctgaagcatactatagattaatacgagttgattcatatggatggatggatagctgcagagaagaccaaaaaccgagaaacaagattgatcctcttaagaaatcgaaaaactgaaaacaagattgatcctcttaagaaaacaagcattcgcatcatcggtcactgtgaggtcattgtgaaaatccaaagaaaaaaaaaaaaaaaacaagtatgctttgctaccataaccagagttatatagaatatgaataacgagcaggtaaaaaaaaggtaaatccagaacaaagctatgtaaggtgaaaaacaaattgggtccaagtaccgatgaccaaaaacaatcttgaacttaggcaagaaaacttggcaactgatatcaaaatggactcttaaatacaaaagagaaaggggcgacactaccataaaagaggaatgtgatgaaagagattgagaagcttataaaaacctatggggaagaaaacaatgcttgaaggaaagaaaactcaggttgtttattccagagaaaatcaacttgaagcttttgaaagagtcccaaaactttttccagtactcaaaaagacagatttaaaacaagaatgtaaaaccattatgtctgatcctacaaacgggtctcaagacaactgcagctggaagatacagacttttggcagttatgacatatagtggacaaaactataaatgtcataagcttcttctccagctatagcgaacagatattcaatgaaaatgcgggaaaacataaaaccaaaaacaaggaaaaacaaaagagaaaaacatacgccatgccacagaagaaaaccagacgtgagtttgatgggtaaggagaagacagaagaccataatgggggactccaaaagggaaaacaaagagatagcaaactactttaaaccaatattgatcctagtaactaaatcttctagacaaaatgaccacatttcactggtttatgagaacagagcagaacaccaatgacagacttccagagagcaacagaaaattcatcctttgagcacacatctccctcaaaatggctcatataggggtagatacctcgttaaaagagactataaataatgaaactaaaaaagtaggtttgaaacatcaggcatagaaaataaagatccgcaaaaaaaactcctgcaattcccaaaatatcaagttggagtcgaagataccggactaatcattagcctaatctataacttgaaatatcagagaacatggtcataccacttgggttctcttatctcagataccaagcacgttcaccatcaaaaccagcaccagcaccagcacccgcaccaacaccgttaacattaccatcaccaacatattgtcccaccattcccatatgattcggtggcatcataggtccttgattcatcatacccgagccaaacatacgataattctgtaaaccagcaaccatcggattacccatcattgcaccatacataggattaaaaccaggaggaggctgagaatgtccataaaagggcatgttctgtccagcatacattgacatattctgctgctgctgatgtcccttatcaagtccatgacccaaatcaatcccaggcaaagccatttcactctgattacccgtatgactcaaatcaatcttcacagactcaaccggttgttgttgttctcgtggctttccagaattaaacggcctagctggtaaacaactaacagttcgattatacattctcttctccggattcttcaacgccgctctcgctcctttacgcgtcttaaacaacacaaagccaaaacctttagctcttcctgtatctttatccataaccacagaacattccgttatctccccataaacctcaaaagccgccttgagattctcatgcgttgtatcccatccaagaccacgcacgaatatgttccgttgagaactatctctatccgctgattcaaacactgctgagatcaatttagaacctttctcagcagttttgtaaattaggttaataagctcctctttagagtaagattcaagtagattcttaatatcttccttatcgaattcgaaatcagaatcagactcaatggtaacaatcgggaccgtaacaggctttgaatcgacgatctcttcggattcatctgatgatctcttatgtttcttcttactctccttcgatttcttaggagatggagatggagatggagatttctcctcttcttctacttcttcgtatttcttcgatttcttctttgatttctctggtttctcttcctctttggatttcgatttatgtttttttgagattttcttctctcttacagcgagttcttcagcttcgcgacgcttcctctccttcctctccttcttctctttcttctccttcttacgttcttctccttctttcgccattgttgacggcagtggctaccaaaaaaaacactctgaatagagtaactcctctaaaatagggtgcaccagagaacactagattatttaagtatatttataataaagtaaagagtctaacaaaaacgtctgggtggtgtagtcggttatcacgctagtctcacacactagaggtccccggttcgaacccgggctcagacatgcttttttttttgcaacacataatttttttttttaacatgaattagtagaggggcaaaaacgtcaaaatacagaaaaggaaaaagatacaacatttctggtttttgtgtgccggcgaagaaccggtgagtgacgggtcaattcacatacttgtttaacggcaacaaaaacctaccgataaatgctaaactaacgaaatcggatcatagctcgacgaagtctcgatcttttctattctctctttctgggtattcgtgggttttacccagatttcgaaattga

SEQ ID NO: 13962 - DNA, 3000 bp, Unknown; identical to SEQ ID NO: 13961
  misc_feature (1)..( 3000): cDNA_ID_2705706_gDNA_ID_2214678_Annot_ID_136676 3000 nt of promoter + ATG

SEQ ID NO: 13963 - DNA, 3000 bp, Unknown
  misc_feature (1)..( 3000): cDNA_ID_2705713_gDNA_ID_2214679_Annot_ID_136677 3000 nt of promoter + ATG
ttgataatattcacatagagtagataactcttcgacaacaaaaaagaaagaaagaagggaaattgcactctgtatacatagaaaattacaaaattaatagaaaattacaaaattaagtgttagaaaaaactactgttgaaccttctctctatcaagaaaatattcttatacccctataccttatttgtttttgatgttaaatattttgttaccttttaataataatgttattatcttccgataattatataatctttgaaatcaatcgttggttcaatagccggtaatttgtttatatcgtcaattgttttattaacatgttatgtaggtttgtaccttaagttttttcatccatatatcaaaatcctatccatatttcgctaaaaatattatcccgataatacgttatctgctaactattctaatgcttgtattttttctacatgattattcagtcgcaagtcaacttttttggccttcatgctaaatattttgttatcttttaatattaatgttatcatcttcgcatatatatgtgtctttgaaatctaaacattggttcaataactgaaaatttgtttatatcctcaaatatattattaacatattaagtaggtttgtacaccatgtcatttcatctatgcatcaaactctatccatatttcgctaacaatattatctcgataatgcgttatctgctaactatccagagttttatcatatctctttataggggtatatttgtcatatagattttagttgaaaagagatacctaaataaatgatcttcatgtatagattcttaattatttgatggttcctgtatagatttttaaatcacccaaaaggaaaattgccctacgactacaataaaaaagctggtacctacatgaactaataaaatcaagcaaaattgtattgacctaaacgccgtaattaagtcaatactaatatgtgttgactaaatgccaattagatcaataatcgaaagacgttggtcccaaagcgtctattcaacaaaccaaactttttttcttttgtgtacaattcaacaaaccaaacaacatcgttttggtcatgtttttaccgtttggctcaacataatttttaaaaatatataaccaggatatctatgattccaaaaaactcatgaagactttttgaatttacctcatttgaattcttttctttcttttttagttaaaagattttaaacaaattctctaatctgccaaaaaagattattattttgtttaggaataatttacaaaaacattctgtgtaagtggcattattttttatctgcttgttattgagcatgagagtttgtttctacttcttcgtaattgtttaagaatttttttgtaaacttaattgtttaaaaacgcagtctctttctcccggagaggttttgggacgacattaaatgcattctttattcttgttatgttttctggtagataaatttatcgtatcgcttatcacaattaaggaagataacacgtgctcccacacaaaagacagaaaaaccatatgcatgccgaatgatatttatgttctgtccaatggtttgcgaatttcaactatttaattagggatggctctttttactataaagagagaatgagatatttaaccaaaaatgtagatctcggaaagcatgttagaggactgacgactagattttcatgcaatctttgacattaattaactcatattttttcatttttcttggtttgttaaaatgtaaaattttggagtctttttttattaacgtttttagtgtccaaagcttattgtcgataatatcggccgtaaagctgtgactcttgaatctgccggatataaggcttcggtcactctgcttccgactagtagcaaggttcgagtctttatgtttgttggtgactttttctatttaacctattttgtaactggattttatctgtgtattgggcgttagcacaagtccgaataagttgtttttaacaaaaaaaaaaaataccacatgtgaaacgtgaattagtttttgtaaataaaattgaactagtgcatcaaacatttactctcaacattttgttcattatctacttagttaattaactaatattctggcgaaattcgattatgatttactctaaaagtttctgaaatgtatcgatgtgattcacaaaaggatatgaacaaaaaaatacggtaattttttcttaagtaggaaaataaatctttaagaaaattaaaacaaagaatcttaagtgtttaagaaaatacattttttaactagtacaaaatttaactattttcctcatgaacaaatctattttgtttaagaaactacatttttattttttacaaaaacaaatctatataaaattaaataatatgatctctacttacaaaaaaaaaagtatttctactcagaggaataaaatgataaaataaaataaaatctgaaacttaaaaaaaagtatgtaaaatagtaataaataagtccaaaattttacaactagatgaaaacaagttgtagaagattctgttttggcatttaagatctctctctcatgcaacaacaaaattttcaaaaaaaaaaaaacctgagaactaattgactccgttgggatggaccccactttagaaaaaaagatctaattggtagatagacagaacgaatcaggggcaaatccgtaaaataatccaacaattaattcaaaaaaaaaaaagtaaagaaagagaaagaaactcatcaacgccacgcctgtacaagagagagagagaataataagtttacagagtagagaagcttttaaattcgaatcaggggcaaatccgtaaaatattcctttttttttttcctttttcctcactactttatatctctaacctttaacttttttttttcttcttcttcttcttactcttcgtcttcttcttcctcctctgtgtctgttcatcggaaaaggagattttgtttttttgttttgtttgtgtggcggcgtagcc

SEQ ID NO: 13964 - DNA, 2557 bp, Unknown
  misc_feature (1)..( 2557): cDNA_ID_3020945_gDNA_ID_2214679_Annot_ID_189244 3000 nt of promoter + ATG
atagtggagtatttatgaagaaattaatttgtttagtgacaaaaaatataagataatatattttttatatagatgtgagtatttaaaatctttttttcttgtaggattaataactgattatataatttcatattcgacaactatattaagatactttaaaaaaggaaaaataacaatagatataaaaaaatataaacttttaaagaaaacataagtaaaaaaaaaaagaaaaaaaaagtagaacttctaaaaataatctcttcaaatgtttttgtaaaaattaaaaaaaaagccaataaaagaaataaaaaataagatattaaatttataaacgaaaaatctaaaaatatgaaagaattctgaatataattatgttacaaaattcataaaatgaaaatataaataatttaaatttattttaaaattttattagtttagaaaataagatatttattacaaaaaaattctattacaacttaaaaaaaaaaagtcgaagtgataagcttttaaggccgtcttaggggtgtcaaaatgggtaacccaactcaactcaacgagtttaaatcttctcaatttcattgcttatatatttaagaaattcggaaaaatattgattgtattaaattggtttagatgtgttggttaaacttaaatcggcattggtttagagattttagttggtttaatttatttttacaaaacttgatgggttaattgggtaaaccattacaacccaactcattttattcatcaaaccaattgactcaataactcatttgacccatcaactcatttgagttaatattttcaactcattagggttcatgagttgagttgagttgagttgacccatgaattttgatccattttgacacccctaggcccgtctacatgagatttaaaacgaccagtcatggttagcaaccacactgaatatttttaatattttaaaattttattattttatgtacaaagatatttataaaacggaaaaaataatatatgaaaaagagaaatgtaaaattttggaaaataatatatagaatatattaaacttatattcttatttttattttgttaattttcttctttttcaaaaaaaaagaaatattaataggaaaatattttcaattaacactagattttttcaatatatataatcaccagatgcatctcattcgatcataatttataaattgtacacttgagtcatctgtcacgattggggctgattactactcttaataatgccgctttatatatatttttatcgcatatgccactacggatacttttctcgctgtcagactgtttttgctttatatctttgacgagttgtaaaacatgtgttggtataagatgttattaacataaaagttttgagtctcaagaagaaggattgatgacaagcgttattggtcgatgtttgtgcttcttcatatcggttatgaaacataagaccttgatttgatgttgtttgagttaaaattttgggtttaaacaagaaggatcaacaacaagcagacatgttttattatctacacatatgaccatgttcaatttatttcctacgcaaataatttgtaattttgtaacattaaggattttggtttgaaaagtttcaatacaaattacttgggacaagttgtgtggtatgctaaaaaaaattatttcgaatggttattcagtgtttctgacagatggaacatcaatcgcttatgcccagaaagtgttacaagctaataaatctagggagttagtgttggtgggagtggaggaacatacattgcaaagaagttctttttggaaagatgtttaggccaatatagcgataattgtttacgtgaactacaaataaatgcaagtatggttaatgacctaggtaatttattgcgtggtttaaaaaaaaaacttagattgtatatataaatttacgagacgtaataaagataataaatttaattgatgagagttttcttgcattatgaacaattgacgttatagtctaggtaataaaggtaattgaaggagaaagagagaaaggtagatggattgcgacaagcaagagagaaatacagaaagaaagtcattatcgcgaagaagaagaaactacaagaaagcaaggcgtattctgacgacatttccgacagttctccgacaaatttttgagtggaaactagttcttcggaaatacttccgtcgcaaatgtcttcggaaatttaaacattttccgagggatttcggagaaatatacttccgtcacaaatgtactcggaaatttgtaacttttctgtggggtttccgaggatatattaaccgttgtactattttgagagattttcgaggacattttgaccgttgtttttttccgaggaatttccaatcggtgaatatagccgttcgaacgtagtcgttgatgtattcgttcgaatagccgttgtaaattcaaaaccctcggaaatcccgaggaaatctctcggaaatttgcctatatattccaaccaatttacatctttggaaaacaagaaaaaaactagaaacaataccaacagaaatg

SEQ ID NO: 13965 - DNA, 3000 bp, Unknown
  misc_feature (1)..( 3000): cDNA_ID_3020955_gDNA_ID_2214680_Annot_ID_189261 3000 nt of promoter + ATG
gttgatgcagctttggagttgatgaaaacgaggaaggaaagcaatccagaattattcaaaaacaaatcagttgtatttgttggatcgtctttcttaaatgtgattgatgagtcatacatggagtttttggataacaaagagggatttcagtttcagtctgaagaaatcagtaagctgataatagaggaagaaaccaagtgcatattggctcctttctgtatcaaaggaaaatgctgggttgccttgctcatccacttggaacagaagacagtttgtatatgggaatgtgcagcttcttatttaacagaagaagtcaagaaaaaatatgttgctgcctactctatagctatgccatacattgttcggaacatcctcaaaaaagaagacatggatgtctctccatttagcatcaaagtcctgaccacttttcctcaggtaacttctttaaatatatcatagtcttagaaatgaacattccgtaagtcctgacttctataacttctttgcttaagtaattcttttggtttttggttgtaggctcctagaaatgaagagtctcgtatctatatgctgaagtttatggaatgctactcaatgtataccagccattcaaaccttgaagggaacataattcaaaacgttatgaataaattggctgctgacatcttcaccgaattagggtcagtcactttgtagaagtagcagacttctaatcaaaaagtagtggagtataagatagatttatcagcttttgtttcttatttcataaaactttgtcatttgaatattttatgaacatctgtatggaacaagatttatgaagtttatttagttcaactcctgttttacaaaattactgtataatggttgtttgggttaacaggtgctttgatttgaatggaaaaggactttaaacatgcttttaaacagggtttttaaacgatttacaagctgctttataaggaatttaaaagtgttgaaaaagctgcagtagcggttattatgaaaaaaatttacaatcgtttttaaaatgatttacaaccgtttttaaaagagatttacaaacgatttataagctgttttaaaagcgttttaaaagtgttgaaaaagctgcagtaactgttattatgaaaagatttaccaccgtttttaaaatgatttacaaccgtttttaaaagataatttcaaccgttgaaaaagttacagtaatgttaaacactgtatctgttactaattgggcctaggcctgttatttagaaaaacaaactgttttagtttaaaaaacactaaaagcccaaaaaacactaaagcccaaaaattcactataacctaaaaacaaattaaacagggattggctgctgacatcttcaccgaattagggtcagtcactttgtagaagtagcagacttctaatcaaaaagtagtggagtacaagatagatttataaactttgtcatttgaatattttatgaacatctatatggaacaagatttatgaagtttatttagttcaactcctattttacaaaattactgtataatggttgtttgggttaacaggtgctttgatttgaatggaaaaggactttaaacatgcttttaaacagggtttttaaatgaattataagctgttttaaaagcgttttaaaagtgttgaaaaagctgcagtagctgctattatgaaaagatttacaatcgtttttaaaatgatttacaaccgtttttaaaagagaatatcaaccgttgaaaaagttacagtaatgttaaacactgtatttgttactaattgggcctaggcctgttatttagaaaaacaaactgttttagtaaaaaaaaacactaaaagcccaaaaaacactaaagcccaaaaattcactataacctaaaaacaaattaaacagggattggcttctgacatcttcaccgaattagggtcagtcactttgaaaagatttacaaccgattttaaaatgatttacaaccgtttttaaaagagaatatcaaccgttgaaaaagttacagtaatgttaaacactgtatctgttactaattgggcctaggcctgttatttagaaaaacaaactattttagtaaaaaaacattaaaagcccaaaaaacactaaagcccaaaaattcactataacccaaaaacaaaaaaagaagggaaccgtgaaaagacaacaaaaaagtaaccaaaaaaaaaaaaaaaaaagaatacaaattgtcgtcctcgtcttcttcctttcaacaatctgaagaaaatctgattatccagcaaaaaggaagcaattgaaggtaactaatttacgaaactgaagtttaacatttgggtttgttcgatttttgccgaatctcttttttgttctagcatttctaggtttttcggttgaaaacgaaacaagtaaaatagattgatatttgggaattttgaaggagtgttggaaattgttatataattttgatagatttatgttttaaagtttgatatttgggtttcaaaaaccttcaaagaagatttcaaatgccgattaacttctctgttgtagcaatttcaaagttttttcgttttgaaacttcaacagtaaatagattgatgtttgggtttgtgttttaatttatagatcctcacttaatttatgggttaccagttgattggatttggtttggaaaaggtttttttgtttctattttcagcggctgtgttctttgaaaaggattaaaattttgtttttggaatggtttcaaaacggtctttaaaaaggattatggagtaatgactgtgttttacaagggtttttaaagtcttaaaacgacttgtaatgactttgaaaaatggttttacaagggtttttaaagttctttaaacgacttgtaatgactatgtttatgtttcgaaaactacaaatgcataatggatttacaaaaatggtttttaaaaccatttcaaaactgtgttaatttaatgactgtgttaatgtatttaataaggttttgagaaat

SEQ ID NO: 13966 - DNA, 3000 bp, Unknown
  misc_feature (1)..( 3000): cDNA_ID_2992826_gDNA_ID_2214681_Annot_ID_189272 3000 nt of promoter + ATG
gataaggatatattttatattaattaagaattttcaaaatattatcaaaagtatttttttctttcaattagttaagatttaggatatttttatttataatttatttttgggttttatttttttgcaaaaaatgttttaattacattttcttgcagttttattctttatctccaaaataaatttgtcaaaccatgaatcaaaaagtaaaacaaaatataagaaaattaacaaaatttttaaaataatatatcaatcaaaactcttgcgacgagaagatcaattctagctttaaagttttaaaaaatcaaatgtaggtgatcataaggatgtttagaaactatttatgggcgttatagtactttataggattgattccactttgaagagataaaacgtaagttgcaaaaactgactaaggtttttttttcttgtttctttgttttggtcttaaattagagaaaaacataagctgtttctttttaatttaattatgaaaagtattaatttgaattttataaccaaattattaacttgattttcagaaaatcatacttcaaaaatcaacaattaagtcgaaaaataataaattaaacaaaagataagctaattattttaatataagtcaactagattttaacccccaatacactgtatgaacaatttcttttttaaagttagtatatataaaagtttgcaaattgaatctatctataaaataattttattttatagtttacaattgttattaagtaacgtcctgccgaacccgtcccaccaacccgtcccgttaaaaaaactcaattttttattaatgctgatcttatttatgataagtttatgaatcattgtctaaatattttgtaattttgtagtatttatatgctataaaatatctctacggtttgttgattataatcaaattattataatcatgcagaaaagcaatatcaaaaataataatttgtaaaattattccaacaaagaagccattgaaaatgtaatcgaatcaagttatagtattttaaaatggtgctttttctattatcgtgtagttaatgcaatatccaagtaggaagtttttcctagcaagtataaatctttagaaaaaagcacaatcgttgcatcgatttccgtgaaactctctcttttgcggaagagtttcgtttcttagatctagtccgctgttttttctttgttcttcaatcgttggtcaaatctactcaatgaaagtccaggagtgggctgaatctattctctgtcaacggtggtgtggtgttttcccctcgatgtggatgtggctcgggtctgttggaagggagttctacagcgtttgtcacacggttattgacgttgtgggttgcttcagttgctccggctcatcccttagtcttgagctccgcccacggcggaagttggggggataaaggagggttcgttgttcgcacggtggttagctgcagatgctttggatcttagagggctgttgtggatttcgcgtttagaggttttggatttgagtcaccagcttctagatccactacaattttgcatccatcgagtcagattgaatcgtgatagcttaagaattttttggctgttctcggttgggagagaggggttactgcccagtgggttgggttagtttttcaggatccgattacgtcgatgtgcctaatttgagcgactaactttccgggagatttgtggtgtgttggtgcttcagaggggtggatttgacgaagaaaaccggtctctttcatcggagaatcccgatctctggttgctacctcgaatcggtctttaatatgacttaggtacggtaagcacaccatcaaaccgattaagactaaaactttgaaaatttctcttcaaccaaaaacaatatgatctttcacattcttcagcctgtttctaactttaatctatgtatgaattgatttatgcatattattcaatatatagttgtatcatatacatgatctcagaacacttggtcttgcccacccgtgcaaggcagaatgagggtttggtattttgtgttttttttaggaacccacggcgcgggtcaacccctagtgacagtatactctttgacaaaatattcttggattcacccctagggatgaacctatcatattcacccttcttatttagtcgatcaaattacaacaatatgtcatgtaatactatatttaaaaatcaatcaaaataaaaatcacaaaataaaaatattaagaaaacaaaatctatatgcttttaattaaacaagattaattatatggcggtttgagtttataaatatgaattaggatttagatttacaattaattaaaattatatgttggtttgggttaatagaaaaatgattagggtttaaacgaaattatatgttgatttgggtttacaaatattgattagggtttagcttttacaattaaatcaaattatatgtcagtttggatttatcaatgaggtttagggtttagattttacaattaagcaaaattatacgtcggttttggtttatataaaaatagttaaagtttagattttacaattaaatgaaattatacttcggtttaggtttataaaagagttgtaagggtttacattttataattaagggaatgttcaacaataaggcacgagaatcattttccgagacactttttacactaattcttatattttggaaatttgtacccttaattcaaagaaatgtaattggcttagttgtgttgcaaaaattattaaattatattgttcatcacctcttcttgtaaaacactgtgactctctctctctccgaaataggaatatccatttttctcaaactaaactaaaataatgtgggtggttgaattggtgaaagaccaaatcgccgtaaacacccgcccacagtcgtcggttttggttctggccagatctaatatggtggcttcattcttcctcctgatctcttaatttgaatcggttactaggcttttgctagtggcaatg

SEQ ID NO: 13967 - DNA, 3000 bp, Unknown
  misc_feature (1)..( 3000): cDNA_ID_3021038_gDNA_ID_2214682_Annot_ID_189276 3000 nt of promoter + ATG
cataagtaaaaagctaaacatgagagaataatcataggatcaaggtgaagtggaataacctaacaaagactagtaagtgaaagaaacccaaaaaggttaaggctttacgagaaattgcaacaagagtgagcaaaattcataaacggagtatatggttttgtcaatcaaatgagtttgtaacttaaatacgaaaaacgagaagcgagaaccgaagatagaaactaaaaaataataatcaaacagccgagtttcgacgaaacaaattttacatgaaacataaatccaattcgatataagaacatgaagaaatttgggggaaataccggtggagagatcacaagagagaaagtcgtgtgcagcagtggtggtggacaatgacggagaagttggagagaatttagggtttgggaactaaattagaagtcgtcgtcatctccgtcgtcgtctgagcgaacatagtcaccggaaaatcatctgcgtcgttgtctgcgcaaacagagtcaccggaaaaactgaagaggatgatgtcgcccgagtcgtcttctacaacaaacagtaatttgcagttttttactggattagttttttacgtgtccgaaaaagtcttcaaaagtcaaatagggtaactgcaaattcgacgagtggtttggttaagggatctctttggttaatgcgggtttggtttgaagacaactggttagggtaatagtgtaactttgccaaggcaaagtgctgatgattttaaagtgtcgaaacacgtctaaacttttgaaaaagtgtctaagtatgcaatattctcaaaatataattactagtttgacttattagtgataacagattttttttagggttaaattggaaaatagtcactttccgaaacataattggtgaactaggcagtttactattcacaattagatttttagtcactcctttttttctctaccaattacaaaatcaattataccctagatcatctctactaattacaatccatgtcattatctatcccacgattatttatgtaaattaatttagaaaacaaatttatattgatgagtatttcaattattagattagaggggttataaaaagaaaagaaaaaaaatatatatgtttattataaagagagagagtgtgtgtagagatagaaaggggagtgagtgatacacgtttctaaatctctacctcatctagtgtcatacattagtctctctcctcagccaaaaggatctcaaggtaattttcaaaactcccactaccccacccctgcttctactagacgctgttttattatacgaaaaagtaacgtacatgtttcaataattataaatagtgaactgcctaattctataattaagtttgagaaactgactactttgcaaacacaccctttttttatgttatgacagatttttatctttaaacaaaaaaatctgtgcaatagtagcagttttgtcaaattaaaaaaaattgccagaatgacatacaatcgcagacaaaatgtttaatgtgatgacagactttttgtacattatgacagatttggagtatggttaaaaaaactgtcgtttgattacaggtttattaatcaaaaaaataattgctggaataactttatatagtgatagcaaatatgttttatgcaatgacagatttaaattttaatccatcttataacaaatttttatttcttatgtgatggtaaattagtttttacaaaaaaaaatatttgtaagatatttgtcacgtgtctttaataatttatacaacaaggttataaaagactttttataagtacgacagatttttttttttttttttttttgtgaaaactaataaatgacaacacaatctaacttaccatatatttctaaagttttagaaccgtttctctctactcacgacgccactatcgtttttctctctacttacgacgccactatcgtttttctctctactcacaacggcacaatttttatttttcaaactaccttggagatgatcaagtattatttcttttagggctaaaattctacttgatcaaccttattatctcttacttttttggtcaaaatctttctcttagggttataacaagcgaaatagagtgtgaggaaggattaggtgtttctcgtctgtgcaagtggacatttgaggataacaaatggttgttcttcattgataatcgtagaggttgtcgaatctagaagtcaaccgatgttgtttttcaagcaactcagctgtgtgatacctgatgatgagagccttgccattatttctgataggcacaaatctatcgggagagcaatcaatgtggtttattcaaaggctagtaggggtatatgtacataccatgtgtacaagaatattttggtggcaacgaggcgagccttgtaccgctcaacactgccatcaggtttccgcttaacccgataagaagacccgttgttggtgcaggaattagcacctccgtcaataccggtttaaacaaagggaaatgtgaatctaatcaagaattcgacataaccgggatatcccggtttgcctattaatgggcaaaagttgtgaggtcgccggaagacctaattcaatggatagagatcgcccagccgacttcctgaacttcggaaagagaagacttccattttgaaagaagaggatcttgtaaagaataaaagaaatgaagatttaaaccttagataattagaagtttatcatattctgatatcaaggaaacattgtataaatagaggggtttgtcctctattcaatggatccagaacctaatacaaaaacactacttttctcatagcaaaaaccctaacttctttttcaagcaactttgttcttcttttccgattactttagagctaagagagaagtgaatttatctaactccttagtataaattcattgtttgatttacaaaatcaacaattggcgtgccttgtaggggattataaacaaattttctctacgctctcgcaagaaaacatg

SEQ ID NO: 13968 - DNA, 3000 bp, Unknown
  misc_feature (1)..( 3000): cDNA_ID_3021017_gDNA_ID_2214682_Annot_ID_189283 3000 nt of promoter + ATG
gagaatggtttggttttgattactgtatcgcgctaagtgttttgggctaagtgactgaagagggaaatgaattactgttctcgcgctaagtgtttttttggctaagtgttggcggataaagtcattttagattcccgctcattaaattcctatcatagtgtttattaacccatattataaagaaaccccaaaaaaaaaccctaccatagcaggaacagaaaatgagctatcctatagtgctatcaatgttgatatttattgtagtggtaccaaatgctcatataatctataatatacatcatacaaattttctatatcttttcttgagttgaaataatgcttggaaaactaatactatcaaacaaatgcaataaatcataatagcgacgagataatcatataaaccatcaaatttagttctaggatcaaaaacagatgcaagcaaattaagaggtggaacttttctatagtattttaacaatttatctctcatactagttatgcatgatgacaaaacagtattattttcatgttcatgcatcacatcagcaatattaacaaattcatacaaaagtaaatgactagtaggagataccgtggttggaaaaaaggacaatcgttcctctctcttctctctcttcttaacctatttttcggatctagggtttttccatggccgcctctgtaaggagcttcatcgacgaaggttgggttagcggctgacacgggagtgggcgcctttcttctccggtggtgtgtggtgtggtggatctatggtttcaatgcgaattggtggctctcctcacagcagccatgagatgatgttcctccttgtctgctggtcatggacgctagcggattggaatggattctttaggctcgacagcttgtgagctgtagctccggtgagcggcagaagtcggactgtagatcggtgggtttcacctctttgcgacgagattaacagtggatctttggtcggatcctagatggcgagctgcgggtgttccttagctggatcttggtggatgatggcttgcctgagccagagaccgtcttctccgccgtagctagttttcccttagccggatctgaagtgaggtttgctttgggagaggtccttgggtgagcatcagtggagatgggggtaagtttcgaatccttcgtcttgctaggttggggagaggagggattgggtctcggttgtggcggttctcccttttccgaaaggattgttccaggttaggcttgttcttggcgttgatttgcggcggggttcgctagctcaagccaaaagtttgatgtcgaggtcgtagccacataggagtcgtccttgctagcgtcggttctagaaggcgatgttcgtgtttccggtgtaccgcacggttctgatcttgttttcgctgggtttgttttgggcttctttcattttgtaaccgtgtatttgtcgtttggcccatcttccataagcccatttgggattcttaataaaaaaaaaatgactagtaggataataaacaccggataataaaaatgttgagtgggccattaagctaaagaactgcgattttgttgaataaaactacacaataaatgtttataaccaatagaatcaacaagcatataatatgttgaattccactgagtaggaacatctcgagaaaactgtttgggggatatgttatgcattttacaaaatcaaaccattttttcattaattgtggatgaccccataaataattcaacgtagttttaattggtgaaataagattattttgagaaaccaataaaccatcttgaacacataaatttaaaacatgacaaatgcatcgaacatgaaaatgttttccacctaaaataagactataattatttattaattcatcaatggaagcaatattagcggatgcattatcaaacaaaatagaaaatcttttgtttgttaaattatatttttctataattatttttattaatttaaaggcatgtctcaaatataggatataattactagaatgtctcaaaaataggttatatcctttatctgggtttaactagtaattttctattattctctttgataggaataaaaataaagttagtattaccctttaattttttttaaaacatttttgtaaaaaattgtttgttttttttttttttggaaaaatctgctgcttagttgtgacaagtttatttttctgtaacagatttatttgtctatgacagattttttgcgacattaaatctgtgaaaaaatataaatctgtcgcaaaaaaaatctgctatcattatataaatttaaatatagttacgacaaatatttaatttgtaaaaggctttattatgaggatagacttttttacgatgacaccatacactttttgtaaatttgacagagtttttaacaatttggcacatttaatttgttttagtggcatcagacttatatttttaaaaactaatctgccataaagtaacatattttatgatgaaaatataagggtttgttacactatgaggcactttcggagaaacttaatgcacttaatacactttaaaaactagaggcactttgccttgcttttggagtgaaataagacatatatacccccacgatttcgtttgagatatcattgcaaaccgggttatggtttcgtttggtattggtttaaaatatacggttataatgtgcggtttagaaaaaacagtttgtgcgtgacgacgatcgtcggatttcaatagattaaacggccgagattaaacattgtaacttcccttgctttgcgagttaaaaaaaaaactgaaacacgagatcaattcaaacacataagattctgggtttcaatcatcgatctttggtcaactgtcgtgtccaaggagctacgattgttgaaaactgatatcatgaaattaaaacgaaaatccgtgcattctatttgttatgggtatcagaatataaccaaatctttttttcgtttatatgtacagggatcgatg

SEQ ID NO: 13969 - DNA, 3000 bp, Unknown
  misc_feature (1)..( 3000): cDNA_ID_2994320_gDNA_ID_2214683_Annot_ID_136697 3000 nt of promoter + ATG
cttaatcatcaattcatcatctctgatttagttcgtatttgtctgattcagttcctcctgctatgaaacttgatccgagaaggaaatatgcaattgttgttccttttaagttttaaacatggtaactttgtaaacaaaacacaaatagtagagtttatgtgcaaaaaatcagataagataaaactaaaaaaagcatgcttaagaggctgaagttaaaaccaatactcaaatgatgctatcactagccatttgatacgaataggatgaatgtgattatgagaaataagttgttgaaatctagcctagttaaagacgttagagacgccaacactaggctagtcaaccgcatttaaagaaacacaaaaaggcttttagttttgcagtagttatggacatatttgttgctccaacgtaactcctcttgatgtcatgaaagaaagaaaagataaaacccatagttttggagtatgtaataagaagcttagaaataaagcatgtaaacataaatcaaattgagtaaaaaaaatttagatgaacaaaacctttttaagaatgtttttgtttcaaattctcccttttgattctacgacattttagtaactctccatatttatatgttagaaattattctatttcttctttattgataaatactaagaatgtattccaccgcgatgttgtgtagattgaatatttggtaaacaaaatatataaagttcaaaatatatgaacatttaattgacacaattgtttgtaaaatatataactttttaaaaaaattgtgataaaacaatacgaaaaatggggaaaaagacacgattctaaacgactagaaataacattgtaaaaagacataactgttaaaaacaatttctaattaataaatttatatatttaacgaagagtttcaatataagaaaatgcaaccatcaaaactatttattcaaattaaaaataaaataaaaatgttttacgaacgattttgaagaaaagacgaaaatggaggggaaaagacacaattttaaatgaccagatgcaactttgtaaaatacaattgtacaaaatattttttcaattattaaaaattaaaataaaatattaatggagggttacaatgaaaagaaacaaccataatatgtatttattcagatttaaaataaataaaaatattttactatccgtaacaatgaaaagactcaaccatatgagatatttattttgattttttattatgtattaaatatttaatgaagagttacaatgaaaatatttaaccatataaaacatttgttcagaaaaaaactaaaagaaaaataggttacaaaaatattacgataaaaagaggcaaacaggtgaaaaagagttataatctaaggacgctactgaagataatatatcaatggatgcaacagttcgtcaaataaattaaatgatacaatggttcataaaaaaaaaaaaaaaaattgcaatggttcgtcagaaaaatcaaatgttgcaatggttcaactgaacaattgcaaatatttaaatgtattttagtaaattcaacttttattttattttatgattacattccgattgtaatttcgtcagccttacagctggaaaactcttgatcataataacaatggaaaagaagatgttaaaaaaaaaaaaaaatttatatagagacaagcgaccacatatattaaatatgccaaaggttgtgcgttcgtcaaacaaactaaatgtcacaacgattcataaaataaatcaaaatttgcaaagattagtcaaataaattaaatgttagttcaattaaatggtttgcgaaaattcatttacacaaattaaaaatatattttgtgaagttttataccgagaaacacgattatagatatcaaatatactagatgttgcaacggtttttattaatattaagggttacaatagttcctaaaataaacagaaaattacaatgatttgttagtaaaccaaatgttgcagtagttcaactaagcggatataaaaatttgtttcatattttaataatgaaaatataaaaaaatgtatgttgaagagttatgaacaaaagttaccatcgactttaacgttaaagagtattttaatgatgagatacgataaaaaaaacaactgtgaaaaataaccgtaaatatttcaacaaaatatgcgataaaaagatacaaccaaaaaacataaccataaatatgtaacaaaaagttacgttatataaaaagatacaacaattcagatacaatcgtaaaaagatacccaactaaaaaagatataaccgtaaaaaagtcctgactatatttcaatgaaaatacacgataaaaagacagaacgaaaaaaatcagaaaaccccgtaaatatttaataaaaatttacgataaaaacataaccgttcagaagtgtttgcgatataaagacacaaccgtcaaatttctttgaaaaaatacgataaaaagatacaaccgagaaaaacccaaaaaactcataaatattctatcgaaaagttgcgataaacaaacacaaccattcaaaagtgcttgcgataaaagaacaaccgtaaatgtttcgactaaaagttacaattaagagacgcaacccgaaaaagttacagtaaatttgttaacgaaaatttacgatatataaacgtaaccatttgaacttgtatcctactttggtttctaataaaattcagatgacaaagaaaaaacgcaaccattaaaaaaatgtaaaagactatttattgagattgtcttattattattagatttacttaactccaaaaaaaaaccatggaggaggtaagtccaatacacccaacccaaaaaatagacaaacccagcccaagcccaaaaagcccttctatttttatatgtagacgacaataatttttacagacctcaaagcaaaattaataaattatcgtcttgacgaaaaatcgtagaggaaaaaaaatccccaaattgtgtgaccggaattagggtttcgaca

SEQ ID NO: 13970 - DNA, 3000 bp, Unknown
  misc_feature (1)..( 3000): cDNA_ID_3021062_gDNA_ID_2214683_Annot_ID_136698 3000 nt of promoter + ATG
atatttaataaaaatttacgataaaaacataaccgttcagaagtgtttgcgatataaagacacaaccgtcaaatttctttgaaaaaatacgataaaaagatacaaccgagaaaaacccaaaaaactcataaatattctatcgaaaagttgcgataaacaaacacaaccattcaaaagtgcttgcgataaaagaacaaccgtaaatgtttcgactaaaagttacaattaagagacgcaacccgaaaaagttacagtaaatttgttaacgaaaatttacgatatataaacgtaaccatttgaacttgtatcctactttggtttctaataaaattcagatgacaaagaaaaaacgcaaccattaaaaaaatgtaaaagactatttattgagattgtcttattattattagatttacttaactccaaaaaaaaaccatggaggaggtaagtccaatacacccaacccaaaaaatagacaaacccagcccaagcccaaaaagcccttctatttttatatgtagacgacaataatttttacagacctcaaagcaaaattaataaattatcgtcttgacgaaaaatcgtagaggaaaaaaaatccccaaattgtgtgaccggaattagggtttcgacaatgtcgtccgggaagccaaagcaaggcgacacacgattggtggttgctgccactacggcgtcggcattgatggaagcgaagaaggctgatcacggaggatcttcgtctatcgttgagtataaaccgccggtgatgcttgaagatgaagaagatctagaagtaaagctccgacgtatccttgagaacgttcctgttcgtgttagtaatacttctggaagttccgctggttctggttctggagatttccatcaggtaactaaactaagcctttctcttaaatcgataaggctttgtatctggaatctgaaactgcagataaggctttgtattttgttattaggcgtagttaggtgtggtaatcaattacgagaagttcattgttgggatctgaattatcttagtggactttgtgttgacattgttttcttagttttgtgatggatcacaatgcctttatgcctatataagagtttgatagaatgttccatagactatcctgtattagtcttttgatggctgtgatctgtgaatgatttcaacttctgtatatgaattctgttcttcagtaactgaaaatcagctggattgtttgtgaagaatgcctggtcttttgttcttaggcatggctaagtgtggattcgaagctatagtcgattaattactagaagttccttgttgtacatgtgataggaatcttaaatttcttagtctataagtgttttgtgacgttgattacttagtcggtagagcttgaactgagagtattagttgcgagaagctcatgtgggtattagtaattaatggttgatggtcgttgtgttgattctataggttgtggctgagtgttatctgaagtgtggccctgattattgataaagcgtgtgtacatcattttcttattatactagacatctaaacttgtgcaatactgatgcattgtttttctattacagtaccggcaaatgaggcggagagaacaagaccgactaacaaggatggatattgactataacaagcggttaaaaatggcagagtttactataagaagagaagagaaacagaaagctgcagaggaaaaaacatcgaagaagcgtttgaaacgccaaaagaagaagcagaagaaacaggagaagaagcaaaaaccaaacactactgaggaagaagtaaagcaaccgagagtaggagaaatatcatctgacgaaggtgaagatgaagtagaagaagagtctgtgctagaacctttacgtccaatgtttaatatcaagttccaagagaaccgttcatagcttttattgtgacatgttacatgattccaaaactatctttgtgagattcgtttctttctttccttttgttttcaacaatgtacgggaaaaagaaatggagcaggttttaatcggcttttgtattggattagggttcatcaaatcaaccaccaatgtatattgacaagtaaaccaaaattctttagtcgaaaattgttaaaacgactaaactttggtgccagcagctaagctccatacacgcaagttcccacttttgtgtccactgaatagcaatccttgaggaccaattgtgagtgtgccaatcgtgtggtcccatccaaggaagacgatatcagacatttgtcccaacataagagtgatgttacagtgccagtatgttgcttcaaggtcattatacattgcagggtgttgagatcccacaccttgattgttttatcgacagagtatagcacttgacctccaacaacaaaagtacaaaacaagtgacttcaccactatgatgtccctcgagagatgtcaagtatttgaatggatcatcagactcagagtgtgtagtagctttccagactaagctactaccacaacttgttccagcaaaaagcattccgtttaatataaaaataccccatctttgaattgttgatacaccgatttaacatctctatattccaaagtaatgtatatattgttcacaatggaaaatggagattaaaggaacaacaaaaattgtgaaccaaaaaaaaaagaaatgccaaaagatagaatcagatcaattactcaaagataagaatggtttaaaagcaaaaaagaaatttagttaaggccatgaatggtgacatagaccgcacaaactgcttaaattgaagagacgactatgtgcgtaaaacgaagagactcaaaacaattttgggattcgtgagagatattgattcgctgcaatggaagaatctgttcatcaatcgatacgattcggctcaggtttcttctctctttctctcattgtttcattgttctacgactccattaacgtgtagatctaccgattcatatgatttctgaactgatgcagttgcagatttaatc

SEQ ID NO: 13971 - DNA, 3000 bp, Unknown
  misc_feature (1)..( 3000): cDNA_ID_3021077_gDNA_ID_2214683_Annot_ID_189291 3000 nt of promoter + ATG
agacccatttgaaccaaataacatcatcccaagatactttgtttgctctagaccttaaagattcctaagtatggcctgcatgaaatccgtttaagttgcatggatcagccactcttgagtgtagaggtaaccgtattcgcaaaggtccttatgtctcaaacgtttcaggatatgacccattggtgttcacgaatcaaactaaaaacactcattacagccatattccactcgggcattgtataataagtttctcagcaaaaggtcttaggtttagtaaaacattccaattccaagtgttccaagttgtttcttcaagcataagtttttttgtaatattgtattattcttgtatcatactgttatgttccatgaagatggggtatatcctttggatgttctgctaaagatctgtaatttatattgttacataactagattctgtaactaaaattttttaaattttaagttatatattttgttaagattgtttgttttgtttaatgtttaagattgtataatagtattttaatttttaattttagaatttcacatatggtataaagttttattttaatatcgattcaaacccatcctaccatataactccgtccaatgacttttaaacatcattttgttatccttttcaataatattttaattttaaaaatatataattatattaaatctaaaaatttatttaagtttctaatctaaacatttaatatcgtgtatttaattaacaattaaacagaagtagaagcctgagatatcgaatacgcccactttaataatcattgagacgtaacttatattgctagtaatgacaacatttttctagtgcacaaagaaatcaattaatgtcaatgacgttaaattgtatatattgctaatatttattgcaaaagccaggttttgtagccaaaatatctccgaaaatatgtatattgatttggctatagaatcaacttgctaaagtgaaatattataattgttcaaatattataaacttttatcaaatttaaaatattataaatatttgaactttataataatttataagaaatttaaacattataaatatttatattttttactacaggtgaaatcttattattaacgggcttgagtcgataataatacatgacaatttactacggttgaaatcgtagaattaaaaaccaaaaaataattatacaatcttaaacattaagtaaaacaaaaaacattaacaaaacatatacaactaaaaaattatttttttcttaaaaagcatctcgattattttgtaagaagtttaaactttataaatatttagactttatgcaacatgtgaaatcatagaattgacgggtttgggttgatattaatacgagatggtatactactggcaaaatcctaaaaaataattaaaatataattatacgatcttaaacactaagaaaaacaaacaatattaacaaaacaaatacaatttaacatataattattttaaaaacaaatctcgattcttttataagaagtttaaactttataaatatttaaactttatactatctgtaaaatcctagaattgatgggttttggtcgacattattacgaaatggtatactacgggcaaaatcgtaaaattaataattaaaatacaattatacaatcttaaacactaaataaaatatacaatattaacaaaacaaatgcattttaaaatttcaaatttatagttataaaatatcgtctctcggtgtatcatacatttaaatcaaacaaaataatagcatatatctatagatcattctaaaaagaaaatttagttaataaaattaggtttgcggtgtaccactagttaatctctaatataatacataaagttaaaaaaaatctcaatatagttctctgcatatattatgatttgaaatttcaaaagcggacatatattacccaattgataaaaaatgtatgtggttaacgtcttatatcggctaaatatttagacaatgatttagaatcatattatacattagacccagatccaattaaaggtgatcattttattattttaacaccaccaatattaaacatataaaatcaacttgatttaaataagattgtatgaaaccaaaaatatctcgtggtataccgttacttaataacaattgtaaactataaaaaataaatatctataaaatgatatagtttataaattcttatctataataaataattagtaaattttttaagccactacttttcaaaaataaatcatcagtgtataattaatttatttctcgcaaacgtgagagagaaaagtaattttgttttatttgttattccaaaatgataacatctctagtttaactttgtccatgagaattgagatgtgcgtattaacaatcaacaaaaaaactgctctgttctttctcttagtagctcaatttagcaaatttctcaacgccgttctctcgccgtcccaatcctctttggtttaagaacttctccctcttcagtatttcttgatagttgagcggagcctctgtccgaagatattccggttttacgtcagagtttgcaatctgtcgctttttaaccgttagtcagcaaagttggtttctgtttcttcccgttacaattctttgtgaattgttttgaagtgattttctcggtaaggtcaattcaagagtgatctttcttcatgactatggatctagataaagctataatgaagatgtcaattaaagatgacgggtctttgattctttccaatcaagctaagtttagctctatggagaggaatagttgtagtattatgggcagatttctgaatccccctcatcaaaggatgtcaaattggatattagacatgcctagaatttggcgtttatactcaagggtccgtggcgttgccttatcacaagaacgataccaattcttcttcaaataagaggaagatctacttgaaatcctaaaaacgggtgtgtggactcaagatggtgtgttatcatg

SEQ ID NO: 13972 - DNA, 3000 bp, Unknown
  misc_feature (1)..( 3000): cDNA_ID_2710753_gDNA_ID_2214683_Annot_ID_189299 3000 nt of promoter + ATG
gaacaaattagaaagctcattaagtataaattttgaatagagaaatacgtctattcatgtattaaatcaacatttacaaccaaaactgtatattccatataacaaacacaagtttctgtattttatagacataaaataacatattaatatgttactgtgttattttatgtgtataaaatctagaaaagtgtgtatattgtctccttttggattatattgtatgaaaaacattaaataaaatataatattttaagaaaaattttaaaaaatgttttataataaacatagtaatactcaaattacaaaaaaaaaaaaaaaattttatataaattactagataagtttaccaaaggtggaagaggactcctccatattctttccaaaaagggacaagtttgggcattgtatctaaattggtccctgagtggaacaagaataccccagataaagttaaacacaagtatgagatggtggaatacgccagaatctagatttcctttattctattattcttaatctcacttcttcgacctttttatgcaaccaatataggcataatcattggaatatgatagaaaatatgttatttttaatgtttataagttataaccttttcgagggtttcattttaaatataggtgtaacaccccctcccgatcatattagacgattttgttttaacattatgagttaaacacattactataatacgacaagggtttttgtcgtgtgttgtgtgtctatataaattggtgtatctatctccttcttagtgtgccgtcaaagagagaaacgaatcaaaaccccttgagaggagcagcacttaaatcattgagagtggagaagctatagttgtactagtgctggtggtgtcattcgttcattaaaagaaagagatcgtgagtcactgtttcgttgttatcatggtgataggtcatccgtggagatttgagtgagaaagctgaaccaccattggataatagaacttgatctaacaaagaggacatgttatgactggagaagaatagaaggatgggaagagatcggttgtgacgaagaaaatggaagcggtgatggaggagacgtcacggatcttaaccgttcatcaccggaaccaatggctacggagacgagaccgttcaacgatgatggcaaaccagtgatgagtatattttgtagcagatcatagatggtggtgttgtgatcagtcgaaggaaagaaaaagaaagaagaagaagagaaaagaggaaagaggaagaacagtttcaagaatgtttcttgcagggtgaattcccgacagaccagagggactcagataaggactaaggtgtctctagaaagaacatgctgtctaaaatccacagcaactgacggatcttcaatcagacttaaaatcaagaagttatgcacgtttctttctggacaagtaattgcaaagtctgtcaaatctagaaaactctaaaaaaacagttcgagatggcttgttgacgacagcgtttgaagcttttattgaagtcagatcaaactgtaaatttttggagttattcatgatactatcggctacataatcaacggtgggatcacgtttctaacggttagttcctgacttatatatacgttactgtgacggttttgtatggaataaccatgatgagttttattgtttggttgggcaaacaagatcggtttgagcctaagcttttcagggtcttcaagactcagtgttttagttcttggttgatgaaggtgttcttggaagcaagctagtaacttgtctaaaggagaaaggagaagagagttgttcttcatcttcaactaggctaaggtgagggtggtatttgcggatatgcagtaaactttttccttctatactctttgatagttactgggtataggctcgagaattgtccttgttgatttatgtgaatttgtgtgaagttaggtttttagtaacatgatatttgaaatgcattggtaacatgatttgatatatttaatatatattaaattacaaaattattatgtatatgagaacataaaactaaaaagtatggaaaagatatttaaggatgttggactgtaatggggccgacgggtccgtttcaggtcattaaccactgactagcaatgagaggaaggatcgagttacggaccgtggtcttgcagaaaataggcttgagtagccaaggttaataagcttaagtagccaaagttaatataggcttgtgaagccataaagtaaaatactaaaactaaaaatgaaagtaaaatatattgttgtgagcaagacgcatgtttgtttgtttgattgttagacattctgaatctatgctaagtaatggttattgattatatttgaattttttttattgtatgtctagtgggcagagttgatctcctcattgagtaaacttgttttactcacccctttttccctaggttagtaagtctcaattggtgaattttaaataaagaaaagttttggcaagaccgcatgaataacatgctattttggcctgtatagcgggacgggtgttataataggtttttcaaccatttttggttacatgttttgtttgagctactgcaaatgattacaaagtgtgaggttaaaaggagctaacaaatgatttaatggctttgtttcacttacttcacttttagatacacacatttcatttgtttagaccaaaaaaaaaaaaaaactataaataaggaccgagttttatacaagttcaggtcaacggtgtcgtgattttaatgttatgaaacactttttaaagaataaaaaacttaccaacccctttctttatctctttcagactttcaacctcaccttctctaagcagaacttcatagttttgctttgctccaatatcttaaaaaatttggtgaacaaaacaatcattacttgcagtggttcaccatctctctatcctatgtataggcattttcataaacatactcatagagaacagagaaaacctaagaactcgaacc

SEQ ID NO: 13973 - DNA, 3000 bp, Unknown
  misc_feature (1)..( 3000): cDNA_ID_3021062_gDNA_ID_2214683_Annot_ID_189295 3000 nt of promoter + ATG
gttatataaaaagatacaacaattcagatacaatcgtaaaaagatacccaactaaaaaagatataaccgtaaaaaagtcctgactatatttcaatgaaaatacacgataaaaagacagaacgaaaaaaatcagaaaaccccgtaaatatttaataaaaatttacgataaaaacataaccgttcagaagtgtttgcgatataaagacacaaccgtcaaatttctttgaaaaaatacgataaaaagatacaaccgagaaaaacccaaaaaactcataaatattctatcgaaaagttgcgataaacaaacacaaccattcaaaagtgcttgcgataaaagaacaaccgtaaatgtttcgactaaaagttacaattaagagacgcaacccgaaaaagttacagtaaatttgttaacgaaaatttacgatatataaacgtaaccatttgaacttgtatcctactttggtttctaataaaattcagatgacaaagaaaaaacgcaaccattaaaaaaatgtaaaagactatttattgagattgtcttattattattagatttacttaactccaaaaaaaaaccatggaggaggtaagtccaatacacccaacccaaaaaatagacaaacccagcccaagcccaaaaagcccttctatttttatatgtagacgacaataatttttacagacctcaaagcaaaattaataaattatcgtcttgacgaaaaatcgtagaggaaaaaaaatccccaaattgtgtgaccggaattagggtttcgacaatgtcgtccgggaagccaaagcaaggcgacacacgattggtggttgctgccactacggcgtcggcattgatggaagcgaagaaggctgatcacggaggatcttcgtctatcgttgagtataaaccgccggtgatgcttgaagatgaagaagatctagaagtaaagctccgacgtatccttgagaacgttcctgttcgtgttagtaatacttctggaagttccgctggttctggttctggagatttccatcaggtaactaaactaagcctttctcttaaatcgataaggctttgtatctggaatctgaaactgcagataaggctttgtattttgttattaggcgtagttaggtgtggtaatcaattacgagaagttcattgttgggatctgaattatcttagtggactttgtgttgacattgttttcttagttttgtgatggatcacaatgcctttatgcctatataagagtttgatagaatgttccatagactatcctgtattagtcttttgatggctgtgatctgtgaatgatttcaacttctgtatatgaattctgttcttcagtaactgaaaatcagctggattgtttgtgaagaatgcctggtcttttgttcttaggcatggctaagtgtggattcgaagctatagtcgattaattactagaagttccttgttgtacatgtgataggaatcttaaatttcttagtctataagtgttttgtgacgttgattacttagtcggtagagcttgaactgagagtattagttgcgagaagctcatgtgggtattagtaattaatggttgatggtcgttgtgttgattctataggttgtggctgagtgttatctgaagtgtggccctgattattgataaagcgtgtgtacatcattttcttattatactagacatctaaacttgtgcaatactgatgcattgtttttctattacagtaccggcaaatgaggcggagagaacaagaccgactaacaaggatggatattgactataacaagcggttaaaaatggcagagtttactataagaagagaagagaaacagaaagctgcagaggaaaaaacatcgaagaagcgtttgaaacgccaaaagaagaagcagaagaaacaggagaagaagcaaaaaccaaacactactgaggaagaagtaaagcaaccgagagtaggagaaatatcatctgacgaaggtgaagatgaagtagaagaagagtctgtgctagaacctttacgtccaatgtttaatatcaagttccaagagaaccgttcatagcttttattgtgacatgttacatgattccaaaactatctttgtgagattcgtttctttctttccttttgttttcaacaatgtacgggaaaaagaaatggagcaggttttaatcggcttttgtattggattagggttcatcaaatcaaccaccaatgtatattgacaagtaaaccaaaattctttagtcgaaaattgttaaaacgactaaactttggtgccagcagctaagctccatacacgcaagttcccacttttgtgtccactgaatagcaatccttgaggaccaattgtgagtgtgccaatcgtgtggtcccatccaaggaagacgatatcagacatttgtcccaacataagagtgatgttacagtgccagtatgttgcttcaaggtcattatacattgcagggtgttgagatcccacaccttgattgttttatcgacagagtatagcacttgacctccaacaacaaaagtacaaaacaagtgacttcaccactatgatgtccctcgagagatgtcaagtatttgaatggatcatcagactcagagtgtgtagtagctttccagactaagctactaccacaacttgttccagcaaaaagcattccgtttaatataaaaataccccatctttgaattgttgatacaccgatttaacatctctatattccaaagtaatgtatatattgttcacaatggaaaatggagattaaaggaacaacaaaaattgtgaaccaaaaaaaaaagaaatgccaaaagatagaatcagatcaattactcaaagataagaatggtttaaaagcaaaaaagaaatttagttaaggccatgaatggtgacatagaccgcacaaactgcttaaattgaagagacgactatgtgcgtaaaacgaagagactcaaaacaattttgggattcgtgagagatattgattcgctgca

SEQ ID NO: 13974 - DNA, 3000 bp, Unknown; identical to SEQ ID NO: 13972
  misc_feature (1)..( 3000): cDNA_ID_2710753_gDNA_ID_2214683_Annot_ID_136700 3000 nt of promoter + ATG

SEQ ID NO: 13975 - DNA, 3000 bp, Unknown
  misc_feature (1)..( 3000): cDNA_ID_3021115_gDNA_ID_2214684_Annot_ID_189315 3000 nt of promoter + ATG
gtccattttatcctacgggcgatggccgtggccttcgcttgaactccatgtcttggaacaaaggtttgtttttgacaattttatgcaaaaagcagagaactatgtgattctacgtttgtgatgctgttgtctcttattgcgtatgtgtagcttcgaacttgttatttgtggagtcaccagccggagtaggatggtcatactctaacagaagttcggattacaacactggggacaagtctactggtaaagtatatatcccattttttcagattatattagaacactgttgtatcttgacatgttttttgtatttgaacagtcaatgatatgcttgtgttcttgttgagatggttcaacaagttcccagagttgaagtctcgcgacctctttctcactggcgaaagctacgcaggtgtgtcttttattattctgattcttagtttatgaaatggctatgtgagtaacaatgttggtggttatgtgtttgatgatgttacttgtcagttttacttttatctaaccaatgtttgatttgattctctcgcagggcattacatacctcaactggctgatgtgatactcagctacaattcacgctcaagtgggttcaaatttaacgtcaaaggcattgcagtaagcaaaagaaccttcttcttaaagtttcatcaactcttttggctctcttctgatttttttttgtgtttttttttttgatacgagactatggttaggtagattatgatttgggttttcataatttcctttaaacgttaaagtgttttattttatgcattagcgttatgtctaagttgtatgatgaatacctatataagggttctcaattgattaataaaaaaactaagctccaacaattaacctaattctctaagagagacttgggtgaaaaggaagcttttgctttaaaacttttgggccataatattttttgtgtgtttctgatcagattgggaatccacttctgaagcttgacagggactttgcagctgcatacgagtacttctggtcacatgggatgatctctgatgaagtaagactcacaatcatgaaccaatgtgactttgccaatccaaagaacatgagcaatgcttgtatatatgcaatcgttgaatccagcgtcctcactgagtatatcaacagctatcacattctcctcgatgtatgttacccttctattgttcagcaagagctaaggctcaagaaaatggttagcacttatccacctttttctttccaacagaaaaacatttgtgtaaatttgtgaaaatggttttaggttaccaagattagcatggtagttgatgtttgtataacatatgaaagaagtttctatttcaatctccccaaggtacagaatgcgcttcacgctaaccgcactcgcctaccttatgaatggactatgtgcagcaagtaagttgtttgacccacttttcattttgttgatcaccaaaaaatgaagctgactgattgatattggcttttcacttttcactatgtcacagccggttaaactacagtggcatagacgggtacattgacatgcttccgagtcttaagagaattattcagaaccaaactcctgtttggatcttcaggtaagatttctattaaagatcttcttttcttgtactatgcagcttaactctcagcttgttaaaattgtagtggagatcaagattctgtaattccacttcaaagttcaagaacactcgtacgagaacttgctgaggatctcaacttcaagaccactattccctatggagcttggttccacaaagaacaggtagtttccctacaccatcaaaacaattctaactaagttaattgtgattgctaacttgtggatgttgggattgtaactaaggttggtggctgggtcacagagtatgggaatctactgacctttgcaacggtgagaggagcggctcatatggtgccgtatgcggagccctcacgagctctgcacatgttcagtagctttatgaatggccggagattgcccaacaaaccagatttaaagtcttctactgatgattgaaagagaagatatctctttgagtaagttgagatagaaacatattagggtttgtgtaataatgaaccgtgaaccccacggaactatttttatatactgccaaacattgcgatgagaatatagtatttctcatagattattagagtgtgattgtatcaatattatttgttacttatatgatttcgataaatgatgaatcttatcattttcgtttggacgtttcatacgcttattacatattagacatagctatctctagattatatgatgatttatgatattggtttcatttcatagttgactacaaggggatcctttccgggattttggccttagacaatataatgaaataaattgcaagatttttttggccttttttttttggaagaattggatagttctgtaacgaaggaatgcatttaatataatttaaataatttttcagtttatcctaattttaaatattaactaaatatagttcttggaattatatatcaactaaatatgatatacttaggaggttatttacatcttatccttaaaattaatttcaatttatagaacctttttttggtagggttcaatttatagaaccttaacattagtaaggactattttaaagttttttttactagattttggaaaaacaactttatgttttaacaatatgtaaaaaaatatatcacattagacaagtgtatcatatatacattcaaacgtaattatattaggtaagaaaatcaatctctttattttcttttgattatagaaatcaaggaaattaaatatcaagatttgtttctcttttacaaaaaataaatatctttaggtatgttggtgttatcatatatataaacatatgtagtacatgagaaaaacaaagcgaagatcagtctattacaaaactcaaaataaaaatagaagcaaaaaatcatagaaacaaaatg

SEQ ID NO: 13976 - DNA, 3000 bp, Unknown
  misc_feature (1)..( 3000): cDNA_ID_3021103_gDNA_ID_2214684_Annot_ID_189319 3000 nt of promoter + ATG
ttgctggctcagcagaagcagatacactacatcactgatgaagagcacttccaaatgcaagaaggggggaatgatcaaactgaagagctgtgctacattcagaaccaaggagggtttaacaagggctacaacaactacaagcccaacccaaacctctcctacagaagcactaatgttgctaacccccaagatcaagtgtatccacctcaacagaatcagtccaaaccttttgttcagtacaaccaaggttatgtccctaaacaacagttcaatggacgtttccaatagcagaatccaccaccaaggttcactcaacaaccacaacaagccctagcagctcaagatcctgaaattaagcaactcattcaacagatcatccaaggacaagctactagagccatggcttttgaaaagaagatagctgaattacacaacaagatcgattgttcttacaatgatctgaatatcaagtttgaagctctaaatttcaaaaatcaagtatgtggagagtcaatttgcctcaacctctgccccgaagcaccctcaacaacttccagggaaagcagtccagaatcctaaggactatgctactgctaatgctatcaccatccaccaagaagatgagtctccaccaagtcatcagactcccaatactgaggacaatatgattcaagaagggggggggggggttcaactcaaattgatgcacctgccactcagcaattcatctggactatagagcacacacctttgctgaatactcaccattctagaaaagagttcaaaagtgaaaaattcaagaaggatcagaatcaagagatgatcagcagtgcctctactcaagaaacatacaagaagaaagtcatccaagaaaagcttgatgatcccggttcattcactctaccatgctctctaggaccattgacattcaataggtgcctttgtgatttgggagcatctcttagccttatgcctctctctacagctaaaaggctaaggatcatggaattcaagttctgaaacttagccttactcttagctgatggttctgttgcacatcctcatggtctagtagagaatctgcctgtcaagattggaaatgttgagatacctacagactttggggtattggacgtagatgaagaaggcaaggatcccctgatcctaggcagaccattcttagcttcagctggagcagtcatagacgtcaggaatggaaaaattaatctgaaccttgaaaaaggcatcaagatgaagtttgacatcagagaagcttcaaagaaatcaacaacaggaggtcagagttttggaattcaagatatggatgttgatgaagaaacagaagctgaaacctcaccaaaagtcaactatacttctcaactcagcaagctgaagagaacttttgaccacaagaagagagaaacagaaaggctatctcagactgaagatcctgaagaagatgactggtatgagatgagaaaaaaatttaaatggcaaagcagagtcatagacggattgtcttcaagggtgatgaagctgaaagatcaactttggatatttgaaaaaagagttaaaaagttttcagatggtattgacccagagaagatggaaactgcactagctatcaagaaggacgaaaatttcacaacagaatggtttgcaccagaagatcagaaaggagttcacttagaggaaagaagcttagggagcaagttgttgagtgaggaggaaactcctattttgacttattctctaggagtgcctaaacagcccaccaacccctctgctgaagaggaacacttgacacttgattctgttactgaagaacttgtggaactcaggatagaatacaaagctcaagaggataccattggagagctaacttacaaaatggaaggactgaaccatgcaatcttggaacttcaaaaaatggttacaggctacaccagttttgaatttgaggattggtcaaaagaacttggttcagaagaagaagactactctgctgctcagaaaaatcttattttgaagaaaaatcaaatgagtactcatcctaccatatctcaagagaggatgtagagtatgactcaagcactgaaaattcatccactgaagataaggacttctctgttcctctcttcaacctttttcttactaagcactgtaagagtcaagcttaatgacttaaaacaagctcacttgggaggaagtcccatgtctatccatgtaaataactttctatttttcttgttatttttgatgtttttgtttaagtgttttaggtttgttttagtgaccctaagagagtcaacggtcgagtaaattcaaaccaagtcaagaaaaatctcaaccgttgatcgagtagaatgaggaggagtattttgagccattgatttggatgaccaaatgagaggagcattaccgtcgttggatcgagtgactttcagaagttaattttggtccgtttgatcgagtaaacaagaaagaaaagttccccgtcgttggatcaaatttttcgcacttcaagaggatgctcgatcctttgctcgagctctcattatttgaagaccatggcataacttcgtgaccccacttgttcccccaacactcttttactcaatggacaaagcgattacccatgcccctcaccatttataatcaacttttctatcccttcccaaagaaaccaaacaccaatctcctccacccattgaattcgacaaacccacttttgaaactctctctttcatcatctcattttcgcaacctctccatctctcacaaagcttcgaagtttcactccaaactctccctatcactcttcacgaattcgttctcacttcatcatacttcaccaaagttactcgatcacttccaagctcatcctcaagcactcaatcggtttcaagctccaaatttcatcaccaaataaactgatccccttaccccttgatacctcttggagagttgtttttaattgcttggttgaaactcaccacc

SEQ ID NO: 13977 - DNA, 3000 bp, Unknown
  misc_feature (1)..( 3000): cDNA_ID_3021093_gDNA_ID_2214684_Annot_ID_189322 3000 nt of promoter + ATG
gaaagcttccaagcaaaaggtcggcactccgatgacgaatcgtagctgctctcaccgcagctccagcagattccgcaatcgtccttccagcagtggacgattgaacccttggcttatcgaaccatccatgtttccgttccggtcgtttactacgaccgcccacggtttactaaccgtttatccgtccggtctatggtggtcgataaagctttcggcttatcgatccatccatacgatccgaactatatccttatcacacccaagggtccgtggattcatccatcggatcatcgtaggctagcccatgaaatccttcttccgtcggccttaggtttgctcacgggtccaacatccgttttgtccatcggtttttaccgtggactttcccgttggttatccgtcgagtcaccctttggtcttaccgatctctgatcagtttcaccatagctgaggagatagatacatgaaggcggccgcgatattgatcctatatggtgaatcacgtttccttacccattcttgaagctttctccctttactggtaagattgcatccatgggcgacccttgggtgtgtttggatgcacttatctttgtgcttcctcgaacacttttctcgatctatcccatccgacgatcgttctgtccgacccgttctgttagacgatcggactgtcccatccgacccgtccgacgatcggtctatccgatccgatccgtctggctgatccgatccgtccgatgatcggtctggccgatccgatccgacgatcggtctaccatatccgattcgtctctaagacgaacggtctaccctctccatcctatacactccatcgaaccgttggaccgggaggtagtatgcgcatcacttcggtcaagttatactcgccgagccgcaccccctttccgaccaacaacttcaggatgtgttggaattgttttgagaatgttttgtggtgtgtggatgttgtgagatgatcccaaaggccttgggcgtcctcccttatatagggggcgaatggatgcttcccgaagcatcacatccgttccttgcacccttccgaaaggtcacatccgttccttgcatccttccaaaatgtcacatccgttccttgcatctattgggtgatgcaaccgttcgttggtacccgctcgaccttacaccttttggccgagacatcgtttcacgggtgagctaccacagtccaccagctcgagtgtcagctgaccggaccacccagctgggtcagtacacgatcagctcaccgagctcagtcgagttgtcggtcagctcacctagctgagctagctagtcttccagctggtttagctcacctagcttagctagctagttcatgctagcttgtccagctcacctagctggttcagcttgaactttctcattcttccgactaagtattttagtccgctgctcgacccttgtctagttttcccctaaaacaaatcggcctctttatgaacgcgggacgcggttgttacaagtctaccccccttaaactgaattcttcctcgaatttggtgtgtgtaagatcttggttactccctaactcgggacacgggcgttacaagtctaccctcccttaaactgaattcgtcctcgaattcagcgggtgtaagagcttgtttactcctgaacgcttttctatctttggtctctccgagactttagatatcatatttgatcaaatctctatttccgagtttgatcaagtttcccgatctttgtctcttaagacactcgatcaaattcctgatcctggtcctctcccggactcgatcattatttcccgatctttgtcttgtcccggacttgatcaatgttttccaatctttgtctcttccgacattcgatcaaatttctgatcctggtcctttcccggactcgatcattatttcccgatctttgtcctttcctggacttgatcaatgttttccgatctttgtctcttccgatattcgatcaaatttctgatcttggtccttttccggactcgaccatattctcgacttaagtcttttccgactttgtcaatatttccgaccttggtccccatcggactcggtcaatattcccgacacaggtatctttttgaccttgtagtttttttccatgatcttggtcaatttccgtaagatcaaaaccccagaaatagtcaaatcccgactaagtctgtacccaatcttagtcaagttccgacaagatccaaattccattgatatcggtccatctccgaatatatcaacccactttcccgtcatgttgaagttttgactacaaggataatatcttggttcccgatcgtgagttgggtaactatttccgttttcgtacacaacaatccctcaacttccttatccgccaaaaccttactatgacgttttcctgagcacctatccatcctaggatcaagcatgctctgataccaacttgtgagacccagtcccggacgtctcggcgtccggcgaccgtgtactcaagttcgagcctcttcccggccgaacctcttagtttttcgcgattcaacatagaattgcctttacgaggctaaattctataatcatttcttattacacagtggaagtctttctaaccttggtttaattctaaccaactcttgtaccggttttatcgtctttgtcccttagacatagatcgatcctttactcggtcaagacatgcatattgttcgctaaccattctaggcctaacaatcgcatgttcctttatcctattttcacggtccattcccaaacgtctatcctaattagtaagctagatcgttacatacctcggccaatatgcggatttgattccttagcccgtttgtcgccttatcctatttgttcaacgattcgtatgcgatcgtgaatcgatgaaccaatccctatcgttacttagccatacaaccaaccaaccccactggtctaagtacaacaatagagattggggatcgtacgatttccttggttcatgatg

SEQ ID NO: 13978 - DNA, 1285 bp, Unknown
  misc_feature (1)..( 1285): cDNA_ID_3021170_gDNA_ID_2214685_Annot_ID_189327 3000 nt of promoter + ATG
gaattcttttattcacctcctttttctctaaccaatcagaatcttccaccaaataaaaaatatataaactcatttaactgtaaaattaacaataatgattttattatattttcttattttttattttaaataaatacaaatataaactttaaattccataaaaatttaaaaatatttcttttttttaaatgaatcatcatatcaaaaatatattcctcaacatgtccgtcaacatctacttaacaattttaaagtacatatttgctcatttgtatggatatgtttttttttatttactatatcttaactttttatttttggataagaaaatcaaatatgatgtttaatgctaatataaaacatttgagctaatttcctaaaacttctctacaaacataaatatatgattctcatttcacttttatttgatcttatatttatattattttgaattataataaaatatttattgttaataaaattttagattgtttctggatatattgtgattcaaaagtttttaaacagatatatattactcaatcaatgaaatatattttttatgtataatctaaaatataacaaaattaaatcattaaaaaaaatttaatcgattaagaaacatttgctcatttattgtgggtcgggttataataaaatgatgcaaaaacaaagcaaaaatgtttttacaaaaccaaataatatggaaaaccatataaaagataaaataataatggacaaaaatattgaaaactaaccaataagaagccatacacaatcaatcataattttataataaataacaacaaaaagtattatatacaacaattaatcggttttttaaaaagaagaaattattaatcctgcagtgtatattgaattatatatttttaaaataaaagtattattaaaaagaaaaataagaatatgatgtttatttttaagggacgggattatatggtaagacgggtttggatcgaggttaatacatgacaatatatcacagataaaatcttaaaattaacaatcaaaacacaattatacaatcttaaatacgatttagttataaaaaatctaccaggagtgtaatcaaattcaaacataagtttctaccaataaaacataaaaaataaataatacaccaatgtcataagtttataacaaaaaagtatatatatttatttcacggtgtatttcatacttattaattactgtcccaactattaccaacaacaaaaatacatttgtaacatcttgttttatagataaaataatttattaaatg

SEQ ID NO: 13979 - DNA, 3000 bp, Unknown
  misc_feature (1)..( 3000): cDNA_ID_2710768_gDNA_ID_2214686_Annot_ID_136708 3000 nt of promoter + ATG
catcaaaaatccattaaaaatgttttggtttttgtaatttacaattttcaataattctaaaccaatcatattcaattgttctttttgaaaactacaatttatcaataattaagagtgcattgaaaacttaaaaattgtatcgttttgaaacaaatttttttctagaaattggattaataaggaacagaacaaagataacaatcaaacaaagaaaaatagcaaagatacgtttttaatcgtccgatacgtttttaagtctgttcgtttaatgtttaattgtaatttgttcttgcccatttgggctttaatgaaattaaagtttgttgggacaaaaaaacttttttcggaaacagacatcattcttgaatttcgccccaatactgctctttctcttttccaagcagaaaaagggaattcgctgctcttctctcctctggttctaagcgacgctcatcattcacctgtatcaaacataaacaaggtatgtctcttaattctcccatatcatctcatctcatatctttgtgttcatttgcttgctgttttgtgcttatgtagttgtttcagatgttctgatgctatgatgttaatcgtattctcattttcatgatttagctgaaaaatgagaagttcatttgatttgctttctgttctgtgcttatgcagattattgattaaccaattaagcgacgctcatcattcacctatatctgacataaacaaggtatgtctcttaattctcccatctcatctcatatctttgtgttcatttgcttgatgttctgtgcttatacagttgtttcagatgttctgatgctatgatgtgaatcgtattctcattttcatgattcaggagaatggagtcagagggaaacatgaagaacttggttgtgtcacaagtaaccataagtgggtttggggagtcaactaaaacaaaagaacttacagattatcttgaaaacaaagtaggactactcgtttggcgatgcagattaaaaacttcttggactcctcatgggtcttatcctaattttgagatcatagacacttcaaacatccccaaatttgattgttacgagagagtggtgcctcatgcatttgtccattgcgatgcccataaatctttaatggatgctgcagagcaatccaaactcatcctcggtggccagccattaaaattcagcttgtcgtctgagaacccatatacacttaacccatataagttgactggtgtttcgcttgagattgggacggtttcgcaggatgacttttttttgtttctcatataagttggagttattggtgagagacatacaaacagtcaagcagtatagaacttttgttggttttgtgcttgttttgcagcttgcctcatcaccccgtgtctggtacagaacagctgatgatgatatctacgaaacttcggctgtcgatctcttggatgataatgacccttggatccgcaccactgattttacacaatctggggcaattcgtcgatgccttgggtatcgagtgttcatatctcctcgggatcacaataaatggacaaaagtcttagattatctaaagacacaaagggtgaacacggagcatgtgaggtggcggacctacgttcaaagtagaggtgcaacttaccccggttaaatttaaaaacctttctttaatagatcatttgcctaagggggtgaactttttttccgggattacatgtgtctatgatgtttttgggtgaacacatgtgtggttttaggtatgtttttttacatgttctaacatgttctcgggcaggttgatggttctttttggtatgtttttgaggaaacacttatgacttttcaacttcaagtgttttccacagaaagatgtgatggacttttggtattgaatataaagatagctatcatgaatgagaaatcctttgttgataaggctctttgtattttttttttggttatgcttctagaaaaaatgtctttcttacatatcttacatagcttcttagtcaaacatagaaaagaacaaatatatatacatgccaaagttttgttagtgatcaagtctttatacgctttacaaacctttataagtttttataaggctttctaacctttatgactttgtaaagttttataaggccgacgttgttggcatcattctctaatctgagagatgctcgacaattttaccttgtgttcggtttttcctattttaaaaatcttatggtctgtttgctcatgttaaggttttatatatagagttgtgacaaatgtaagttttaataacttaattataccagccttcttatattttttttattacaagccaggatcatccagttataacgtaaagctggtaccgttcacaacttcttttatcagatgtgtctgccattgtaattattggatttgtgaaggacgcaaaacatcatgttgatgttcaaggctttaatgtctaccacaaaaatcggctctccatactaggcttttgattttcaagagaaatagtggattacacgaaatccttgttctaatttattaacaagccttgggttacacgaaatcccttctaggatacgacaatcaaagtactctctcttgttctaggcaaagatacaagacaaacaaatagactttctagtgtttgtttttgtgtttcaccaaagaatatctcaatcctttggtcttgtgaatctctgttttttctctctgtttttttctcttctatgcctttttgatgcaaagagacagagttatataatggccaacgatctccacgtacgtttgcaaccgtacgtttagtcataactgtaattccaacagttgccttggtttataagtaaccattgacgaacagttttctcggttaatatgataaccattggttcacttaaatcaccgaaattgggattgatctctcttcgggatcgtatcactctgttttcttttctcttccaattctattttatttttctttatcacatcaaaccaaaaggacatg

SEQ ID NO: 13980 - DNA, 3000 bp, Unknown
  misc_feature (1)..( 3000): cDNA_ID_2710761_gDNA_ID_2214686_Annot_ID_136711 3000 nt of promoter + ATG
aggaggagggggaagttactgccgccacggctgctgctacaaaggttaccatggctgctcaaggtgttgttcatatgccggagaagcggttcagactcagtctggtcactaaatctacataatatatcaaccaccatgagtgtacgatttcatttatatatacacttacgtgtgtatgtgatatgacaatacacttacgtttgtaatgaagtgccttaagtttaagaggagaaactatcggaataaagtttcataatgtaatgcctttgtgtttatttaagttgttatttgcgatgtttgcataataaagttgtttctagttgaagttattctcttttggttttatgtgaccctattaattcttttttagtactggcctaaggaaagataaaagatgtacaaaaaagaagaagatttaaacaggctgggcaaggaaaatgctttttcttaaaagaaaagattactagatagttagagactctatcgaattttgacatgcacaatagttacaaagttcactaaatataaagtacgtagtattataaagaatctcttacaagatctatagcgctcaaagctagaagtgtcaattgggttgtccaaagcccaatggtcatgtccaattggaccattagttttaatgggttttaatggatggtccttattggacaatggtctgaaaatttgtccaagaccattaaggaccatgtccaatggtcagcccatggtcagcccataacttaatgttgcttgaatacaatgcattttcataagaaaagataagaacttagcttcctcttacaaatatgattagatggtacttaaaactgtaaaaaataagtcataaagtgacaaacttgaggagatacatagaaaataagttcatcaaaagagttaagcttagatttgggaattaaaaaatgtctgaatattatttgctaatcaacagattcatattctagtagaactaaccggagtaggagttgagagagaggtcgaagcgagaaagagagagagggagcttcgtcgccgagggagagagaagagaagagaagaaaattgatgtgttgagaaacttgatgggccaaccatagaccgtgtgggctagcccattaaacccgtggacataattggtctttagaccatttaacccgttttctttacgggccgaccatggactgtccataatgttgtggactgggcttagcccatggtcagatgaccatttgacggttctactcaaaggtatagaaactcattgtgtagggttttgcttttagatattctttggaggtttagagagtttcaccgccttttgtctcttggcatttaatgcctcccaacaacaactacgtacaagtctcaagtactggtcctattatattgttgttaataaaacatactttcttttacatgctgaaagaacattatcttcgcaccaaacctcgaaagatatttcacctaatgcgatgcattttataattctcagggacaaaagtactatgtatagtatattagtatgtctctctaaaaacgaaggacatttggggttaaaaggcttttcactattacgaaataaaacattgtatctccagttatagtcttagatcatctccaatgttcacctctatttatttttttctttattttagagacaactctattttttaataaaatatagttgattttgttctaatatatacccctctaaaatagatattgaatatattatcaaggatgtcagcaaaatgtcatattggtttatttttattcgtagatgtgatataccttgatttttactgattatatctatgatctagatatatgtttttagagtcttttttttgttttaacgtcttttaaaaataattgagaaatcaaatattcttccctaagttgtttattagtttagacttaaaatcaattttattaaccctacgggatatgactatatgagtcaccgaagcgttttgcatttctctagagctttctctagtcttcctaatccaaacttggaagcctttaaagttgtagcttaactttttcagttcattcctgtctctttctttccacctcactcagagaggtaaatacttaaaacttaacaaaatatttttaatcgttctacttttttattttcttgactgtgttcagtttctcaaacatggtaacctacaataaataaagctgttaacaataatgttctatattggaattttgtttttttgctcgtctctcgagattgttctttgagttttcgattgacaaatcttgtgtgtagattgggatcaatggtgacaaaaggtttatattgaaccatatagtcgttgtgttccatttttaggttaaataaatggttttaaattgttactgactagggtcttttgacgaaaataaaaaaataaaaaaaaaatgactagggtcacttttgacaaaattgtttcgggaaaatcaaatgttattccctaaaaagtcaagtgttattaaccctatgagatatgaggagccgaaacgttttgcattcccctagtcctcctaatccaaacttggatgcctaaaggggagtttgttgggataagcatgaagtcaataaattagggaataaaagttatgttttaaaataggattaagataaatctttaggagtaatctaaagatatgttaggagttatctacatcttattctattgtgtttgttatcatccctctcctatataagagttgccaaagttgtggtaaaccttaagagatttgagagagagattgaaagctttgttttgagttattttcaaagctaataaaaggagtgcttttatatttgatctaagtattcaaatctttatttggtatcagagcataacctaggtttcaatttttctttttcgaatatgagtgaaattgttgctgcaagcaacaaacctaaagaagggggggggggggtcatcatccattcattgtcccatgctgaacaacgctaattacacggtgtggactatgagg

SEQ ID NO: 13981 - DNA, 3000 bp, Unknown
  misc_feature (1)..( 3000): cDNA_ID_2705769_gDNA_ID_2214686_Annot_ID_136712 3000 nt of promoter + ATG
tgtggggagaagcagtaaggcactcaacctatatcatcaacagagtaggaacaagatctttgcagaaccaaacaccatatgaagtttttaagcaaagaaagccgaatgtagaacacttacgtgtatttggatgtattggttatgccaagattgaaggtccacatttgagaaagcttgatgataggtcaaagatgcttgtttatcttggaactgaaccaggctccaaagcatatcgtcttcttgatccaactaaccgcaaaattatcgtaagcagagatgtgtactttgatgaaaacatgagctagaagtggaacaattcagattctgaaactcgggacatctctggaacattctcacttaccttaggagaatttggaaacaatggaattcaagaaagtgatgatatagaaacagaaaaaaacggagaagaaagtgagaacagtcacgaagaagaaggagaaaacgaacacaatgaacaagaacagattgatgctgaagaaacacaaccctcacatgctactcctctgccaacattaagaagatcaacaagacaagttggaaaaccaaattatttggacgattatgtcttaatggcagagatcgaaggcgaacaagttctattggcaattaatgatgaaccatgggattttaaagaagcaaacaagttgaaagaatggagagatgcttgcaaagaagagatcctgtcaatagagaagaacaaaacttggagcttaattgatcttccagttagaagaaaagtcatagggttaaaatgggtttttaagatcaagcgaaattcagatggcagcataaacaagtacaaggcaaggttagtagcaaagggttatgttcagaggcatggtattgactacgatgaagtatttgctcatgtagctcgtattgaaacaattcgagtcatcattgccttagcagcatcaaacggatgggaagtacatcacttagacgtcaagaccgcttttctccatggggaactaagagaagatgtttatgttacacaacctgagggcttcacaaataaagacaatgaagggaaagtctacaaattacacaaggctctttatggtttaaaacaagcacctcgtgcttggaacactaagctgaacaaaattcttcaagaactgaattttgtaaagtgttctaaagaaccatcagtgtacagaagacaagaagaaaagaagcttctcattgtggctatttatgttgatgatttacttgtgacaggctctagcttggatctaatactctgtttcaagaaagatatggctggaaaattcgaaatgagtgatctgggacagctcacgtactaccttggcattgaagttctccatagaaagaatggcatcatattaagacaagagaggtatgcaatgaaaattatagaagaagctggaatgagtaactgcaacccggtcttaataccaatggcagcaggattagagctctgcaaagcacaagaagagaagtgcatcaccgaaagagactacagaagaatgattggatgtctgagatacatagtgcatactcggccggatctctcttattgcgttggtgtactaagcaggtatctacaacaaccgagggaatcacatggaaacgcactgaagcaagttctaaggtatctcaaaggaactatgtctcatggtctgtacctcaagagaggattcaagagcggattagtaggctatagtgatagtagtcatagtgcggatttggatgatggaaaaagcactgccggtcatatcttctatcttcatcaatgtcccattacatggtgttcacaaaaacaacaagtagtggctctttcatcttgtgaagcggagttcatggcagctactgaagcagccaagcaagccatatggttacaagacctattcgcagaagtgtgtgggacaacaagtgagaaggtgatgattcgagtggataacaagtcggcgattgctcttactaagaatcttgtctttcatggtaggagtaaacatattcatcgaaggtatcatttcataagagaatgtgttgagaataacttagtcgaagtggatcatgttcccggagttgagcaaagagctgacattctaaccaagccacttggaaggattaagttcagagagatgagagaactagtaggagttcagtgtgtgttggaagatgacttcaagcttaaaggggagtttgttgggataagcatgaagtcaataaattagggaataaaagttatgttttaaaataggattaagataaatctttaggagtaatctaaagatatgttaggagttatctacatcttattctattgtgtttgttatcatccctctcctatataagagttgccaaagttgtggtaaaccttaagagatttgagagagagattgaaagctttgttttgagttattttcaaagctaataaaaggagtgcttttatatttgatctaagtattcaaatctttaaagttgtggctaaacttcagtttgtgtttgcttttgtttatcaagattgttcttagactttttcgagttaaaaaacttgtgtgttggagtcatcatcgtgatcaatggaaaataaagttgagaaggagattacttgggtgattaaaaatttctcttctctgcaatctgcaacaatatattctgatatattcgttgttggtggctgcagatggtaagaagataaattgttttctaatatttttcgtctaatctacggtttacagataatattctttgattgctttcttttgtttttgcttgcaggcgttgtcaggccttccccaagggatataataaggctgattatctttctctgtatctcgacgttcctgataaagaatctttacctattggatgaagaagccacacaaaattttcttttactttagtaaataaaatttcggaaaaactctccaaacttaaaggttattggtctctatgcttgctaagagtatacctcatgtcatattttctggttttgttcagagataaaat

SEQ ID NO: 13982 - DNA, 3000 bp, Unknown; identical to SEQ ID NO: 13980
  misc_feature (1)..( 3000): cDNA_ID_2710761_gDNA_ID_2214686_Annot_ID_189344 3000 nt of promoter + ATG

SEQ ID NO: 13983 - DNA, 3000 bp, Unknown
  misc_feature (1)..( 3000): cDNA_ID_1442104_gDNA_ID_2214686_Annot_ID_189343 3000 nt of promoter + ATG
caagtctattgcctaagttactaatgctgcagagtcaattcctagactaatgtgatatccggatggcaaaccgatatagactagaggacatccacgtttccaacataatccattaaggctggagctaatttttctgcttttccttttacctcttcagtaaggttagtatttgtagaggttgactccttgttcatacctgataatgaggccatagtgaaaaagataatggtatttttcttccttataaaaactgaatgaaatgattttctttagagtaaaagggtgagaataatgtccgatgaaccaagtattttacttaagaaggaatgattatacaaaggttggaagaatgctgaggatatctttccaatgatgagagtactactttgtctaaatccgtaaaaagaataattgttggggagaaaaagaataccaaaactatgaaaatggtcgacttaacatggttttgtatgggaatgagtctaaaaagttcttgaatattaactttattgatgagtcctagcaatgaaagcctattagatatagttgtagaatttggtttaaaatttaggatgatgtgaatgcatgcgaataattacatggtagttatgatttaattagaactgttaagcatatgaatttggtttgaatgatcaaggtaatcggctagagaaattgggagttcctgcgtttttgaacttcttccacgaattcgatttttgtgttttggccaaggaaaagctaagtctgaagagttgatatacagtacctcaattttcactgctgtcagctacgatctaggtataggtattagagtctttttgttatttctagagtctttttagagtcttttcagctatttctatgaccgggattggattgaaactaataaagcattttggagaaaaacggaaggagttaagctaaaagacgaatttggagtctgacaaaggcatcataccgacacttccatggtgttgatcgacacggtttgtggcgcaacaagagtctaacggtttaaagatttgaagatcccagaatttacacctaaagatttttctatttacagaattagtccctgcacgtttttgagaacatataatatattttaaaaggtcattgtttagaccaaagctttatttttaggtcttctacttttgccctacaattcaaggagatttttggagagttcttgagagatttcaaaaccttgtagagaaaagatcttttcctaaactctattcttcttttgatttcttatatgcaatcttatacaaacatgttttatgtttcgatgatcatgtttgagtaatcccctagctgggtttagtgtttttcattagggatttagatgaattagtatatcgataacctgttaagatttatatttatagttctttatctttgattgtttttaatgctagttctagagtacctaactagaacttgatcctaagttaataggtaagattcgagaggcatcttattgccggaactagatgggcttaattagctaaatgaggataggtctgatttagatacttagctgaacttatcaaaccggattataatgtttgcttagttctagggatctacatataaagtggggtcaatacaattaagcatacttagtccatgcaacaagagttgattgattatagaattgaggtttgtagttctagaatagtgcaataacaatcctaattaactgctagaactattatttgtctatttcctgagaatttctgaaatccgacgttttaaacatctgaatcttacatcaatttaatatgcttttgtcttttgatatacaattacttttttttttatataattacttgatttagtttcatttctagattttaactttacgtgtgaacaaaaaagatttgtgagattcgacccttaaatactaatgacgatctcttatttgagagagtggtcttaaggtactttgatcacaaccaccttgtgttaactgtagccaagcaattttccaagttcttaaaaatttaattagtccttagtagctactttgtatagctcctctatgatctactttcagtgcatatagttttgtctttatccagctgtttaaaatctatcgcttgcgatttttgacaaaatctttaaaagataataaacagacgatttttttttgtcaactgaattatattagagaaacttgttgaggaagtatggtgaaatacaaactctcaaacgagggaaaaaccgacggatgacgaaaatgtccgcagaaacaaagccaacgaaaaaagaaatttcttcgaaaactaaagtcctaaagaaatgaactaaaaatataactagaaatacaaagcaagaaatatcaaaccaaaatcgaaagaggacaatcattcaagagaaacaaatagtcttgaaacctaagaaacatcttctaaaaaaaaaaaaaaaaaaaaaaaaaaaaaaatgaaacatcttctcctgaatctcctgcaaaagagatttatcaatggtgcacttagccaacccaaagataccatctactatctcccattatgaagacaattgacctctctaaacctagaaaaggatagactacgtccaaataataaagaagagaaaattactacaattaaagaatatataattacttgatcatccaataatagatcgctatacgtgtgtgatgacgtagataagaaaagatctaaaacacttgtggggtttgtgctatttatggtgtttcaaacttattcacagtaaatccaacgaccacccatacgggacccgacaccgtatacatactttgatacttatctccttaccactttgtttttttctatattgtgatacattacttcccttttaacattttcttttattactaaaattctttcgactgtggattagtttatttgacttttctcattccctcgtcctcattttcattataaatagagagcatgcatggggacatattattcatcacaagttttaagcagtatttgtaagaaa

SEQ ID NO: 13984 - DNA, 3000 bp, Unknown
  misc_feature (1)..( 3000): cDNA_ID_2710776_gDNA_ID_2214687_Annot_ID_136715 3000 nt of promoter + ATG
tataaccagagatttgtttttctatgttcttaaattaaacaaacaataataaaatgattgaaaaaatcactgtcattttttcttcttttgaccctaaattaaacaaaacaacaataataaaaagtttgttttcggctttttctaaccgattttaatttgtttttttggtagaaattttctgatttttttgtttttgcaattattatattttctctgatatgacttgtattttagcatttgatgctattgagatcgtgggagtttgcagaagtagcggttatggtttaagtgctatcaaaccttttgaaaaattggttttgaatttgaaaataaatatgtttgtgggagttttatgactgataaaccagtggatatgaaagcggttaaataaaacaacgattaaaataaatattcaaagagttacacgtgctaatgaatgaaataaagatgacgatattgacgtttgcttcttgatttttattagtttgggtgtaagacataattaaaagaatataattactaatattgattaggatttttaaaaacatgcatacaatgatgatgaaagatattatatgtatatatacgattagataaatattgttttaattataaataatgttaattttaaaaatattttaatttaactactgtttgtaaccgcaaacgtttacagaaaaaaagagttcttgaaatatagcgattttgaatgatccagagcagtttccaccagtttgtatgatagttatcaataattaacaaccgatagcacctaaacacgctgcatttggagtggtaaaaagaaccaatcaaccccttaaatccctaaaatcacacaatacgtaggttatcttttagtaaaaaataattgtcaaatttccctttggctgcgatttgagaaagatagcgatttgtttggtttggtccacacgtgacgtgtgtgatattggtataaaaagttgtttttggagttctcttctttttgtgtttgtactaaccgtaaaattggttgcttatcaaagcacctaactattttttttctttatcactttctatctgtttaaattttgtgaacttccagctggtatgagcttatattagattaaagtataacaaaacaaaaaaatatataattaaatatatgagtcttggtttgaatggatctcaatcttatataacgaaagtatttgggtgaggatttttgaatattgataaagttgttgtatatcattttcacattagtgtgacattaggatttttgactggttatgaacgatggcggtcaagaatggttatgacattagtgtgatatctttgcgagaatacaccaacttttagttcatcactgagatctcatacatgactggtagaaataacaaaaatgccgtaaccattttttttgaagttttgacattagtgtgatatctttacgagaatacacagactcggcgactccttatcttatattttctctctatctctctgttcaatcacttatcaatgataagttatcatcatcatcatccatcatcaaatccatttgtcctaagatgatattttctcttctttgaccatcttttggcttgtgatttgctgatttcctgaatccacggtggattcttgatttggggttttactaaaccgtttatccgatttcagatcattctcacccttcgatatgtgtgacttcacacacaatattcatatgaactccagttacggtgatataatacaaggcatgactttagtctttagatagcttgcaatgatatatattaacgtactagatgatgctttgtggtatggacgtaattagaattattttagaaaaaaacaaagatattaaatatattatattatatttattttattgataacatatctaatatagtaaaatatgatgaattttgtttgtttagtagtttttgacatctttggattgacaatgtcccattcataaccaatttctactattatggaagataacacgatttagtaaattcaaattttggtggaaaagacagttaaatggacttaaccgcttgactaaaaacatccatatttatttagtagctaaataacagatattttaaaatttgaatacatatattttgttcagacattatacattatgttagaattacaatttctaatgatatttttcaaaaagcttgtctaattaaaacaaaaccagtactttcgtttcttaataaagaacaataattaacttcttaattttggtaaccgattgactgaatcttctatatgtattgtgataaaatggagaatgagcctgacgacatgagctagtgataatgttgctgcggagcggatttccatactaatacaagttcaccttgtccaacaaagacttcatttcccattcgatcttcgatatttgttatattagaatagatctttcatacaaatgaaagaaagagagattgaacgtttcgtttcttatatacttcaagagtgaagcaaccaacttaacttaattatagaaacctttgttctgacattttacctcatccgttaaaataaataaatatgggcctgatcggaaaaagacccaatcctgaaatacacagactctattttatcttgctccgttagaccaaaatgttattagctactaccatttcattttcagttctagttatttttggctgaattttaatttcccggtcatttttcttctactttgcctccattttttctcagctcgatctttctctgtgaacaaacctaatctggtaagtttttgtagagtctcttcttcttcctattacttcttctacgttttctcttggatctatcaaagcaaaccctagaattcaacttcgtaatcacctctttcgtttctactttgagttcaattaggaggtttgattgctatttgagtctaatcaatcgcttatctacttcgcctgacctaataatctctgggatttctgttgattttgacaggtgcgagtaccttagcgaggtttcgctatg

SEQ ID NO: 13985 - DNA, 3000 bp, Unknown
  misc_feature (1)..( 3000): cDNA_ID_3409620_gDNA_ID_2214687_Annot_ID_136717 3000 nt of promoter + ATG
ccaacgaaaattgtacataacgaaatcaagccatacatagtatcctgagtaagctaaaatctgcttcaaaatgtgaaaatggatacatttttactaacaaaagtagtcaaaccaaaacgcattcaactgttttggtaccttattctataacgaacttacatctgcatttccaaagtaatttagctttatcaagtactcctttgagataaatgcaacaacttgtaacctcaaaaccaattatattgtaataacaaacaaatattgagagtaaaccaatgaaaacaacagtacgtagcttataatatgtaaccatagaaaagcatagtactagatcattgagaaaacaatcggactttgtagttcattgtcaacactaggaacacttgcaaatgagtaatcaatcctccatgctactaacagcaacaatccttctagtttattgtcaacaatacaaagaagaacgaagtaaaacagaaacaaacctcgcaagtttccgtcgccaagtgagaaaagcttgtttttcattagcatcaagtttctccacattcattttaggtgtccaatgaggtctacgaggaacttgaagactactagcatgtaaagcctcttctctcatcctttgctctttccattctttagctgttatgccactcgaactcgaacctgtatccctatttacataacataatcacaaaccaaaaaatgattcaatacaagcaaatctccaatttcacaagaatgattgaatcgagaagctcacatattgataggaacaggagttgcggaatcgtgatgaatcgcgaaaagacgttcagcttcttcggcttgttcgatgatggcatcgatgtcgctgacttcggtcacggattctagaaccttcttgtgttgatctttgtaggatttgcctttttccttggtttcctggatcatatggttatggtgcttcactaaggctcgacctagagatgttttctcgttcttccccattttcttctccggtgaaacctttgagttttccgattcagcagatatatatcgtgaggagacgattgagcacttttgtgttcttcttgtcgtgattttgattttgattttgatttcagcaaaactcggaaatgcagagagactctcgtgcgaaacaaataaaattagaaaagtagtattagcctattagatctttcaagcgaaatttactatctctactgcttccaatcgcatagatgtagatagttaagatatttcaagtgtttttagatacatttccttagatttataaaatattaaaaacttgttatataaaatatttcaaaatttttattagaaatatatgactttagacaatctaaaatcttttgtccaaaaaaaaaaaaaaaaaagacaatctaaaatcacgtaatagtaatgttttaaatttttatcatcttgtaattttgttttggacaaaaaatatgtatgaagagatgatagcaaaatgaattcggcactacaaaatttgttttgttttgatatatgttaaaagtttaaatgtattcacctgtgaaaaaaatatctttcaaatcgagagaatgattagttatcttaaccggtgttccaaagaaaaaaaaagattagtaatcttaacctttaaaaatggatattatgactatccatatcaaaaataatatatagttcaaagattaaaaaaagtatgaataactctagattatgatgttaaaaacgatgatatagtatatttggaacacataatgcctataaaaatacttatacgtgtctaaaatgattatttagttcaaaaacaacaccaaaaattgtgtaagagtacaattgaaaacgttaacgaaaatttaaatatactaaatataaacatcattgaaattatatattattgatataccttacatatatttgggaaagtttataaaatatgtaaaagaaaaaaagggtttataaccggattatatctaaccgaattatgttaaatatctaaccgaattatgttaaattttataatagcctaactagagactggaagcaatgatatcgagcttaaaggagtgctattgatttataaatttatatagaatttgaaaatctttattaattataaaattaaaatatatgaattttaaaataatatgtgtttatccatggatttgaatccttctattttctctttcaaatccatttaattttatttaaaacataatttggattctcaaatccaaaaacaaatgactaaacgaataacaaaggattttaactagtatttataaatcattgaatcaataacacatgatattaattaaaattttaaaatcaataattaaattacaaatgatttttgttcggattttcaattcattataaatctataaaccaataacccttcctaaacaaaaaggtaatgaaaatatatttttaaaaaaagcttattttacattcaaaatcttgttttaaaatctgtaagaaaaaaatgaaagcaacactatcaattgtttcctacaacactttttaatcgatattaaaaaaaaaaaaaagatagttagagcattttcattggaagtatctcaatgagatacccaacaaaaaaaaaatatgagaggaaggagaaaaaataggagagaaggagagttgagtttctcttccgagaaactttgagaaactattctcatccaatttggacaaatgtcatcatactattagttcaattattaaataataattaatatatttgttttagttaaaatattaatatatattttttttagaaacttttcttgtttttagatagagatggtcttagaagccttcattttcaaaggttgattaaaaataaaataaaaatttggaatatccacttgcgatcctttcttggaaaaaaaaaaaaaaatcatatgattgtgtctggccagacaagctagctatctcatttaatttcccaaaaagaaaatataaagcacgttcttcgtctcggattcagagaaactaatcttgaagatg

SEQ ID NO: 13986 - DNA, 3000 bp, Unknown
  misc_feature (1)..( 3000): cDNA_ID_3021211_gDNA_ID_2214687_Annot_ID_189352 3000 nt of promoter + ATG
ctatatacatcacaatcggggatggcggaaactcggaaggcttgcttaccgagtaagttttaccatattctgcaatcaataatagagtgactaacttgtaaccgactctgtaactaactctgttattgataatactcttcactttctttgaatatgtatgtgactggcttttgctatatctgtagcatgatgcagccacaaccaaaatactccgcgtttcgagaagctagctttgggcacgggttgctagagattaaaaacagaactcatgcttacttcagctggaatcggaaccaagatgggaacgccgtggcagcagattctgtgtggttgcttaatcggttttggcgagctcaaaagaagacatggcttgatgcattttaaagacaaattgaagaaggttttatttttgcagcaattctaaacgaataaatcagttagtgactgttttacgagggttgttattgagatttgattaaaacctcctctcatacagaaaaaagtttgttattaccataagtggttttgcacctatacaagttaatataccatttcactaatcttttcttttcatcatttctaattttcatcaccttgcaatcttttatcggttcaaattctgacacaaagagacatagttacattttaaacgaacagaaaacaaataaaaatgtataaagtatactacaatgttcttctattcacataccccacataaaacaattgaacttacatacaaaaaaataaaataaaaaacaaataaattactattaattctttcaaaaaacccaaaatactcataagaagaagaattcataggcttcctgatgacgtgtccttctgtgaagggcttctccaaaagccagccccatagaaacgatccaacatttcattttcaagcctgacgacgtcgtttaactcaccaccactcacatgacattcctcaaaaacaatctcagccgttagatcttcttcattcaatctagcgtgtacggtactttcgcttccttccgccgtcgctgacgcaagcaaaccatgtcgtttcctcgtaaaacgtcgtcgtttgcttcgcctccaagcttttttacaaaccgcggccggaactttatacacggctaaaaccattagattcaccaccgcgcatggacaacaacaccacacagccgcacactccgccgccgctcctcccgctacctctccaacttttcgtctctctttgcttaacgacgtcgtcgaaggaggagagtttctcatcgttgattcttccgatgaaactaacaacggggattttaaaatcacgtgacgagtcattgaaattaaaaaaaaatatcacgtgaccttggcaaaaaaaaaacacctctgggattaacgattagtgaaataacctttttctctcagatatctccgaggaaatagaatctagtgaaaattgacccatcgttgttgataaggtcattcatcattttgattctaggttatgttgctaatcaaatcataacgatgatgatcccaggaagagaaagattgagaagaactggtggatggtaaagtagaaataggggaggaggggatgaattggatgagttaaaaaatagctgtgtaaattttctaggattggttgtaattttcccgagaaaatgagagaaaattttggaaacgtttggtcagagagaataactgaatcagagaggttaaaaatggaaccgagaagatcggagaagatataaccagagatttgtttttctatgttcttaaattaaacaaacaataataaaatgattgaaaaaatcactgtcattttttcttcttttgaccctaaattaaacaaaacaacaataataaaaagtttgttttcggctttttctaaccgattttaatttgtttttttggtagaaattttctgatttttttgtttttgcaattattatattttctctgatatgacttgtattttagcatttgatgctattgagatcgtgggagtttgcagaagtagcggttatggtttaagtgctatcaaaccttttgaaaaattggttttgaatttgaaaataaatatgtttgtgggagttttatgactgataaaccagtggatatgaaagcggttaaataaaacaacgattaaaataaatattcaaagagttacacgtgctaatgaatgaaataaagatgacgatattgacgtttgcttcttgatttttattagtttgggtgtaagacataattaaaagaatataattactaatattgattaggatttttaaaaacatgcatacaatgatgatgaaagatattatatgtatatatacgattagataaatattgttttaattataaataatgttaattttaaaaatattttaatttaactactgtttgtaaccgcaaacgtttacagaaaaaaagagttcttgaaatatagcgattttgaatgatccagagcagtttccaccagtttgtatgatagttatcaataattaacaaccgatagcacctaaacacgctgcatttggagtggtaaaaagaaccaatcaaccccttaaatccctaaaatcacacaatacgtaggttatcttttagtaaaaaataattgtcaaatttccctttggctgcgatttgagaaagatagcgatttgtttggtttggtccacacgtgacgtgtgtgatattggtataaaaagttgtttttggagttctcttctttttgtgtttgtactaaccgtaaaattggttgcttatcaaagcacctaactattttttttctttatcactttctatctgtttaaattttgtgaacttccagctggtatgagcttatattagattaaagtataacaaaacaaaaaaatatataattaaatatatgagtcttggtttgaatggatctcaatcttatataacgaaagtatttgggtgaggatttttgaatattgataaagttgttgtatatcattttcacattagtgtgacattaggatttttgactggttatgaacgatg

SEQ ID NO: 13987 - DNA, 3000 bp, Unknown
  misc_feature (1)..( 3000): cDNA_ID_2705783_gDNA_ID_2214687_Annot_ID_189355 3000 nt of promoter + ATG
caatgtcaggaacgaagtcgatttcgtggttgccagcagtccatatccaaggttgataagcaacacttcgctcaacgaaccttccccaagtatcccatctattgttgtcgtggttagggtagcgatccgcgtaagacaagtctcctacaaacagaaccgcttgtccttttcccggattcatctcataatggcttaacgtactatttgagtcataagtttgtcctagatcccctggaacgtaacaaaaagtcacacataggaaagttgtttgaggttttattcaaatgtgtaaggtttgatatgaaacttaaagacaacatttaacataccaattaatccaaatgtgtaaggtacgtcagggcctgatttaggcgggataaagaaccagaaccgtctggaccacttgccactcccaatttcgtagtagtatttcgtatcaaactgtacacgaccatatataacaagtaaaagtaaaagaacacttctaaattaaggatattcgactaaaacacaaaaccaaaacccaactatcaatactgacaataaggataaaattaaccaaaaatccaaagaaaaaaacggctttaaagtgataagacttacttccaaatcatcgatgaggcaatggtgaatataaccagacgtgtaattaaagaaccggtaagtattaactgttgcttctgcttgtttcctcgatttctcattctcacaccaatattgaacagtcttagaaccgggcttaaccggagtcacccaagaaatgatcactccattaccttcatggttcccttgcgttacatgaacctgttgaggtgaattatgaccaggaggaacttcaaaaacatcgctgtctagtggcatgtcatctggtaaatcacttcctctgacatattcacttgtgaaccctccatagcaaaactcaacaagaacacttagcaagaagattatcaaagaaactcgtttgattttgaggtcagatcttgaactcatcttcaagattagtttctctgaatccgagacgaagaacgtgctttatattttctttttgggaaattaaatgagatagctagcttgtctggccagacacaatcatatgatttttttttttttttccaagaaaggatcgcaagtggatattccaaatttttattttatttttaatcaacctttgaaaatgaaggcttctaagaccatctctatctaaaaacaagaaaagtttctaaaaaaaatatatattaatattttaactaaaacaaatatattaattattatttaataattgaactaatagtatgatgacatttgtccaaattggatgagaatagtttctcaaagtttctcggaagagaaactcaactctccttctctcctattttttctccttcctctcatattttttttttgttgggtatctcattgagatacttccaatgaaaatgctctaactatcttttttttttttttaatatcgattaaaaagtgttgtaggaaacaattgatagtgttgctttcatttttttcttacagattttaaaacaagattttgaatgtaaaataagctttttttaaaaatatattttcattacctttttgtttaggaagggttattggtttatagatttataatgaattgaaaatccgaacaaaaatcatttgtaatttaattattgattttaaaattttaattaatatcatgtgttattgattcaatgatttataaatactagttaaaatcctttgttattcgtttagtcatttgtttttggatttgagaatccaaattatgttttaaataaaattaaatggatttgaaagagaaaatagaaggattcaaatccatggataaacacatattattttaaaattcatatattttaattttataattaataaagattttcaaattctatataaatttataaatcaatagcactcctttaagctcgatatcattgcttccagtctctagttaggctattataaaatttaacataattcggttagatatttaacataattcggttagatataatccggttataaaccctttttttcttttacatattttataaactttcccaaatatatgtaaggtatatcaataatatataatttcaatgatgtttatatttagtatatttaaattttcgttaacgttttcaattgtactcttacacaatttttggtgttgtttttgaactaaataatcattttagacacgtataagtatttttataggcattatgtgttccaaatatactatatcatcgtttttaacatcataatctagagttattcatactttttttaatctttgaactatatattatttttgatatggatagtcataatatccatttttaaaggttaagattactaatctttttttttctttggaacaccggttaagataactaatcattctctcgatttgaaagatatttttttcacaggtgaatacatttaaacttttaacatatatcaaaacaaaacaaattttgtagtgccgaattcattttgctatcatctcttcatacatattttttgtccaaaacaaaattacaagatgataaaaatttaaaacattactattacgtgattttagattgtcttttttttttttttttttggacaaaagattttagattgtctaaagtcatatatttctaataaaaattttgaaatattttatataacaagtttttaatattttataaatctaaggaaatgtatctaaaaacacttgaaatatcttaactatctacatctatgcgattggaagcagtagagatagtaaatttcgcttgaaagatctaataggctaatactacttttctaattttatttgtttcgcacgagagtctctctgcatttccgagttttgctgaaatcaaaatcaaaatcaaaatcacgacaagaagaacacaaaagtgctcaatcgtctcctcacgatatatatctgctgaatcggaaaactcaaaggtttcaccggagaagaaa

SEQ ID NO: 13988 - DNA, 3000 bp, Unknown; identical to SEQ ID NO: 13985
  misc_feature (1)..( 3000): cDNA_ID_3409620_gDNA_ID_2214687_Annot_ID_189354 3000 nt of promoter + ATG

SEQ ID NO: 13989 - DNA, 3000 bp, Unknown; identical to SEQ ID NO: 13987
  misc_feature (1)..( 3000): cDNA_ID_2705783_gDNA_ID_2214687_Annot_ID_136718 3000 nt of promoter + ATG

SEQ ID NO: 13990 - DNA, 3000 bp, Unknown
  misc_feature (1)..( 3000): cDNA_ID_2705789_gDNA_ID_2214687_Annot_ID_136719 3000 nt of promoter + ATG
tgtggttggctttgttgggtacccgaatgtggggaagagttcgacaatcaacgcattggtaggtcagaagcgaactggtgtcacatctacccccgggaaaacaaagcatttccagacattgataatctctgaggatctaatgctctgcgattgccctggtttagtcttcccttcattctcaagctcaagatatgaaatggttgcttctggagttcttccaatagaccggatgaccgagcaccttgaagctattaaggttgtggctgaacttgttcctcgacatgccattgaggatgtgtacaacatctctctacctaaacccaaatcctatgaacctcagtcccgcccacctcttgcctcagagcttctaagaacttactgcctctctcgtggttatgttgcctctagtggactacctgatgagactagagcagctaggcagattctgaaagattacattgaaggtaagcttccacattttgcaatgcctccagagataacccgagatgatgaaaacgagacagcggatgacactttgggagccgaaacaagagaaggttcacagactgagaagaaaggtgaagaagctcctagtcttggtcttgatcaagttctagatgatcttagctcgtttgatcttgcaaatggacttgtgtcttccaaaacgaaacagcacaagaagtcacataggaaacaatgattcggtcttgatggaacgccaattctgagagttttcctgaaaccgatcaacaaatgctcgaatatatgatacagttgtggatttttcttattgtagaaatcgtgataacattctaacagctgttgtttagatattatgtttgagcaaatactagtgatatcgataaagtttcaacttgatgctagtcaatatattgatgaagagtccttcgaagcaggtttggtagttgtaatatattgccattgagatattatagatcactcactcattgtgggtttgtttgttttctatttgtgggtttgtttgtttttaaatatgtgtaaaatcttggcctgttacattggctttataccataaataacaaaaaaaaaaaaaaaaaagatcactcattcatatgcaaagcaactcaaactacaattttcatttcccagacttttattgtattttttcaatttaggaatcagacttttgttttagacaaaaaaaaaaaagaataaacattttgtaacctttatattctccagcatcactcttgtactaaatcaatgcacatgcaaggttttctcaccattgttgatattttcattttttgctctatttcatagctttggactttggacaaattcaatagattcctcaagctttgtcacttcatctaaagtatgtcatcgccgtcttttaatgagcaaacaaacatatcagtaaagaagtcaacaatttatttgcaattggctcaaatttgagtagctcaactcttctaactcagaattttcctaggttcttcattgttttaaaaaaatttggcaaagggaaactttactgattaagctctttttgtagttaattacaaaccctctgaaatttaaattcatatataaaaaagtgtaacatccagattgtacgcaatgatgaatgagtttcattatttccattatattagtcatttttcttcatagattatttctaaagcttccaaaactgaaattggcggtttgtacgaagttaatctgaattgactaatgtcgtttctgttgtagatgacattcaatgcattagaaatcctcatttcattacgatttttcttcaccattcattgtatatttattcatgagcaatattgtttattccacttttatgtattgtaacatggatattattagcaatattttgatgatggagtttcatgtgttatattcatcaatgaacttaaaattgactgaattcttactttctagtaaatgtagttactgccatttaagaaccgaggacatgtgaccgaacttttcttctctacgtggttttatctagtctcaactctcaatttggatgatcaaaaccaatgtaaaagtcttatagcacttattggtgaccttaaattcgtaggtacattactagattctgtactgtaagatacatttctatatgttactgcctaataaattaaaacatttataaaaatacgatacaaacatttgaaagggtacgatgtcaaaaaaaaaaaaaaaaattttgaaagggtacaaactctgagaaagtgtgtcaaatacaaatagttttctaaaaagcgtatcaattatcatagtataaatcaccctttataaatcaccctaaattttcctagaaaacactacaatttgcaacatatgtctctcacaaatccaccattaggtatataaaataatcaacacaatattttaagctaactacacattaccaaatcagttcagtttcatgcgtattgtttgcattacataaatgatgaaacaatttcttagtacaagactatatatagcttcaatttcgttactcaaatcgaaatagataattgttttatttcctcaaataatttctgttgtttttatagtaattaagtaaatgataaaaatgatttaataaatgtaattatcttagcttaaagagagagagataaataaacaaagggcaagttttttgattgtttggtgttgagtgtctctctgtccttattcctcaacaaaaaaaaaaaaactgggaagaagaaagaacaaactcattttcaaattctccgaatctctctactccaattaacttttttccgggaagatctcaccggagaaaagctagctagggtttctccaccgtgaagattctagaagcgagaatttggaatttgctaattaagaagatgtgttacgatctttcttaattaaaaaagcattgaaattgacgaatttagggttgtgaaaaatatggatttggattcttcaatggtaccagagaatgatcaagatcctattgctacgtctgagaatcaatctcct

SEQ ID NO: 13991 - DNA, 3000 bp, Unknown
  misc_feature (1)..( 3000): cDNA_ID_2705793_gDNA_ID_2214688_Annot_ID_136720 3000 nt of promoter + ATG
tctgattagtcagagcatggaaatatttcgaattattgtcccctagagtcatccaaagactccgacttttctgataccaatattgttcctcatctcgataagcctcttttagccgtaatgttagatctgtaatctcttcccgtgttttcgaatcatccctcaaagccgcatttaattcatatttaatatcttctattgtctttcgttcgtacggagttaattctctccgccattgggagatagcccgcctacaattatttaatttttccacaaactgcctttctcctgaaccagtggcgagttttcagccagtagaaattgcctctaataacccttctttgcctatccatcttttatcaaaccgaaaattttgctttcctcgtgatttcttatccgcaatcgtggctatcaatggtgcatgatcggaagctaccatttttagatattcaataaaagaattactaaataaatcatgccaatcttcattagttaaagctttatgcaaccgacaccgtattggttttttatcccgccaattccgccaagataaccaatctccatgataaagaaactccaaaagcccgcaatcttgaattattaaatttataggtataaacgaagaagcatgtcttaaactgccccctcatttttcatggttacatgttaatgcattaaaatcgccaattaaaaaccaaggtgtatcccgagtcgtaccaattcgtgttaatcgttcccaaacttgatctctattttttggtatcgggtctccatatacaaacataagacaaatagtttttcctttataaactggttcaatatcaattaaccgattactttgaaaaatgattgagacataataatcattattataaaacagagctaatcccccactataaccaatagggtcaaccattgttaaatttttccaagtgaccaacaaatattttcatatataacgtagattattttgtttccgagagaaataaaaaatctgatcgatattttttccaaaaatcccttaaatatccaatggttgccatatttcctaatcctagacaattccaactcaaaaaggttctgaagttctgcttattcagttttctctctcgggcaccattttcgaggacagcttcccaatcaaacttttcgacgccggtgagcaagatgctcaccggcgtcgggagatcccaagtcgcttcaatctctattatctttgcatcacttttgtaactcttctaagcttttctctccatcttcccgaccaccacagcaaccctccattaaatccatctttgattctcggagatcacttacccatacccttcaacattgcttcactccgtcgatctactccaatggccactgtcgacgattttaaccccgccctagtgctaacgagatctctcacttccaaatttgcagttcctcaacccaaatggtaccgtcactcgtctatcttgagtctctggaccacttttgtgccacaacatccggtgaagcttcattccactctgatcttcaactcgccgaagtcctgccgccacagtcaccaactcttcatcgcagccactgagacactagggttcctgttattgggcctcccccatttcagcccatttctctcttggcccattgtcataagtgacggcccacctcctttatccattaggcccaagttttggctaaactttcccctgttttttctctgccaacgtttgtctcgattgctgaaaataattgttagatgtcaattaatccataatcaatcatcgttgctctgcttgtacaagccttctttgagaacctggttattagagtcacctagggattctactcttttttctagatccctttatcgaagccatttacaaaggttgagaaagtgcggcattatgatctcatcaccaaggtacggtgattaccgcagctttctcaccttccaatctccgtctcctttgttcaccgagttctctcttgtgaaatctatcaatttcagtgataaactccttatgctcatgaaaaccttgaagctcaggtctggtaatcttctacttgtgttaaaccaaagactaactttgtgtgacattcttaatctccatagtcaaggacattatgcgagagagaatccacctgttttgttgcagtttcatacatatctcttgcgaaccctggttattgcttcagcgatttttttgagtttgactacagacccttgctccttctcaacgtcattatgtcttgtgacaatgaccaatcttccacttcccggatcgatcgtggttgtgtctccgatttaccttcttctcgcatgtggcattgtgttctacaactcttgtctccgagctagcatggttttatcatcggactattgtacttctatctttattgtttttatctttgttgtactaaactctgagaatgatattctcctaagccttgtactaagtttgagtgattaaatgaaaacaaagttttttgacaaaaaaaaaaaagacaattccaactcaaaattttcataaattattctaatttttttttttttggagtattccttcaggtcccatccccttttgaaagacctttggacacagaaattgtgttggataaaattaatttatccttcctcaaaattaccagcattgtggcatatgcctaaaactcatcagatccatttaaattaagaccccaagtcctgaaagtaaacaaattacataacaacaaatccttaagaaaaagatgaattctccgaacataaccgaaagtatgataaaaaaaagatacttgaacagttaaacacaaatataatagtagatcctcgttcactgacacgaaacataaaataaagccaaaacctttggttcgttttattgaagtaatctcataaatgacaatgacttgtgaacgtgagccaacacaacaaaagaaaatagaaagcttataaagaaacttcggttccaccgaatacatatttttaaaaataatcaaaaaatgcaaaccatg

SEQ ID NO: 13992 - DNA, 3000 bp, Unknown
  misc_feature (1)..( 3000): cDNA_ID_2710780_gDNA_ID_2214688_Annot_ID_189365 3000 nt of promoter + ATG
tgatgttatctttttacagaggttctttgaaaggcggaagcatgacattgcataaacagagagcgtcatgccgattgacttaagcatcacttcttttcccccaagagataaagttttcccaaaccaaccagataatctacaacgcagcttatctccaatgaaagcaaaaagagccagcttggaaccactaaaacattcaggaattttccgtctccatcttcctgcgagatgccaagtatacttttcttactatgttttgtgattccgtcaattttagctccaaaggaaatggtagatttctgaatatttatttgttgtcccgaagcatctccatagagctttaaacattttagaatttcagaactctcttctatgtttgtgcgacataaaaacaagctatcgtccgcaaacataagattttgtattgaagggcttgaaaaaagtaatctcatacccgttagtctttggacattctctgactgcttcataacattgataagcgcctcaacacaaaagaataaacaagaatggagataggggatctccttgtcttatacttctttcaggtttgataaaaccatgagctgctccattaatttgagggtgtttacatcttcatgttaaacatctaacaataaaaccatctaacatatatttttaaaaacatttttcacaatcaaaactattaattccacgtaccatactgaccattacttttatttatttatttttgattaccattaattagataaaatattcacttatataagaacttgtgccatgcacgggtaaatttaactctatttaattttatttataatataagtttttcttagacttttaaattttttcactatgcttgaaaattatattgtggttgtgttttgtttcataacatgtttaaaggcataaatctgaattctaattgatttgttttcttgagtcactaaatctctgaccaaaattggcccaagtgtgtagttgtgggtgaaaactcttataaagtcttactaaaaattatttttatagtttagttagtggttaataaatacacatatatatgaataattaaaggtatataaaaatatgtacatattatataatatttttctacaaacaaaaatatatatctgatgttaaaaattgtgttctctgaatttcaataatatttgtaaattctaaaaatcaaactaaaaaaatgatttaaaagaagcgtaattgttttataaattacttcttaagacgtgaaaactgcggtttagttaacgtctacaataaagaaaaaattgggtagaaaacaatagatatgatccaaatatgatttttactaacccaattttgatctcaaacaatatatacactaagtttatgattttacctaaaataacatcacacacttttcaatttcgacccaatttggactcaatacatgctttagagtttagatgcatcaatatgttgtcgtttccagcccaaccacgcttaaatgataagtgcactttggtgacataggtggccaaattaattatttaaaacctttttgcattcatcaccatctttttgaaaccctggtattacacattagcattgcctcttcatcatcccaccattccgtactttacaaatgtacaacatgatctaaagataacttgaatttaggaatttgctaggtgtcctctaaaaaaatgatcaatgttcacaaatcgtgatgaatgggaatattccaaactgttgatatttgcggtagtgtccatatttgaagggctgtgggacactcaaaaattatatgattaattgtctcctatggcgtcacacatctaccacaaaccgtatcaaaattaatatctcttttcctcggatttgaagtaagcggcacatatccagtaataaattggcaaacaaaatgtctcaatttcggttgatattgaattttccaagaataagcttgaagaagtttggtatccaggacaaaatagcgagtttgtttccaccttgcttcatcatttgttatgtatagtagcgagactataatagatgtttggtatccaggccaaaatagatgataatattcatctataacacgacatatcaattttactataatatgaatacttatatacctattatcctaatttttcactatcatgaactcatacaacaacaatatataatatatattgagaaaatgtatgtagttatattatttgtaatctgaaacttgtctaacttaattgtaacaaataattcttttaaaatgtatgtggttatgttattttttatatatatatgattgaagttttttttttatcaatttgttctgatttgtttttttttttgtttactgaaaatgatgaaatttggatcccatcgttttttttgatgattcttttctttgttcttaccaataaaaattttatgttctttttgtttataaaattataacattcataaacgatgtcaaaaattataattttgaatagggctttagataacgttggaccggatcagcttacgtgtcagaaaaaaaaatcacataactgagagaaagagtcacaaattattacttcattctatctctaagactagttcggcattcgacttgtctagtactatcattttcttatatgtaatcgttaaagcccgaacaattccccgtgatagccaaaagtatctctttgttatcccaaaaggtaattaccttctccgatcctcctatcaacatcaaatatataaaacgcttatttcaaaaatcctattttacaagatgataaattatattttagcaacataaaaaaatagataatgaagatatagtaaatgtaataaggtatgtgtagcaagttatctattgtttttggcacgatgtatccacatttagccttcttatctttgtaactatggacgcggtcaataagtaacacgattcgtcttgtttgcctaaaagaaaaatattcgtctctgtttataacatttgattaacattttcaacactaaactatg

SEQ ID NO: 13993 - DNA, 3000 bp, Unknown; identical to SEQ ID NO: 13992
  misc_feature (1)..( 3000): cDNA_ID_2710780_gDNA_ID_2214688_Annot_ID_136721 3000 nt of promoter + ATG

SEQ ID NO: 13994 - DNA, 3000 bp, Unknown; identical to SEQ ID NO: 13991
  misc_feature (1)..( 3000): cDNA_ID_3021232_gDNA_ID_2214688_Annot_ID_189363 3000 nt of promoter + ATG

SEQ ID NO: 13995 - DNA, 3000 bp, Unknown
  misc_feature (1)..( 3000): cDNA_ID_2710782_gDNA_ID_2214689_Annot_ID_136724 3000 nt of promoter + ATG
aaccccctgtttgcaaaggtatggaatctacaaactgctccaaagattaagatttttctttggaaagtgttgaatggtgcagtagctgtagaagatagactcagaagtagaggagtaaaagctgatgagggatatttattgtgtggtgctgagcaggaaacaattaatcatattttgtttctttgtcctgtagctagacaagtctgggctctttctttagtgccatctgctttacatggatttggaagttcaatctttacaaatctttgccatgtctttgatatggtaaagaatagtctcataactcctcatatgcggtgtgttggtccttggattatttggattttatggaaaaacagaaacaagcttctttttgaggggattggttcattgccaaattgtctaaacgataaagcttatgaagactgtcatgaatggctcttggcacaacagactttaaagtctgatacacagccaaaggaagtatctagtaagaagtggaggccaccaccaaagggcgagttgaaatgcaatattggctttgcatggtctaagcagcagctttgttctggtgcatcttgggtggtgagagatgaccagggttcagtcttattgcatagtcgccggtcatttgctcaggtacattctctttctgatgcaaaatcaagaagttgggaatgggctctaagtagcatgttagatcatcggtttgataaggtcacgtttggatattcctcttttgaaatcattagtgctctgaacaaaccaaaggaatggcctatattaactggacatattgctgagcttttgagtttcactaaggacaaaccggattggtttttgttattggaacctcctgagtgtaaatagaggtgcttccttgattgcacaaaatgttgttactggttttagatgtcaatcttacgtggctaggggatgtcctagctggctgcgattactgtttgatgaggaaaggtgttgaatagcagaaaggttgtgatttgtgttaggggtcgtgtgtgatatttagttaggtgtcggtgttttctcgcttagtgtcctcttgtgttatgattgcttttagagatttatttactttttaggtttccattaggttaagctaaataaatttgttttttagtgtggttgtttattcttttttaagataaaccttctttttttacggtttttctttttccaattaatagattttaccttatctttgacttagtcttatttgtcttttagcttgagtttttgtttgtctcgctcttttcttactttaggttgttctatataagcgtctcttaaggttaagctagtatcacaaccttctcttgcttttcactttcactctcacttctggtgctatggcagacgagttgtgggatgagttacaacacttggagttgggaagggaggatcctgctctctttattccgcatgaagcctatgccattgtggagtctaggaatcggcttagtctgatagctagacctcttaatcctcgctctcagaaccttcacgctgtgatctcggctttaccaagagcatggggtctgactaatagagtgcatggccgggtccttaatgacacgtttgtccagttcatctttcaatctgagattgatctcttgtcagtactacgaagggagccttggctgtataacaactggtttgtgacagctcagagatgggaggtaaatcttacgtttcacctgttaacatctattgaattatgggttcagatgcgtggaattcctcttttgtatgtgtgtgaggaaactgctttagagatagcacatgagttaggagagatcatcactctggattttcatgactccactacgactcaaatagcttatatccgtgtgagaatccggtttggaattacagatcgcctgaggtttttcctaagaatcatttttgattctggtgagactgctctgattagctttcagtatgaaagacttaggagaatctgtagtagctgcttcagaatgactcatcacaggaactcatgtctttacaggcagattgagtctctccatagggtgactaacactacagctcaaaggaatgttagagaagaggtgttcatgagagatgaaaatctgagatcttcaatgaattcacaatctcaaatgtctgagagttcgtttcctactcctattgatccacctccaaggattcctcatcctcctttaaatcctgatgaattggtggctgcatattaccctcatacaagagctacctctttaccaaactttgcaggtcctttgcctcaggtacctcttagaagaaatgtggatgaaagggattctaacatccagcctttctccggacctgcatttgcagcacactctccacgtctggtggaagtaggtgaatcatcaaggcaaggtgagaatactcagaatgttcacacggtggaaaagggggattcatcaaaaagaaagaacatgggtggtcccaagtttaaagatgatgcaagaaagtccaatgaagatgagcatatgaatggagggattctgaaacctccaaaaaagcgttgatcactctgttataattctgtcatgttttttgatttagttgctttcaattcaatcaagcagccacaagatatgaagaagatggtatggcctaatatccctttttggttttggcatacccgaagtgtattgttatgtggtgtaatgctctgctctaattacccttactatactcttttgctttacaacttagatgactctctagttagataatttaatgttgtaagtggtaaaagtgtgtgtcaaactctgaaagtggatgttcttccactgttgtatcgtttacaactgctgtttttaataaaaagggtaatacttatgaaaaaaaaaaaaaccgtagacgtttgctgtaaaaaaaaaaaaaaaaaaaaaaggaaaaaacaccacaaagctcgtcactccgctaccgaccactcacatcacaagtcacaacctccgccttgagatg

SEQ ID NO: 13996 - DNA, 3000 bp, Unknown
  misc_feature (1)..( 3000): cDNA_ID_3021242_gDNA_ID_2214689_Annot_ID_189378 3000 nt of promoter + ATG
cataataaactcgatttaaattctacacacttcatattgagtgataacattttcatatcaaaataatatttatgacatatcaaacctatatcctagttagtattaaaaataattaacaattaacaaaatataattaataggcctaggtataatacccaaacccgaagaaccgatccaaaaaaacctatccgaacccgaacccaaaattttcaaatacccgaaaaggtctaaacttcaaaacccgaaaaacccaaacccaaatccgaataggtatccaaacatatctcaaattacccgaacgggtcctaaacttctaagcccgaaaacccgaacccgaaatacctgacctaaatacccaaacgcctaaggctaataattaataaaaaaacagaaatccacaaaaatatttagaaaccaaacattgttgaaaatatattttttatatatgccgtaatctcgtaagttaattttacatcatgcaaattaatattaaatgagttaaaattaataaataaaaatattctcattgaaaataattaaaaagttaaatcctataagctaagctatttttctcaaaatgttctatttatgattacattagttaaagacaaatttgttaattttctgttttttgaataaatgttaattgtttataaatatatagatatataaattagtatatgtaaatttgtttactttttaagatattctattttttaaagagaataaaaaagttaaattttgaatgacacatgtaaagatccgatcgtttgacttgacacgtgacacgatcctatgagttagcaactttgaaaaccatactttatataataagatttcatcggtgcttctataaattataaactatttctgacactataaagatttatattaagagaaactgaagttattgggacttctatagacttatattaaattttatcatactctttatttaaatttattttatagaagtttagtagtttcccaataactacaatttctcttttggaatttaagtaggcaagatttatattacttatcaacaaattaaattatgtgaacaaatttgacgcacatatctcaaaagcttgaactttactcatccaacacattagtttcgacatagtggcgagagtggagtatacgaaatacaaatctatgagctataaagtaaacattacaaagcctttgtcaaatttgatatatggacgatataaaggaaacttcaaacacacgacactaatcttatacatgtgcacacatagattaacatttagacgtttcttatatacaatatacatgcaattaatgtatctaagtggatcgttcttataagaaactccactgaaagattatgatatagaaagcaaaacgatattgaaattacctttaaagacaaaagtaggagaggttaattaaaagaatcttcttaatgccctggtatgaacttttaggaaagaaggagacaacaaagctcttccgacgaccagacaaacaaagagagtttaaatctccttatttcttcttcgagtgcagcaatccccatacaaagccctcttcttttggaattgttcagaaacaacctgcttaagttcaatacacgcaccacaactaaagaaatttaaagtgtaatttatattctttgattggatatataagttacatgagctgctaataaattacaaagctttatagctgatgactctccgcattgccgcagttacgaaaggtaatgaaaggtgaatggccgattccataacacaacggagaagacgtgaaagccttaacctatagatgacgtggcatttctttttttaaggatgaaagagcaatgacgtggcttcctctcaagtaatgttttttgtgctgatgtggacacacggaagcctcagagcatctccatcaatagtctctcacatagtttttccttcactaaaaaatataaaataataataaagtaggagagaaagtgagaaaagtttctctgcggagaaactatgagatacttttcttgccacatgtcatattttaacaagttaaataattattttcagaataattatttaaataaataataatattatatgataatgattaaaaaacaatatattgaaatactcctaccaattctactgatgaagatggcctcaaagaacttcttttattagtaagagattagcaaaactaacaaaaaaaactataattaaaaaaaaaaaagtgatattctgtatatttcctatttaactatattaatcccaactttgctctctctctcttcccctttaactggggtagtggagtttgttgtcttttcactatctagtcctacttactacattaccgacattatagtgctatattcttaataacttttctagaaactgttacttttgaaattcacccctaaaccgcagacgtttgattcttggtatagataaaaaaaaaaagaactctctgttctctttcatagcaggtcaataggatatttctttcgccgtttgaatcaaagtcgttccagttttcatttggacttaagaacttatctctcaattagtttgaattgagtggagctgttatccgaagatatctctttcttctgtcggcttagaaatcaagattcacttttttacaagttttgggagcttcctgtgttttaagaattctgttctgtgtggtttgtggtgtttgtgatggaactagaggacgcgatacagaagatgtctattgaagaagatactccgttgattctctcaaatcaaccagagttttgttcgaatgaaagaaacaactgtagtattttgggcaggtttttgaatcctgagtttcaaaggatgtctaattggattctggatatgccaaggatttggagactttataatcgggttcgaggtgttgctctctctaaagacaggttccagtttttcttcaagtctgaaggatttacaaggaattctgaaagttggtgtttggacccaagatgattggtgtgtggttatg

SEQ ID NO: 13997 - DNA, 3000 bp, Unknown
  misc_feature (1)..( 3000): cDNA_ID_2710782_gDNA_ID_2214689_Annot_ID_189375 3000 nt of promoter + ATG
atattgtatggttacatgggttaaagcatctcagtcggcgagttaccagaaaagtttcatatactttcttgacgagatcagtttgaccacatttattggcgctttatatattgtatttgaagatgctgaacattagttttttttccccaggtcagctggtttagtttcgacccagattttcacattgagagagagcaaatgtgctgctacctaactcgcacaacaaagattacacaccaattgatcagagataatttgcatgagaccccaacttatggtggatgggttgaagcaaaaggtcctaggtactgcccttccattgaagacaaggtaaattattttccctcttttgctttgtattgtctctttctttaaacaaggggaagttacatcagacatggttcatctacctttcatttgattggtaatgtttgtgccacatactggaatctaattgtggcttgtgagcataaccatggaaacctaaatttgctagacatagtaattttaagactggttccttctccaacatgcaaacataaattgataacacttttataaggagacaagagttcatctgctacataatggttagcaaaatagttaacagccttagagggaagcatgagtgaaaataggggatggaacagatcagtgggactgttgaatgtttggttggctttgaggccttttggagggtattgggaaagtttaggttccctagaataaacccaatggtgccttagatttctttttttcttggtccagtaagtgtgagtcatttctcaaggagttatacagcagtaatcgtttctaaattgtttcagtttaaatatactttattgtttctagcttggatgatgtcacggtagcaaattatatatgctgattttttgcaaactgctataattttttcatcattttttatttgcaaactcctgaaagtcccttcaattctctagttttgacgtggattcttctaattcctgaaagcaatcttgcatttgctttttctacagttggcacaaagaataagttgaaccatctttctctttaaactgcttttgatgaacttaaaaaatcttgtttggtttcagattgttaggttcaaagacaaagagtctcatcaaatattcctcgaaccagagggccgagatgttcctgagatctatgtgcaggttgatgcataccttagttatgttttatattttttgttatcgtcttagtgaaaaagtgtgaaggatgagaaagaaacctagcttgtcgcctatatgttaatatctaaaacatatgcttgtccagaaatttccttatgtatagtaagagcaagcctgaagtttgttactgctcagtggtttaatgtgggcgtttgtaagtcgagttttcaagactagagaaaatatatcttagctttgttgctaattatcaaggcgtggtatatatcttcttatgagtgtaatgtctttgatatcactagcattctcatgaattggtaatttggtattttcgtagggattttcaactggcctgccagagaatctccagttgccacttctaagaagcttgccaggacttgaaaattgctccatgcttaggcctgcctatgctgttgagtatgattatttgccagctcatcagtgttccaggtcccttatgacgaagaagattgaaggtcttttcttctctggacagatcaacggcacaactggttatgaagaggctgctgcacaggtgactgatctgtacgagtttttaatttccttaattatggaccttgagttcatgaaaaaggtttattcggatgatatggaaaaaaattacgaatactataatgaaaactgctgtttagactttgtacatatatagtgatagcattctctgttattcttttcaaatttagggtattatatctggaatcaatgctgccagacatgcagacggtaagaaacacgttgttcttgagagggaaagcagttatataggtacgttgattgatgatttagtcacaaaggatctcagagagccataccgcatgctaacaaggtaagttccatttcgttctcttgttcattatcctaattctcctgcattcttttatactttcatgatcaatcctccactctactttctgaaatatggtcaggcaggctagagatatgattccgaaattattagaagttgacatctgtgtagaaagaaaatatgttttttcataacattcgctttgtatgcggtacccatctaagtctgtctgatggtaataacagtgacatttttcatcaccaatttttctgcgttacataagagcttgtatgggggaactgaagagagaagcaaaaaaaaacctcgctggcagtactggaataaaacttgactttttaacttttcttgatgcggctatatggccatgacttgttttaactttttttttttttcttttccacgtgaactattttgtgcatgtactaatagcctattactacttatgtgtgtttagtaacacggaataatcaaatgtgttttttttctcaacgacagccgttcagaacatcggcttcttcttcgatttgataatgcggatagtcgactaacgcctctggggcgtgaacttggattgatagatgatagacgatggaagttataccaagagaagcaagcaaggatttcagaagagaagaagagactgaaaactgtcaagatttcaggttatctccgtattctgtttatttcagaacgaacttatgttgttggtccctgcatacatttaaacatgggatagcaaaaattttaaggcttgacaaaactggattaggtgcaatgcatgagttgatgagtgtattgcttgcagttgcagtaggtgatttggctgccgaagtttctagtgtgtcttctcagccagtcaaagaatcagcgacactagagagtctcctaaagaaaccacatatccactacaagcttcttgagaagcatggctttggaaatgaaacattatctagaatg

SEQ ID NO: 13998 - DNA, 2166 bp, Unknown
  misc_feature (1)..( 2166): cDNA_ID_3021306_gDNA_ID_2214690_Annot_ID_136726 3000 nt of promoter + ATG
cgtctcctttaaacccatcccgccatataaatccgtcccgtgataactaaaaatcaaattatttttttcttttaaatgatatttttatttaagatacttgttgtcaatttacaatttcaatctaataagaaaaattgtatgctacattgaaattttaacaatttaataaaaatcaatatatgatcgttttgaagattttatatcgaattctttgaacaaaaaataacacaatttcttgttaaatattttgtatcttttaaattaatatatttcctatttgtattttttatcttcaatatatttggttttaatatattttagaaaacctgttcaaataattattaaaatttgaatcccggagatatctttgtgattttctataatttaaagatatatatatatatatattgtttagatttgttgttgagatctttttagtgtctatttttagattttgtctattttctatatatatatattgtttagatttgttgttgagatctttttagtgtctattttttgttgcctttgtttgtttgcaaggtctatcataattaaggtgaagttacaaaaagatctataaagtattatcgtttacatattgattataaaatctgtagattatttttaaacaaattctgtaaattatatgtttaattgtaataatttaaaaattccaaaagaaaaatattaatatcgatattaaatttattttgaagtttcaaattttataaatatttaaaatttataagaaaagacaaaattatgttaacgttttatatatatttataatgtttaaagttcttgtaaaattcaatttataattttcaaaacttcataagttttaaaattataaatattttttaaaaactttaaagctacagttcataaaaagtttgtaaaattataatatttaacttttgataaaaagttaaaatatttataatttttgaaattttgtaaagtttctattctttaaaataaaaaacgtaagaaaatcggataaccactttaattttggacgcctaataaatcaagcttcctgcctactcgtaactggaatcattttggtcttttttatagtatgactctaaacaaatgcctaattttttaagcgatgtgggatattgtacatatattatttctccatcgattgaataatatatgttcattttaaaaaaaattaaattacatcatatataaaaaaagttaatattttattaactattaatattttatataaatttaaaataaattaaatataagatctaataaatttgaaagaagaatcatatatttatgtttaaattaggtaaagatgttttaggaaattagttaaggtaaataacaaatatggttagtttagagatattatatatattaaatttggtaattaaattaatttcgtttttttttttttgtgtagaaaatgggattagaaaccaattatgaaagattcgattgaaaattttcgaatcaaaacccaaaaaaaaatctgacccaattaaattctttaaagtatacttcaaaaatgttaagtagatattatatttttataccaaaaaaacaaacaatacccaaatacagtatctgaatcaaacaatatccaaaaattcaaaaaaaatcgtaaaatactccaaatataccaaaataccggatagtttttgtagctagaccggttactcattcaaaatcattcaaagaaccgaaccaaacaaaatcctgaaaagaaaaaatgaagggaatactaaactcaagatctaaaaacggaaagtaccaaaccgataccgaaccgaatacatttgaatgaagagtattagttttggttaatgaaaaaattgagtaattatttggctatacatatgaaagttgatcgacacatatcaaaatcttgtaactgtcccaaaagcatatttagaaatcatttaatattttcataatatttacttcatgaaaaaatcaataaaaagatttactcaaatcttaaatcttaaatatctttataaccaaaactataaagttagtatcggagactaataaacacaagtaaactatacgacttctcgaaaacctagttgctcaaactcatcaatggcgaaactaaaggttgctggtacatggggaggcatacttgaggtagaactcgagaattggactctaaacatg

SEQ ID NO: 13999 - DNA, 3000 bp, Unknown
  misc_feature (1)..( 3000): cDNA_ID_2710786_gDNA_ID_2214690_Annot_ID_136727 3000 nt of promoter + ATG
tttcgagtttacagaagagaaaaattgccccaaaagacttccctatttgcattattggtccctggacgttttatagggtctttatattgtttttagacctagttttcattattatcacgttttatcatcaagttcttatcaagctttttgaaaaccctgttactgagagacataagctattcaacgagtgttttcagagattgattcagatcttaatacagtgaagagatcctttctttcccttaatctatttgttgtgtttatgttttcatacccaaatatgttgtttgcttcaatcaatatgtctgagtaatctgcttgttaggaatagtgtttctcattagggattcatatggtttagtagattgcccccttgctacattatctatagaattcttcatctttaattatgcttaatgctagatctagagtaattaactagatcttgaatctagacaatagatatgcccgccataggtatctgtagttagatcgattatttgatgagcctggtttttaggtgtgtaataaaaattggcctaactactacggtaaacaatcgaactcgttaagaatgcttatttaggttgataatgcctcggcttctccggttattcttagctatagatatagggagtttcgcagaacgcgaccggttattccataattagagtttgagtttaagaatggttcgataacaacctagctttcattagatctactaaccaatagctttctgagaataccatgttcctagctctttatttaatcgtttacaacacaatcatcctgctgtcttttaccttgttttcttattatttcaatcataccctgctagcttaatctcgatattctactcactgtttggacaaaagagctccatgaattcgatccttaaatactgcaattgatctcttatttgagagaatagttctaggtaatttgaaccttatcagaggtatttatggacgatatctcagtttatgggtcctctttctcctcatgtttgttaaacttgtacatggttctagaaaggtgtgaggaaaccaatttggtactcaactgggaaaagtgtcatttcatggtccaggaaggaattatgctgggcacaagatttttggtaaaggaatcgaggtcgacaaagccaaaatcgatgtcataattcagctgcaaccccctaagacgtataaggatatcagaagcttcctatgacaggcaggattctacaggagattcataaaagacttttcaaagattgttcaacctctcactcgacttctttgcaaggaaactaagttcaatttcaatgaagactgccttaaagctttccattcgataaaagaagcgttggtgtctgctcccatcgttcaagcacctaactgggactatccatttgatattatgtgtgatgcatccgattgtgcagttggagcagtactgggccaaaggattgatggcaagcttcacatcatctactacgccagtaaaacaatagacgaagctcagacaagatatgctacaacaaaaacggagcttttaactgtagtttttgcctttgagaattttgaagttatttggttggttctaaggtgaaagtctacaccaatcttgtcgctctaaggaacatttacgccaagaaggaaaccaagtcatgacttctaaggtggatacaactactacatgaatttgatatggaaatcactgataagaaaggagttgaaaaaggagttgtagatcatctctctagaatgaggattgaggattcaatcccgatatatgacactatgctagaggaacagctgatgttctaagacgttgttaacaaaaacattaacacaaaagacatacttgatagagcatatgcagttgaagaagaaaaattgtcctggtatgcagatttagttaactatttagtgactggtgatatatccctatttttaatgtttaaactatgttttaggtataggttttagagtctatttgttatttctagagtcttttatagtctttttcaggtctttacatgtttgggattcatttggagataagggagcattctggaggaaaacagagaatttatgctgctgaagaaatccggagacaaaaatgtacgtaggtgtcaaacgacaccacccctggtgttgagcgacaccaatacctgacggcaatttcgaggcgtaacttattgatgttttgaagatttctaaattcggcccagaactttctcctatgtttaatgaaggctcatcacgtattttagacatataattaggtttttagggtcattgtttagacctaagctttgggaggctattccctttttctattctgattttgggagcaaaaccctgtggagactcccgttagagaagattcttcttaactatattcttctcttattttattcattgatttcttattcaatcatgttttgttcttctatgatcatgcttgtgtagttttcttgttaggttttggtttctcattagggatttagatgatttaatagattgcccccttgctaggttatctgttaggattcttcatctttaattgttcttaatgctagttcttgagtagctaactagaacttgaatccacacaataggtatgcccatcataggtatctgtagttggatctattatttgatgagcctggtttataggtgtgtaataagaatcggcctatctactaagttgaacaattgaactcgtttagaatgcatgtttaggttaatgatctctcggcttctccagttattctaacctataagcatagggagtttcgcagaacaccaccggttattctataattagagtttgagtttaagaacggttcgataacaacctagcaatccctagatctactaatcatctatctcctaaaaataccttaaacctgactcttttcccatcttatttatatcttgatatttattgcttttctttatttcttatataatctattggtctagcttgtttgaaaacatcataagtcta

SEQ ID NO: 14000 - DNA, 2094 bp, Unknown
  misc_feature (1)..( 2094): cDNA_ID_3021306_gDNA_ID_2214690_Annot_ID_189382 3000 nt of promoter + ATG
cgtctcctttaaacccatcccgccatataaatccgtcccgtgataactaaaaatcaaattatttttttcttttaaatgatatttttatttaagatacttgttgtcaatttacaatttcaatctaataagaaaaattgtatgctacattgaaattttaacaatttaataaaaatcaatatatgatcgttttgaagattttatatcgaattctttgaacaaaaaataacacaatttcttgttaaatattttgtatcttttaaattaatatatttcctatttgtattttttatcttcaatatatttggttttaatatattttagaaaacctgttcaaataattattaaaatttgaatcccggagatatctttgtgattttctataatttaaagatatatatatatatatattgtttagatttgttgttgagatctttttagtgtctatttttagattttgtctattttctatatatatatattgtttagatttgttgttgagatctttttagtgtctattttttgttgcctttgtttgtttgcaaggtctatcataattaaggtgaagttacaaaaagatctataaagtattatcgtttacatattgattataaaatctgtagattatttttaaacaaattctgtaaattatatgtttaattgtaataatttaaaaattccaaaagaaaaatattaatatcgatattaaatttattttgaagtttcaaattttataaatatttaaaatttataagaaaagacaaaattatgttaacgttttatatatatttataatgtttaaagttcttgtaaaattcaatttataattttcaaaacttcataagttttaaaattataaatattttttaaaaactttaaagctacagttcataaaaagtttgtaaaattataatatttaacttttgataaaaagttaaaatatttataatttttgaaattttgtaaagtttctattctttaaaataaaaaacgtaagaaaatcggataaccactttaattttggacgcctaataaatcaagcttcctgcctactcgtaactggaatcattttggtcttttttatagtatgactctaaacaaatgcctaattttttaagcgatgtgggatattgtacatatattatttctccatcgattgaataatatatgttcattttaaaaaaaattaaattacatcatatataaaaaaagttaatattttattaactattaatattttatataaatttaaaataaattaaatataagatctaataaatttgaaagaagaatcatatatttatgtttaaattaggtaaagatgttttaggaaattagttaaggtaaataacaaatatggttagtttagagatattatatatattaaatttggtaattaaattaatttcgtttttttttttttgtgtagaaaatgggattagaaaccaattatgaaagattcgattgaaaattttcgaatcaaaacccaaaaaaaaatctgacccaattaaattctttaaagtatacttcaaaaatgttaagtagatattatatttttataccaaaaaaacaaacaatacccaaatacagtatctgaatcaaacaatatccaaaaattcaaaaaaaatcgtaaaatactccaaatataccaaaataccggatagtttttgtagctagaccggttactcattcaaaatcattcaaagaaccgaaccaaacaaaatcctgaaaagaaaaaatgaagggaatactaaactcaagatctaaaaacggaaagtaccaaaccgataccgaaccgaatacatttgaatgaagagtattagttttggttaatgaaaaaattgagtaattatttggctatacatatgaaagttgatcgacacatatcaaaatcttgtaactgtcccaaaagcatatttagaaatcatttaatattttcataatatttacttcatgaaaaaatcaataaaaagatttactcaaatcttaaatcttaaatatctttataaccaaaactataaagttagtatcggagactaataaacacaagtaaactatacgacttctcgaaaacctagttgctcaaactcatcaatg

SEQ ID NO: 14001 - DNA, 3000 bp, Unknown
  misc_feature (1)..( 3000): cDNA_ID_3021294_gDNA_ID_2214690_Annot_ID_189385 3000 nt of promoter + ATG
gacttccttggtgttcttggcaaacatagctctgtacttattttctaactctttcttctgtcgaccaggaaatggaagtgtgggcttgtaaggaggaggaatgaatgctttctcattgtttttagcagcaactagttttagagcagcggatgatgttaatggatttgttggtcgagtatcaaggtcgagtatgggctcgagtacttcaattggtttatcaacttgatcttcattgagactgaaatcttccccatcttggtatgcactgtcctcagtgactgacttgggtctctctctagtggattactctcttccactccttatggtgatagcatgaacattagcatactccttgggattctgaattgacttccctgaaagtcctgtaactttgggagcagaggtagatgcggattgtccttccaagtatctgactttggaattcaacgcctccacttttgcattcaggtcattgtagttgcagtctaccttatggtgcaattcagatatctttttagcaatctcaatggagctagatacttgtccctgtagcagctattgtagcatttgtttcatgtcagcgtcaggagcagcatgaccttggtgttgctgaatgcaaaccccggtggtggttgctgttggtagttcccctgaaattgctgcttggaacaaaaccttgattatagggaacaaaaggtttgttttgaccttgttgttgctgtggaggatacacttgatcctgtggattagcaacgttagtgctgcggtaagagtggttggggttgtttgtcttgaagttgttgtaccctttgtagccaccttgattgtggatgtagctaacttcctcgtcatcaacaaggaagtgcacatgcttctgctggctaaaaagaatcttgtcctgcttgtcattcagtgctttgatctctttcttgtgtttgtcatccgagtcagttgttcctctgatggtcctgttgcagtcctcgttgtaatttccatctgactgagctaggttctcaaccaattcccagccttcttcaacatctttgttctggaaatttccattgctggcggtatccagaagcattcttatgcgtggtagaacacctctgtataaagtgctgagcatagaggctttcttgaagccatgatgagggcattggttggtgtaacccttgaaacgctctcatgcttcacagaagctttcaccagtcttctgtgaaaaacaagagatctcatttctgagtcttgcagttctggcgttggagaagaactttgccagaaaggccttcttgcaatcatcccaggtggtgattgagtcatgggacagattctttacccagatgtgtgctttgtcgcccaaggagaatggaaacaaccggagcttgaatccatctttactgacaccgttgattttggttaggctgcaaagcatatcaaatttatccaagtgatcgagtgggtcttccataggcagaccatggaacttgtttccctgaatcatcgagatgagaccactcttaatctcgaaattgttgttttagacagcaggaggtgcaactcttttcctcagacggtgattccttggtgcatctccagcaccaatgttggtgggtacattcgggtcatcttgttcatcagccattttgaatggatggtggtgttcaaggtcgaatgtgtttatcctttccctaagtcttctgttgaagcagttgatgttatcgttgaaaaggagattctggttgtgttttgatctagtttgcatacatcagagttgtacctggatcaagaagacaacaactgaaaaacaaagttagtaaccgaaatgaaaattaaaatagaacttgatctaagaaaatccgaaatcttaaatgtaacaaacaaacacctaattagcaacgacgccaaattaataataggtttttatgatcaaatatcctaaaacaccaatcatgtcgttgtagtattttaggttgtcaatccaaatgggtgtgatgctagcaatcaagatgcaatccgagttcacagagtcaagccaagcaataccaggttttggggtgttctaccagtcctaagtgaacatgcaggaaacagaaaatcaagcagaaacaataaaacactcgaccaacacaacttgttgcagagcactgggtgtggtcaattgactggtcgagtaatagacagaaaatgtaacatggatactcgactgcacagtctgttaccagacaacagggtggtcgagtatcaggtcgagtaacatgcaaaaattacaaaaactaagtaacaaatgacaagatgcagtaaacaatagtagagtaaacaaagaaatcaattagataaagaattcccgaggatggggtaattgagtagttttgtttcctcagtttacagaggtgattgacatgctcaataaattatccctagataacaagttcggtaaccaaatctaagtgccaccgcaacagagaccctcaagttaaactagtcccaaactcaatcagcattgacgagagctaacctaacaggcattacgaatcaacaagttaaagccaaaacgctccctgcaaccaatacctaggtacatagccacaaatttttggaattagtggttcagacatttcatcgaacaccttttgggcgcggaaatatcttggctcaatttccagttgatcagaaagcaataggcattaagaacaactaatccataacgatctataaatcaaagtcaaccacctagcatactgagaattctaaactactctaacctatcctcagaaacctactcactactcagacatcattgtagagaacataaacgatgaatagaatgaaaacataatagcaacatactaatagcaagatgacaacaggatgaacaacttagtaaacgaaaatggaaagcaaatactgaatactgaatagattaagagaaatccggattacaaaaacttcaagaacacagtgtctgcggaataaaacttagtcaacaaaaatgcaaaatac

SEQ ID NO: 14002 - DNA, 1814 bp, Unknown
  misc_feature (1)..( 1814): cDNA_ID_3021265_gDNA_ID_2214690_Annot_ID_189394 3000 nt of promoter + ATG
gatgattcatttaaaaaaaagaaatatttttaaatttttatggaatttaaagtttatatttgtatttatttaaaataaaaaataagaaaatataataaaatcattattgttaattttacagttaaatgagtttatatattttttatttggtggaagattctgattggttagagaaaaaggaggtgaataaaagaattcacctctataagtaaacccaaatatttttcaaaaattataaaacaagttaaaaaaatttgtatcaaacatattttacccaaaacggaaacaaaagttaaaattatacaaatcattgcatgtttaattataattggcggttgttttatgcagaattgaaattttcaacaaaatttagtagaagatgtaagatttgtaagataaactttaatgtaaattgcaaggtagtattccttaatttgattaaacagctaatatataaacatacattaatacggtgacgtataaaatataattatctgccataacaagaagtaccattttaattgtttttttttttaccggtaccatttagacgtttatgacatttaaatagaacaagttggcgtaagacagaagaatctttttcttgatgttttcttcttgggtattgtaattaataaattactaccattatgattaaccatatgctctgtacatttctactcctattagactgaaatattatataataaagcataaaataagtttttagtactaataccacgacatcaagaatttgacggtgtataagtttccacgaatctaaaaattggttcaaccaaaatatatgagtttttagtagataacatttctatcggtaattaaagggtgtaaggattgcattacgaaaatttgtcgcgttcatttttatctttagcccaagtaggttgcattgcatagcttctacttggaacactacttattgtaatgtattactaggcaataatttgactagtcaatccatatccattgtttatttaatctattatgtctaaatttaagaatcactaaccttatataaatatctacaacaagcctatgtaactattttctaacaaagcatacattactattctattcacaatgcttggaccgatgatacttaatagtttatactagttttgtatcttcctcaattggttaatgaacaccaatatgagtcttaacacatctatccttctctcttgtatttggtagatcataagaggaagaaataaggaattaaaattggtgatggctactagagactcttcttcacggagggtttaacctaattaagctcttaagccaaggagatgacccaataaatatatgtttaaagtaggagacacggaaacagctcccacgttcctcactttctctctctttttcttccctctatctctcatctcaccaacactaataaacaacaaccaagtttatatgatatttaaaatgtgtaaaagagttatatctccgaggaataatcaaatataagttttttttttctctctttctctctcccttgtgatcctccataaatcctatcatcaagtactcccctaaagaatcctttttctcttcctaatattactctttgtagtgagtagtggccaaaagtttccatctcccaaagctgactttcagttgagtcctcatggtaggttactacttcttcaattctataccatcttaagtagtgaaattacctcaatcatcgtaccgaattccttatatttgtaccctttatcctcatcttggctccttggtacttaattatagatttaatggtggatgtaggaaacagttgaattatg

SEQ ID NO: 14003 - DNA, 3000 bp, Unknown
  misc_feature (1)..( 3000): cDNA_ID_3021290_gDNA_ID_2214690_Annot_ID_189386 3000 nt of promoter + ATG
ggttctttggggtttgtccaaagaaccaagcttttattctgtagtttttctttgtgttttagaatcttgaaatattaattactcttaatctatttagttgttgtatttagttctttgagcaaagttgtttatcttgtttagatatacatttatgggtttgtgtgttgattatgttgcttgagtagtgattaaagttcttgaggatggatagattagggtaatctctaggatagtcaggtggttaagattaggttatatcccttctggattcgttggccttaatgcttatttcactcagtttagactggaattcgacccaaaagacgttcaaatcgatgcctgatctaggaattctagagatttgtagattctatcccaagagattggatgtttagactacttaatgacttttgatagattgttccttaaagcatgctttgctatgtttcatcaacgagagttgagattaggaactggtaaagttatgaggatcattgtcacgagagtggattgatctggttttgaatctattgtctagggtatttgcctttcgcctgttagccacctgatgaaccctagagttgcccttatcaatgaattcatccttaggacttctattcttcttagatttatttgtattcaccccttgattgcacttttatttacctgttatttcattcacctgttgagttacctgttatttcattcacctgttgagttacctgtttttgcattttatttcttaaatttgttacatgttggttccactcgacccaatgatcgagtagggcacttaagttctcacttttgttgtttgaatcctttaggattgttactagaatcccaccatcattataacatggcttgacttagttgcttctatacacatcttgattgctagcaataacagtggactggtttgacaccccctatagctgcatcgacatgttagtgtttaaggagaaattgaactaaacatcacattcaccatagttaggcctaaaaatctaactatcaatttgacgtcgttgctaattcattgttgcatggttacattcaagataccagaaaaagttaagatcaagttcttttacattactcaagttactaactcatcttttcgtctgcttgtttttgtggtataggtactaatatttgtgcatgcacactcggtccaaaggatctgcacacctactacctttcaaagacagaattgacagactagctcgtgagttataagaaacaaaagcaaaggaagactgtgatcaacaaagaccagctcctacggatcaacagaaaagaggagttgagatacaagacccacctaatgttgatcaaccaagaaacattggtgctggtgatgtcccaaggaatcatcaccaaagacaaggaatagtgccaccacctgttcagaacaacaactttgaaatcaatagtggtctcatctccatgatccaaggaaacaaatttcatggttttcccatggtagacctcttggaccatcttgacagttttgataggctctttagccttaccaagatcagtggtgtcactgaagatgggtttaaactaaaactatttcccttctctttgggagacaaggcacaccactaggagaagactctgcctctagactccatcaattcatgggatgattgtaagaaagcttttcttgccaagttcttctctaatgctcgcacagctagattgaggaacgcgatctcaggcttcaccgagaaaaacgatgaaacttttgtgaagcttgggagaggtttaaaggatacaccactcagtacccccatcacagttttaagagagcttccatattgagcacactctacagaggagctttaccaaagatccgcatactgctcgacactgcttccaatggaaacttcatgaacaaggatgtagaagaagtatgggagttagtcgaaaatctggcaaaatctcatggatgctacaatgaggattatgatctctcagtgagaggaactggagaaactgaagatagacaaaagaaggatatcaaggccctcaatgaaaagctagacaaactcttattgactcagcagaagcagatacgctacattactgatgaagagcacttccaaatgcaagaaggggggaatgatcaaactgaagagatcagctatattcaaaactaagaagggttcaacaagggctacaacaactacaagcccaacccaaacctctcatacagaagcactatgtagccaacccccaagatcaagtgtatcccccgcaacagaatcagtctaagcctttttgttcaatacaaccaaggttatgcctctaagcagcagttcaatggaggataccaacagccaaatcaaccaccagggttcactcaacaaccaaagcagacagcaggagcacaagatcctgacacaaagcagatgcttcaacaaatcattcacggtcaaactactggcgctgtagttctggaaaaacgattggcttagataaatagtaaagttgattgttcctacaatgagctaagaagcaaatatgaggatctaatatccaagatgatatacaaggaaagccaagctgcttccaatacgtcctccaagtatccagggccacattcaggaaaagccattcacaaccctaaagaatatgcacatgcagttacacttcgcagtggcaagaaactgctcaataatcagaccaaagagagatcactaaggatagtgaacttcaagaaggggaggatccacataaaaacgaagttcaaattgatgaaccaactaaacttgatcagccttcagcttcactcgaccctctactcgatcgagcaaagctaacttttgaagaaagaaaagatgcggttgtagaaaagaataaagaaattcgctccgccaccctacaaaccgacggtgcctttccctggaagattcaagaaggaattaacaaagaaatacaaaagccctttttgataagcaactaaaggagattgaattaagaatgccatta

SEQ ID NO: 14004 - DNA, 3000 bp, Unknown
  misc_feature (1)..( 3000): cDNA_ID_3021330_gDNA_ID_2214691_Annot_ID_189398 3000 nt of promoter + ATG
gtaggtttaatgattacttcataggtttgtcgcccacttcctcctatttatactcgattaaaccctcgagaattcactttccgccgcttgcaagaagaatcaaaggtagctctcattcttctccctgcgaattatttttcgttctccgtacttttatcgaattttctgataatgggtaagactatcatcgtttcctcctcctcttcctcttccgatagcgaaactacaatgttagtttgccataaatctcgattcgtagaaaatcaaagagccgaggcccaatctagtcgggctaatcaaattgagattccgaggttgatagatgaatcagatcgggatggcgatgacggtaatccggctatccttccagaagaaccggtaaactatctggatcgattcaaacccctcatcgatctggaagtcgcttacaacgtcaatccgagatattcagaagctgaagtcgtggcgaggtccaattaagaccgccgaatttgatcttgatccggttgtcgactagaacagtgagatcactgcgagtgaaactctctcaaaagaagaatccgtcgtcgaactgctttcttcttgtgggtgtggagatcgcccaatcatatacatgattcctggtgcagacgattgtccctggagtcctcccaaggggtatgtttgcttatacgaggcctacttcaggcaatgccacctctggtttccaatcccgtccttaatcatttctttcctcactcgccgtcgtatggcgatctcccaacttactccagcagcaatctgtaatttcgtcgctgccttgacttttggtgctaaggaaggctatcgagtgaacgttgaagagctgacaacgatgaaaaccagtaggtcgcctggatactaggtggtaaacaatcgccccaaatataacttcctccctggccctaaggttagcaatttcaagaactgggaggagttctacttctttgttagggctgatcttgaatcttacgagagtccgttctcgggaaggaagaggatgtgggcagaggatcctggtagacttctcttaaacagataggacttgaaagatcttgattttgaactcgttctcataatttctcttcatattgcagatcgctacaaggccagcccaaaatttccttctgagttcctagaggttagagaggcgatcttccgagctcacaatcgtacgtagagaagtatcacccggtcgcgagtgatataacccgattttcaccgattttatctatgttttatgtataggattttgagtctttatgttatttctcgggtctttttagtgtcttttcaggtattctatgcaatgggacaacaatggagataaggagacattttggagcaaaatctaaggaaaaggaagttaaggacgattttggttcaggaatcagcgaggagtgtcgaccgacacactcttggtgtcgatcgacaccagtttcagcccagcaaaaaccctagacgctttcgagtttccagaaactcaagtttgccccagaagacttccctatttgcattattagtctctggacgtttttagggtctatatatattgtttttagacctaagtttcgtttattaagtcttttatcaagttctttgcaaaaccctattgtgagagacataagctattcattcgttgttcttcagagtttcattcagatcgatatatagtgaagagatcccttctttcccattctctatttactgtgtttatgctttttaactcaatgcatatttattgtctggatttaagatctagttaattactctagatctagcattaagaacaatcaaagatgaagaattctatagataacctagcaaagggggcaatctactaaaccatatgaatccttaatgagaaaccctattactaacaagcagattactcagacatattggattgatgagtctggtttatatgtgtgtaataagaatcggcctatttactaagatgaacaattgaactcgttaaaaatgcatatttaggttgatagtctctcggcttctccggtcactattagctatagatatagggagtttggcggcacgcccactggttattccataattagagtttgagtttaagaatggtttgataacaacctagctttcattagatctactaaccaatagtttcctgagaataccctgttcctagctctttattaaatcgtttacaacccaatcaatctgctgttttcttaatttcattttcttactatttcactcataccctgctagcttaatcttgacatttaactcactgtttgaaagaagaactccgtgaattcgatcctaaaatactacaattgatctcttatttgagagagtagttctaggtaatttgaaccatatcaaatttggtgccgttgccggggttcttaggaatcatcattgagtttactcacgcgttttttgttttcttcttttctgtgtttcaggtgtatgcctaggcaaacaaggagcacaaaacagaaggagcttatcaacttgtctgttctggacttagaaaaacttgaacgcaccaacagaaaaactcagaaattagcaatggttgacagagtcatcagaggctggtcagagattggatgatcatggactcatcctacctgaggacgccaatgaggatcaggcgcgcctcaatgcgcaattagctgctagagacgcagctgggcttggtgtcgaccgacaccaactgggtgttgatcgacaccatcgagagcagcacacagatacaatcggtgtcgaacgacacaacagaggtgtcgatcgacaccaacaccagattcctgcagctattcctccagctgcggaaccacgtcgtactcttggggatttcaacaggccagacctgttctagctaatcgatcagcgattgtacccccaccattccaaaggaacaactatgtgcttaagcctgcctactttgctttagttagccagcatcctttccatggcttatctcatgagcagcca

SEQ ID NO: 14005 - DNA, 3000 bp, Unknown
  misc_feature (1)..( 3000): cDNA_ID_2705814_gDNA_ID_2214692_Annot_ID_136729 3000 nt of promoter + ATG
ctaagaaagctctgtgacttttagatgggttctcggatgaaaaaatcggtattcgatgaacaaacgtcaaaagcactcaagaaatggagaatggcagtgaagaagaagaaaggtgtgaaagccactactaagagactaggtggagatggaagtgcgagccctacggcatcgacagttaggtctacttcgtctgtacgttcattgcagcgttacaaaaccacaccacattcgatgagatacgaaggacttgaccctgaaacatcggatctcgacacagataatgaagctttgactcctcccaaatctcctccaagcttcgagcttgttgtgaaagttgaaccaaataagaccaataccggtgagactagccgtgacactgaaactgattctaaagagttctctttcgtcaagcctgctccgagtaatgaatcatctcaagaccggtgagactagtcaggattgtgaaggtgtagcctgcgccaagtaaagacttcttttcgagttaagcctgcgccaagtaaagaaccatcgtagtaaagatgtgtcactccagagtttttttttttttggtttcatttatctaatgctattgtaaatcaatgccgtggcgataaagtaatgtattgatgaccatattaattaaaataggctgaagaaaatgagggacaaatattaagaatcagtttagtaaaaaggttaaaagactcgtgtaaagctcgaaacgattttccagctggttctcaaatatctgttacaacataaggccactttcttctcctcgtcaattaatagactcgtgtaaagctcgaaaccattaccaccaatgggtaaatccactgtagagaatttgctccacaacaaagcaacttcatcagtatctacgtactttcttggttacatatatctccatcttcgattcatcaatccgatgtaacagtgagagtttttcttctctatcaactgatagagccatataatcacggttcagaaatggcggaagacaaaaatgtttaagcagtaaaatgttcatataaatctctcggttgtaaaatcaaaactgtgtaagcagtaccttttaagccaataagcatttccgatcccttcaaagacaaaccattagcagatgatggaaagcagtcggagggaggacatcaagaaacctccatgaatcagagctaagctcatagatttcataccccaaaacttggttgtctggcatcatcattttgtaccgtttctcccaaagtaagaaacggtacaatcttctcttatatagatttcataccccaaaaccctaaattcattagggttttcaaaaaaaaaaatcacgtttacctctaaaccaatcttctcttatatagataaatcataacgtttgtttgatttttcagttttctacttaaccaatattaaactaaagtcgaattgagatgagtggtagcaaaccacagtttaattaagaagttaattataggccacatgattgagcaagcctttttgttttgtaacacatcttatcagctgcttaaaattttggctgcctcccattggccaactggtctaaacatcattgcattggcattctcataatcaatcaatctaatgagaaactttgaatatttatgaaaaactgaataacaacataacataaacgaacaatgtaaaaaagaaaaacacaaaaaaaaaaacactttaaaaaacaaaaaccaaaaactcttaaactataaactcatgaacacttagtgatgaggtctgaaagggtgtaaccaccacctgttgtcaataggtgacaacttcttcttgggaacattcgggaaagtgaaggcttaggtgacggttgtcttaaaagtctcttttagttaattcatcgtattttcgatgggcattacgtttgatgcataaaggcccatatgggctatacatgtactgcgtttgagtggctttctaaggattgatgtattgtctctatgagagtattcgtttaactcatggagatctactctccacgatattttctgtaaacttttctttttgttgattagataaatagaaaattgtgtagagcgaaacttttaatgaattaaaatgcggaagcgattaaagcatgaatagataaattggacaagagattaaacgagggatcatctagtttttacactgatcactagtcatctgcttgcagaagaagtatatcattaatcaagcaaaacgagggcataaatttcttacaaataacttttacagtaggttaatgattttttaataacttgtccatttcacatgcatgtgtatctttgtactatacatgctaagtgtttcattaatcaagataaacgtgtctacgaataacttaaaacagtacaacttccctaaaaaattcattaaatgaaaggtttttatagattatacattgcacggtacggttcggttaccattcgaagtctaaaaagagaatgacggttctgataatgcttttaatcgcttttgtattgtaaatcattaaaacagtaagccggataccgaattactaatcagacccaaaaaagaatctataggaaaaatatcaactgaagagcgggtaggcttgaccttgaaaggaagaatggtgagcgagcggtggatagatatgtaataaattgtaacgctttcaaaatgtcaaagtcacaagtcacattactcacgagccaacactaaccatgcaacttttgttttgacattttcctaaactttaggtataaaatacccgcgtaataaataacctcttcataattgggtccacccactcacaggtccacacataaggaaccgaaaaaggtaaaattcaaaaacttacaaagttttttagagatgatgtggtgaagtattgcattaatggaataatgggaaaagaaagtaattgcaacgtacgtatagattaatccattgacacaaatgaaaagtttctttctatttaatgtacacaacaaaggttctcttcagagtaatttaggggaaaaaatg

SEQ ID NO: 14006 - DNA, 3000 bp, Unknown
  misc_feature (1)..( 3000): cDNA_ID_2710808_gDNA_ID_2214692_Annot_ID_136730 3000 nt of promoter + ATG
caacatgcaatgctttgttttactttatttggttaggtgaagaaagacaaaagcaacattgcctttttcattaccaaaactttcaatataagacatccacaaatccgcaggaatagacaaaataaagtgtaccaatatcaataatttttttggttggaaaataattatgtatgtttaactgatttgaatatactaacaatataatcattttgtcagaaagaggttttagattttgattaagaaatatgaaaaagaaagccaaaatatgctaaagatttatgttctagacagaatgtgaaacaaattagaaagtgatatcaaataaactaataaagcatagaaagcaaaaaaaaaagaaaggatttaaaggagaacaccaatagtctttcccagtctctaacagtctaactttctgctatctttatgctgttcgtagccataaagtaatacaattatgacctgaatgaagagattaaatgagtattcttaatattaacgacataagattttaaaatgctcttcaagaaattccatatagtaggtttaaatggtaaccattaggttatgtccaacggaaaggcaaaacgctattttaacgtggcaatgttaattttttgtctccaaccaaatggtatttttggtgtgtgactgtaacaactgcataattaaaaaacttattcttttttccttttcattttattatatatttaaaaaaattatctaattatagtagataaaatataatttgtattgttatttaataatctaattaagttttgtaactaaaaaacaatgtatcaaaattatttttgtattttttagttttaaatatctgaattataattagaaaaaatattaaaataagtacgaaattgattaacaatacataaattttttaattaatcattaaaaacatagaacttttaactcgacataaacaaattaaagatcaagaagctcatattaaactttgaaatattaattgactatttctggtcggcatagactaatagtatgatgtaatttatttgtacaattttgatttttgatttttatttatattaattaataagtaaaaaaggataatttttaatttagtaatataatgatagaggatattatatttagtgtgatttttggtgttgtggttagagaagggaaaaaaattaatgctaaatttacaccaaataaagtgttatttcaacactaaaatagtgttagggtgatgcccttatcaaagaggtaccactttgaatagttttgacagttatcaaccacaaaagttttatcaaatacggtacaaatttttttactcttacctttttttgtacaattttctcttacaaatcttttatacaattttgtactattctgaaaaagcttacaactccagttaaccgcttaaatttctggacaattttgtgttatgaatcgaacctagtattcattgctcataagtatcgaaagtaaattaaattgtagatcaactagcaaaacatactgtattaagggaaaaaactttcgattttgttgaagttatataacatagattgtgcaaaatacaattaatcaaagccatcaattttgagattccttagaagtgagattccctatcatattttgatcttatttttctactgttcaaaaaattaggtcttatttcatatctttaaaaaactttataccagtcctgatttaaaagtataaatgagaaaaaattgtataaaaaagattatctaacacggatttatttattatattattatgtaatggctagatgctagatcgaatcgcgttagttatgactcctttacatattttcgatggctgtagcatgatgtcaatcttagcctatctagtagttatgtgatgcgtcacatatgttaaaagtatgtatgtcagacatgatcaaggtctaaaggtggaaattgctctatcatatgtggtagaagaaaggaattaaaatagtttgatgaatcatttgacatacgagtaaaacatttttaagaatttaagaacttgttaactatgatatttttcaataaaaattaacttaatacaaatagtttatatattaaaagagagtcattgttgttatgtggcaagtccataattttgttcatcaacatctttttttcatttttggattcattatatacttctttttaccaaagacatttattcaaatatttagtcttatatataaatatttattctctattcctatcaaaaaataaaaatatttattctgtattaagtgcattgagtatttcaattgaaaaaaaaaatatttctttcctaaattatataattgtatacatatttttcctataaatagaggtatcatttaacacacacatcatttttccctagattgttttttttttaaataactattttattaatttcgatatgcaatcaaatttctaagaatccaaagttacgaaatttagttacatattcgaatacaaaaactactaaaaatgtatgtatcaaaacatccattttcttatagtttccaaatattgatattgcttaagtcaaagacaatcacagtttctcaatcaaagccacaattcactgctttcaaccttttttaaaaaactatctcacgcgctttaattcgcactctcctctctctttcttcttcctctgtcctaaaaaccataaatgacaataaataaagagtttagtcattttatcgtaaaaccaaaagaaagagaaaaagattaatcatcatcaatctaaagatttaggaatctacaatttcccagtagacagatttcacttttgcgtcttcttcttattccatttgatctaagtttctcgaaataggtacaaagttcgagtctttttcttgtaaccgcgtgaaaccaccaagaaacctatagtaagagtttccgcaaatgtgaattaaagacagctcatcactctgtcaaacttctacagtattaagttaacgaagcaggtacagccaaactaaaataacgcggagttatg

SEQ ID NO: 14007 - DNA, 3000 bp, Unknown
  misc_feature (1)..( 3000): cDNA_ID_2705834_gDNA_ID_2214692_Annot_ID_136732 3000 nt of promoter + ATG
gatatcataagttctaatgagtaatgattggtcaatttatcttgttgtaaattgttcaatatacgtgacgtggtccacttctatcctccaagactccagctacacaaagacacagtaacacaaacgcatacgcatatgcatgtgtcgtgtctttgtgtgtgtatgttgtatatattaatatattatctaaactataccattttcatgaaatttataatatattttctcaaatgatttaagaagataatgatatgtttacgagagtaaaaaaattaatgatcttccagtaatcaataaatatagtaaattgatatcagatcttgttgccaactatagaattgaacaaaatacaaaactgtcatcgccatgttatattatcgtaaagccagcttatatatccttccccattggtgttttttatttttactttgtttggtgaatattaaagcgcttaaaacacgttccaacagaataattgtttgacctttttagtttatctgatttttaatatcaattcttaaaaacatctcctcaatctttgcgtaatttgtcttttcctaatgcatcggatagagatagattcttctgagttcttgcatggttcaggtactttctattcgtttcttaatacgtgttctttcttttcggatgaaacataattcatcgatcgatcgatatgtataagtctgataaaaacttgatcgttgcttttgatcattactagtaaaacatctcaataaatcacataacatgtttcacgttttgaatcggtttttcagccttgttgtttcagatttgattgatacgaattttaatcattattattgcaaaaattcatatttaaatttgagatgtttttataatatacatgcttaagattcataccaataattaagttcaataatctagatatggtttagaaactttagatatatagagatgctgatgacatgatgaaggtgatgatcgattgatcgtttattcatttgtcatatatatgagttgtaggaaaaacatcttatgaatttagatccattaaatacgcttatatgcatgtgtgcatgttcaatgtgtagataagttctattctgaataaattgacgaataacaattattgatttcaatttcgttttgagtgtgcatgtcatgtgtctgagatatgggaaaatgaaaaggaaacttccctatatataccgaaacaatagactatcaactttgatctatatatacaaattgtagaaaagccttggatctaactgatatttccttatgtgagatacacattaatgtcttttgttttgcttcttaagattaacgtgttatatattatctctttattttaaaacatgttgaccaaaataatttatgtcttacgtgttgcatatgaaatagatccaatcgaatcagcctcccatatcttgaatctttgatatttggggtctaccattgatatgatttactttgttaattacttgatgttaatatttcattttttcttaagaaattgtaaactaattctttacatatatgcatggcaattaacttagtcaacaggttcaacattttataatgtatccagaatcccagatagtacctgtcctgataaaaccttttcaggatctcatgatatttcttaaaatataacagcttagtgattttaaataacataaaaattagccgacaaaaagaaaatatcataatataattctgaaaataactaataatttactcttttcaagtaattattcaaaataaatttagaaaactaattcaatgtatttcctcattgtcactcttttatttccctctacaaaattatatatatgaagtagttttttttaaaatagagccccataactaacattaggggtccatatatttgcattgtaatttataaacacgtgtagaacattataattatttaaaataaaatttagaacaataacttaatgtatttcctcctcgttagttttcctttttttccctctacaaaattacatatatggaatagttgttctttacttcttttaagtagagccccttaactaacacattaggggtccatatatttgcattataatttataaacacgtgtagaacctggcactgaagtctgatgaatatatatccatttgttttcacaactaccctagctttttgtatcatcggttactttttttttatcacaagaaatttctcgattttgattttgatttttcaatgttgtgaagttgagaagttcaacatgttttggacagatgtttttgaacagtaaattagtattttaaacatgtgaatctatttgcaaacgtaatgacgtgtcgtctgaccatttcttgaatgttagttaattttttagctctagttttgattaatctaccaattaggtcattcatttcagtttaagtcaaatcaacaattaggctcgtcctaacgttttcatttagccaaaacaaaaaaaaagatttcaacagtataaataattcgtccttatcaaaaaattaataaataaaaaagatatacatcattacttacgtaattgtttgtattttgatagttttcgataatttctatgtgacggtttttaaaataaaaataaatgttgaataacaaaaaatagtagtacaatagaatactgaattggtttgtgtagggtcaaaccaacaaatatggaaagaaaagtattatttagttacaacgtgaaaacacaggttcgtgctactactccaatgatacgggtctcaaaatactcaaaactctggcatgtctcaattccacaaattattgtttaatcattctgcttcttctgtaagtttatatataaatgtgtatatactcaacgtaaatatttgcttacctcgtatattttctctcttctcaggcttattaattctctgcagataactgcagaagaaagaagaaagaagaagaagaagagattagagcttgagccataatatataatcccttgatcattagtctaaagaaccacataaaaag

SEQ ID NO: 14008 - DNA, 3000 bp, Unknown
  misc_feature (1)..( 3000): cDNA_ID_2710800_gDNA_ID_2214692_Annot_ID_136733 3000 nt of promoter + ATG
tggaaggtccagctttcaaactaacatcactgcccctcgacgaaaactttttaatgaaaacagagacaacaacacctagaagcactaaaggggccaataactttactggtgaccattgtccaaacaaatatgtatatttctgcttatgttgctcttgtaactttcttgactctctggcttttccaaaaggcatgatgctgttttcgctctcgaagtgatttagggaaggggagggtagcattttcacattcattggctgatcatggagcaccctgataacaatttctgggccacgaacgtcaatttgtgatccacataacaatggcatataaattccagtttgaagtttaggaccgaggtcatagccagaattgaaaacaggatcacatagtaaagcagctctgaagtgagaaaccgtcaaattccagacaagcttcccagtggttttactaaaatgctcaagtttggaatctgttcgcctgataagaagaggttcattcacaaaatcttcagtgctagcgggcttcacgagagcattagtaatcttagtatctccagttgatttgtaaacatgaatcagcctccctgatctaccatcaaccaaataggcactagttgtttctgatccaagagtcacaccatcatctgttacaagtggcttctgcctaaaaaactcctgaactgtctgcagtgaatatgtgccgaaacaaagttaagataaacaaagtccagtaataatgaagtaaagagagagatgcttcatacccaattatgatagccatcgacagtagtagccgcctttgagttgttcagatattcaacaattatgtgaggacgagttatctcagtagcattttctgtgttgttattagcaggagcctgatataacgagtgcattggtgatcctgttgaaaaggaccagtatggtgtttctttcggttgctgctttaaaaacaccttcccatcacgatcaacaacaagtttcgtatttggctctgttggtggttcactgagtagaagacagataacatcacaaccagtaaccacatagagaagaatcaaaaacatctatcaaaatgtaatcaaaccaattcttgccaccaccaaaacctaatcactagtccatcacgtttacaatgctaatgatacctaaaacagtgtcaccagaatcaaatactaactaagtatttttaaacatgcagaggatggaagaaactcaccgacgaatctgcaaaattgatctgcggccgggactagatggaacgatcggatacgtcacatcgtcggcagcgccgccgcaaggagacatgatccatggtgagagtaatagtagtaagaagaaaagatggcggaggaaaggacatctcggcggcatggtccggatcaattatggagaatccgaacagagatagagatgatgatgatgatcagctgtgaaaaaacagaggaggacgagtcaatcatcgaatttaagaattgggagataaaagataagagaaagggttttcgaatttacctaagagtgaagtcaacgatggatcggagataagatgcgaagctttagtctgaggctgcggtttagggatctccgtctctgtccggcgagtttctcctcccttgcccccacccttagtgtgtctaacgcgttctccttttgaatcttcttaacaaaaaaatattttaatggaaaaaaatacaaaagttttttttttttttttaaacccccacgaacgaaccaaacactgttttgcttcgagtaaggtttgtctgaggctgcggtttaaggatcttcgtgtgccccaccgtactgtccagctaacttattcggccgagccgagccaatatgcgttaagctttttggtcttctaaacaccttttgctatcaacaaattcgagtgaaaatatcactaaaattactaattgtgttaaaaaaaacaaattttcatattgttaaaggtaaataaatcacattttcttttgttaaaggtaaaacaatcacatatacattagacatagtggcaaaaattgtgacgattatttttggtttaatcgtacttcttatcatataattttgtgtttatttcagtgtttaagaaaatgttaggcgcttagctggcggtgaccctccgcttagcgcatagaacgcttagtcgaggcctagacaattttagccggtttaatcggttttagaataaaacgatatatatttatatactattatctgaactgttgcaaaaactattataaaaaacggaaattatcaaatttttaaaaataaatttaaaatttaacattttagtaaaataaaataaaataataaaaagtataggtgtccttaaaattatttaaaatatatttttgaaatttttaaaaaatattaagagacgattagatccgcctagcctaacccacctaatgagagtctaatccgcttaatgtttacatagtctgccaaatctatctcactgattaatagaaccgattttgaaaaagtcaaaacggtataaaagcgtttagtgcctaggcgtcctagacgacgcctatcccactttattgaacactgatttatttactagaaattgtatcggtataattggagatgcatcattaaaaaaatttctatgagatcaaggtaaatgatcttaggtatgcaatattatcttgcaaaaattggttagttttggttaaaataaaaagagtgtttttgacctttttccatcaagagtaataccgagtttactagctgtattgctgtgtttacttcggtttaatcagattgagccggttagagaaaaagtaactaaaccggttttaaccgtcatcgtttcgttaaccatgaacgaataaggagctatagaattgaaaattttagtagtcaagttggctggcttaggtttaaatttaaaggctttaaaaagcttcttcctctcttccgttctgacgactgaaatcttcttcaccggcgaaatcgaaaagttttccagcaagaaattgaagatg

SEQ ID NO: 14009 - DNA, 3000 bp, Unknown
  misc_feature (1)..( 3000): cDNA_ID_2710796_gDNA_ID_2214692_Annot_ID_136734 3000 nt of promoter + ATG
cctttaaatttaaacctaagccagccaacttgactactaaaattttcaattctatagctccttattcgttcatggttaacgaaacgatgacggttaaaaccggtttagttactttttctctaaccggctcaatctgattaaaccgaagtaaacacagcaatacagctagtaaactcggtattactcttgatggaaaaaggtcaaaaacactctttttattttaaccaaaactaaccaatttttgcaagataatattgcatacctaagatcatttaccttgatctcatagaaatttttttaatgatgcatctccaattataccgatacaatttctagtaaataaatcagtgttcaataaagtgggataggcgtcgtctaggacgcctaggcactaaacgcttttataccgttttgactttttcaaaatcggttctattaatcagtgagatagatttggcagactatgtaaacattaagcggattagactctcattaggtgggttaggctaggcggatctaatcgtctcttaatattttttaaaaatttcaaaaatatattttaaataattttaaggacacctatactttttattattttattttattttactaaaatgttaaattttaaatttatttttaaaaatttgataatttccgttttttataatagtttttgcaacagttcagataatagtatataaatatatatcgttttattctaaaaccgattaaaccggctaaaattgtctaggcctcgactaagcgttctatgcgctaagcggagggtcaccgccagctaagcgcctaacattttcttaaacactgaaataaacacaaaattatatgataagaagtacgattaaaccaaaaataatcgtcacaatttttgccactatgtctaatgtatatgtgattgttttacctttaacaaaagaaaatgtgatttatttacctttaacaatatgaaaatttgttttttttaacacaattagtaattttagtgatattttcactcgaatttgttgatagcaaaaggtgtttagaagaccaaaaagcttaacgcatattggctcggctcggccgaataagttagctggacagtacggtggggcacacgaagatccttaaaccgcagcctcagacaaaccttactcgaagcaaaacagtgtttggttcgttcgtgggggtttaaaaaaaaaaaaaaaacttttgtatttttttccattaaaatatttttttgttaagaagattcaaaaggagaacgcgttagacacactaagggtgggggcaagggaggagaaactcgccggacagagacggagatccctaaaccgcagcctcagactaaagcttcgcatcttatctccgatccatcgttgacttcactcttaggtaaattcgaaaaccctttctcttatcttttatctcccaattcttaaattcgatgattgactcgtcctcctctgttttttcacagctgatcatcatcatcatctctatctctgttcggattctccataattgatccggaccatgccgccgagatgtcctttcctccgccatcttttcttcttactactattactctcaccatggatcatgtctccttgcggcggcgctgccgacgatgtgacgtatccgatcgttccatctagtcccggccgcagatcaattttgcagattcgtcggtgagtttcttccatcctctgcatgtttaaaaatacttagttagtatttgattctggtgacactgttttaggtatcattagcattgtaaacgtgatggactagtgattaggttttggtggtggcaagaattggtttgattacattttgatagatgtttttgattcttctctatgtggttactggttgtgatgttatctgtcttctactcagtgaaccaccaacagagccaaatacgaaacttgttgttgatcgtgatgggaaggtgtttttaaagcagcaaccgaaagaaacaccatactggtccttttcaacaggatcaccaatgcactcgttatatcaggctcctgctaataacaacacagaaaatgctactgagataactcgtcctcacataattgttgaatatctgaacaactcaaaggcggctactactgtcgatggctatcataattgggtatgaagcatctctctctttacttcattattactggactttgtttatcttaactttgtttcggcacatattcactgcagacagttcaggagttttttaggcagaagccacttgtaacagatgatggtgtgactcttggatcagaaacaactagtgcctatttggttgatggtagatcagggaggctgattcatgtttacaaatcaactggagatactaagattactaatgctctcgtgaagcccgctagcactgaagattttgtgaatgaacctcttcttatcaggcgaacagattccaaacttgagcattttagtaaaaccactgggaagcttgtctggaatttgacggtttctcacttcagagctgctttactatgtgatcctgttttcaattctggctatgacctcggtcctaaacttcaaactggaatttatatgccattgttatgtggatcacaaattgacgttcgtggcccagaaattgttatcagggtgctccatgatcagccaatgaatgtgaaaatgctaccctccccttccctaaatcacttcgagagcgaaaacagcatcatgccttttggaaaagccagagagtcaagaaagttacaagagcaacataagcagaaatatacatatttgtttggacaatggtcaccagtaaagttattggcccctttagtgcttctaggtgttgttgtctctgttttcattaaaaagttttcgtcgaggggcagtgatgttagtttgaaagctggaccttccaaaaagaagaagaaccgtaaatccgcgaaggatacaaataggcagtcagttcctcgtggccaggatcagttcgagctcattgaaggaggtcaa

SEQ ID NO: 14010 - DNA, 3000 bp, Unknown
  misc_feature (1)..( 3000): cDNA_ID_2710792_gDNA_ID_2214692_Annot_ID_136735 3000 nt of promoter + ATG
tcatcgcccattaaaaaaaatagatattaagaatttgagttttataaaaaaataaaaattcaatgcattggatattactaaaaggaaactatagttggagtcttcttattacgattttaattatatatagttggccatttttcttcgaatctaaattacggacccatgaggaaaatgaccgttgtctccgaacgggcttcgtgggcttattgtttgtaaactcacggcccattgacgtcttcttatttgattcaagaccagaaaccacgttttgtactgtagtcttgaattgctctgttctgctgatagaatagcaaagttctgttctgctgataaattagcaaagtaaatcttgaatgctagtttgtctttttctctcatgttatgtgtaagaagatgatgatgactctgttaggtaagaaagtccaactttgtaatctaatcagatttagtctctaattgtttacttgtgtctacatataaaagttgcaagttgcagatgttaagaactaagaagtggtatctgcagattttgggtattaaggaaagtttccccctttgaataaataaggacatatactaatgtaaaggttcctcctttttcacaaatcaaaatgtgtttctttgtgttctagtgaaatccaatccattgtgtctctgatgctgagaatcttgaagctttcgacatcttctcgatctgtgccattgacaagattatggcttcttcaactgccttgtttctgctcatcttcttcatcatcgtcttctttgctttctgtgcccagcgatgatcatatcgtccgtctcattctagaccagaaatcagcttctggagctttggaaacttttcgatgggcttcgacttttcctgggtttatccattctcgttccacttaccgtgctctgtttcataaactttgtgttttccgacgttttgatactgtctaccaactgctcgacgaaatgcctgactcaattggtttgcctccggatgatgctatttttgtaactatcattagagggtttgggcgtgctcggttgatcaaacgtgtgattagtgttgttgatctagtttcgaaatttgggatcaaaccatctctgaaagttttcaattcgattctggatgttttggttaaagaagacattgacatagctagagagttttttacaaggaagatgatggctagtgggattcatggtgatgtgtatacatatgggattttgatgaaagggctttctttaacgaataggattggtgatggttttaagcttcttcagatcatgaagacaagtggtgtggctccaaacgctgtggtttataacactttgcttcatgctctttgtaagaatgggaaagtcgggagagctaggagtttaatgagtgaaatgaaggaaccaaatgatgtaactttcaacattttgatttctgcgtactgcaatgagcagaagttgattcagtcaatggtgttgttggagaaatgttttagtttgggttttgttccggatgttgtgacggtaactaaggtgatggaggttctctgcaatgaaggccgtgtgtctgaggcactcgaggttttggagagagtggaaagcaaaggaggtaaagtcgatgttgtagcttgtaacactttggttaaagggtattgtgcgctagggaaaatgagagttgctcaacggttctttatagagatggagagaaaaggttacttgcctaatgtggaaacatacaacttgttgatagctgggtattgtgatgttggaatgttggattcagctcttgacactttcaatgatatgaaaacagatgcgattagatggaactttgctacatttaacacgttgatcagagggctttcaataggggggaggacagacgatggtttaaagatattagaaatgatgcaggacagcgataccgttcatggggccagaatcgacccttacaattgtgttatttatggcttttacaaggaaaaccgttgggaggacgccctggaattcctcttaaagatggagaaactttttccgagggcagttgacaggagcttcaagttgataagtttatgcgagaaaggcggtatggatgatttaaagacggcctatgatcagatgattggagaaggaggagttcctagcattatagtatcccattgcttgattcatagatacagccaacatggcaaaatagaagaatcacttgagcttattaacgacatggtgaccagaggctatttgcctcgatcatcaacattcaatgctgtgattatcgggttctgtaagcaagacaaagtcatgaatggtattaagttcgtggaagacatggctgaaagaggttgcgttcctgatacagagagctacaatccattgctcgaagagttgtgcgtgaagggtgatattcagaaggcttggttgcttttctcacgaatggtggagaagagtattgtccctgatccttctatgtggagttcactgatgttttgtctcagccagaaaaccgcaatccacgtaaactcctcattgcaggacataatccaaagttaaaagctagaggcagtgacataaatgatcattgagctcgaacttgaggcctttaataatgcatctgcaacaaatacgaagatggctccaaactagcaagcagagagatcaagatggtacgtttgcttcttttgaaaatctgttaaaagctttgggagaaaaggagaatgcctaaaatcagaagaggcagattttaaacaagaccatgagagaagggcaaaatggagaattggacatcgtcaaaatgggaaaatgtttgaagcacacccatcaataaaaaaaggacaagaggagcaaaaagaggagagagtcttacgtttcgtgctattcctctctctctcttttatctctctttctcgagaaaactaaagaaaagggggctcttttattcaaagatccaaactttgacaattcaaaatccaacatagaacacggatcaagctttcaaattcagacagagat

SEQ ID NO: 14011 - DNA, 3000 bp, Unknown
  misc_feature (1)..( 3000): cDNA_ID_3021353_gDNA_ID_2214692_Annot_ID_189423 3000 nt of promoter + ATG
agaagaagaagaagatcgttagagaattgtttgactcggactgagtttggggaaaacggtaggagcgagtttttacctttaggttttttttttttgtttgacgagagagcgtatgagtgagtaataggattttttttttgggggggctttagatgcgatattataataataaaataatatctatttttaaaataaaggcgacttgaaattttgcactgtggcgggattttttcgtgaaggagcgaaataatttgacacgtatgggaaagaagagcaacggacggaataatggattgtgctcttcaaatcctgaccgtccatttgacacgtgtacctgagcttgcagatctcgcccttaattacattcataaagttcttcaccaattgacgcatttgctttctaataaaccccaaatattgtttgaccagaagagagaaagataggaaaactcgaaccgggtttgaccagatcaattagatttaaccggtaccggttatttacattttttttcccctgtaaaatattcccctcccctcttttctctcatcgctcgctgcctttctctttcacagtcagcgctcttgaacggagaatctcagtcgcgccgtcaactttttgttgagaagagatatcatctgttttcgatccaaagaatagaaagcttggattccgaaatctccctttttgcttccccaattcgttttcctttacaagctcggcgcttgatctcgctatctctcaggtaggatcgagctatatacaacagtttctcaattttactagatataattgctttagattttcaagtgctcttgcgtttctggggttttgttaagattggagtttttgtttcttattctcgaaatctgttgattgattcgtttgatccatcaatgtttgtttagaaattcaaaaagcatgcaaatttgcagattctttgtttgccttgtgcgaattctatttccgtattccgtatcgaaactaaaaccctgactaggttatgtttcaagtgtgttttttagttttctatttgagggatattttaactaactccataagtttggggttttgtgaacagccaaaagtcttttctttcgtgacatcagtttcttggtaaaggaattcgatttcttcacctaatagagaatttattttagaactttggactgatatgttgaacattgatgctgatttggcagaaatggatcgtttgatatgatacgtatctacatttgtagaactgattttttcacctagaatttgcagcaagtaagactagaatgaataaaggggaagcttgtattatttgttgttaaatgagttgttcaaagagctttgtttgatatcattgttgcttctttgttacatgtggatagtttaggatgctacttgttaagtagtaagtactgttaaggtgtgtagaacttatatttcactgtgaaacgttggagtaggttgccgtttgtgccgttagtatatcttgttttcgccttttactgacaagacttatgaatgttttgctttcccgtagagagctgagagctgaggatattggaaatttggaaggtggaatctcaaatggctgaacttcctggtcaaataagacatataggcggtcgaatgagtcaactgctagagcagatatatgggttttcgagaagatctttgtttcgggtcatatctatgggtcctataccttgtcatattgcctttatcatggatggaaatcggagatatgcaaagaagtgtggtcttttagatgggtctggtcacaaagcggggttttctgcgcttatgtcgatgctgcaatactgctacgagctgggtatcaagtatgtaacgatatacgcatttagcatagataattttagaagaaaacctgaggaggttgagtctgtaatggatttgatgctggaaaagataaagtctttgcttgaaaaagagagtattgtgcatcagtatgggattcgggtctattttatcggtaacttagcgcttctaaatgaccaagtgagagctgctgcagaaaaagtcatgaaagccacagctaagaatagtcgggtagtgcttctcatttgcattgcctataactcgacagatgagatcgtacaagctgtcaagaaatcttgtattaacaagtcagacaatattgaagcatctaattataaacacgaggatagcgatagtgatatagaaggaacagatatggagaaccaagagaagaagatacagttggtggatattgaggagaatatgcagatgagcgtggcgccgaatcctgatatactcatcaggagttcaggagagacgaggctgagcaattttctcttatggcaaacaggtaatacccagctctgctctccggctgctctgtggcctgagattggtttgaggcatctgctctgggctatattgaacttccaaagaaatcattcatacttggaaaagaggaagaaacaattatgattgtcttgaaaggagactagtgaaggatatacaaaagctctcttctctatttggctttgtaatgtgatgtgatgctcttgtggtatactatcaaaaggaaacttgggattacatagaacaagcaatgtattttacacacgaactcatttgagtttttctttatgaatccttaaccaaaactccaaaagtcctctctaaagacatcttacttcctgttctgtcttgtaagatccagaatcttaacatttgtgtttcacgagtgtttttttctcaaaccaaaattaaaccaataaatttagttcgttaatggttcagattgattgcatatatcatggaatttcggtttagcgatattaaaacaaggaaaaccgggattggtatccaaaaccgtaccgggcgtcaagtctggttcggtaggttagagtacacgcttgtggcgaacttgcaattggaaacctaaaaagtcgcgactatgctctctgcaaagatggttctacttttggcttaaagagcaatgttttcgagtctttgcc

SEQ ID NO: 14012 - DNA, 3000 bp, Unknown
  misc_feature (1)..( 3000): cDNA_ID_3021375_gDNA_ID_2214692_Annot_ID_189416 3000 nt of promoter + ATG
taaagattagatattaagaattgagtttagtaaaaaaaaaaacaatgcattgaatatactaacggaaattatagttggagtcttcttattacgatttcagttatattggccacggtgacgaacaatctaacgccataagaaaatgtattgaacaagaatgatcaaacatattttgagtttttgtttaacgaaaactatgcattaagacttttatatttttcattaaactaaacatatttcgttgttaaatcgaacgtaaaaaagtttacgggaaaacatccatcgtttctggtgcatgcaaatttctttgctctctagaggttaattctcattttggaaatccattttgatcccgtagacatctaatttctccatcaagtcatgtttggcgtaaacgtgtatgattttgtcttgttttcttcaaagcttatcactttggttgcttcatatctaacatttctcgtatatgctatagactcgcatccatttttgtataaccttttttatcttgattttaaaaatttcttttccgacctctataatttataactataaataaaaaactgtctaaattggattattaatcgactgaccaacgttaaaacttaaccaactaactgagagggcataatggatatcttatttgacaaaattatgacgcctcaattacccccttatagtggcgtcatgatgggaaccaaacgattaaccccctcaacatttgtgtttctcatattacaacgatgcaaaagttgatcgcgaaattatggctgcatttaaatttttaaatattgtttagtgttttctaggaagagtaataatagtaaatataagaattttagaatttcttctaaagtgaggatcgagtggacttgaactcttattcacgatactcctccaaaaaaaactgttgttgtaaatgtaactcaatatgcagtttatacaacaaattttttacttcgagtcatgccaaatttagaacatcacatacattcaaccaaactaacattaaatttatgtgttgatgttttagtgccactaatatgatttgttcaatagttggtacaagaacattaaatgtttgtaagagagataaaaaaatggacatttttatagtatttttgcagcaaattttcggcgggttggtaaaagtgattttgtatataataggtatcagacccgtttagaatttttggtcattcaaaaatcattggatcggattatatataatccaacttttccaccggatatatatttaaaagtcacatacaaatattactaaaattggattgtatctactaattacatttatatatttaataaaacaaaaattagaaaatttggttttgatttaaatttatgattctcctttcatcttttttaaactgttttaaatcatcatataatacataaagtgaaaaaaatctcaattttttcttatgcatatattgtgatttcgaaattttttaaaacggacatgtattacttaattaatgaaaagtgtgttttcaacgtcccacatctgctataaagtttagacaatgatttagattcatattatacataaaattaaaatgaatccaacttcgaatgagtataaaccttaacataacaagcatccaaatttaaaaattgatgtacgaattaaatcattggtaaatatgcttcacattatatttatatgatctgctgaacttatgttggacttttgaattgagtagagtaaagggaatcatgacctcttatttttcgtcattcaagaaaaaagtcagaaagaactagagaagggctgctaaagaagaggaaagaagaagagttgaggaagagaaactcatccctagtctgacagaagaacaatttgcaaagaacatggacttgatgaggaaaaaagttgaccgctttcactgactacatggtggtaaagaaggtggaaaaaaagaagcgaaagatgctaggggcattcagaaagataaagcttgatattggcaactaagaaataagtataagaatgttcagagattcgagaaatttgacgaagaggaagagtaattctgaaattctatctgattactttctatttagtctcttgtacacttgtaggacgaatcttattttgtgttctaaaaccattatgaccaatggtagtgtgataccatttaaatagtgaggaagaaaggctggaaaaacaattaagtaacaataaatagattttgcgactattgaaataaactggtttgcaggtgatcgaggtttgattggaattcaatagatcaatatccgatgaaataagattgatttgctttctctctctaaaagatttaagagagaagatagaaaaaatcatcgcccattaaaaaaaatagatattaagaatttgagttttataaaaaaataaaaattcaatgcattggatattactaaaaggaaactatagttggagtcttcttattacgattttaattatatatagttggccatttttcttcgaatctaaattacggacccatgaggaaaatgaccgttgtctccgaacgggcttcgtgggcttattgtttgtaaactcacggcccattgacgtcttcttatttgattcaagaccagaaaccacgttttgtactgtagtcttgaattgctctgttctgctgatagaatagcaaagttctgttctgctgataaattagcaaagtaaatcttgaatgctagtttgtctttttctctcatgttatgtgtaagaagatgatgatgactctgttaggtaagaaagtccaactttgtaatctaatcagatttagtctctaattgtttacttgtgtctacatataaaagttgcaagttgcagatgttaagaactaagaagtggtatctgcagattttgggtattaaggaaagtttccccctttgaataaataaggacatatactaatgtaaaggttcctcctttttcacaaatcaaaatgtgtttctttgtgttctagtgaaatccaatccattgtgtctctg

SEQ ID NO: 14013 - DNA, 3000 bp, Unknown
  misc_feature (1)..( 3000): cDNA_ID_3021379_gDNA_ID_2214692_Annot_ID_189415 3000 nt of promoter + ATG
atgctgcaggcaggaaaaaaaacaaaattggagataaaagttgtttgatggcagtatcaagttacccaaagctgagactgaaaaacaaatgtgtttatctccattacctcttggtatataagtttcctcttcgaaggtctagaatcatctgcatcttccatagttatgtcttcattggttggttgggcaagcagatccagcaattcaggttgtccaagtgatttaacataagcctcaactgatacagaaacattcattgataaacttcaacatcatgtagcaagacacacaaacagtcatgcaaaaccaagcttcgacaacttctatgaaaaatatagatgattcacatacttgtctccgcagatattccctcttcagtggccttccgtttattttccctatcattagttacaagcaacacctgagatgtatcccctagatgcttctggtaccatagagtagcgacgcgaatagctgaattccagataaatttaaaattttaataacagatgcttaccaagagaagtatgtaagttcatcatcaagaaagtaacatgatgttaacaaacaaagaaggtgattgaatagtaaataaaacctctatcgttgtggtcatttgcactctctttctccatggcttgcacataagtatccctgtgaagagtttagtaaacgcgagaaaacaacgataaggacacggagaaaagcgtttctatagcttagtaggttccagtaaggagagcatctaatcaatataaccgaacagaaattccaaaatcattgaattctttatgttcttttgtccacctaaaatctggttaatctaaaagctaaaagttcgaacaaggtcttcttacttgtggacatgattggagaaaacatagaattgtctcgctggattgctgcagagaagtctgattctattgtaaaccgatctattcctgttcttaacttcgtccaacaccacagacagaacaacaacagtgtctatagccttattttccaacaaatcaatctaccagaaacaaacaaaatattacattagtaatacccacaagctcaaaacttttagcttatgtaatcaaattaaagaaaaattacttggtgaagaacgacgttggtatcaacaacgattatcttagaggaagacaaacgagcagctgaagaatcacaagacttgcaagagaaagctccacagtatatgtcatctcgtagataaacctctcttacttgctgtcgcagacaaagagttaaaagttacaataacgaacaaaaaaactcggaaggaagaagaagaagaagcatagagagattgaagagaaaccttttggattcttcctcctctggttttcttattgaaaactttgctctgcaacatcttcaatttcttgctggaaaacttttcgatttcgccggtgaagaagatttcagtcgtcagaacggaagagaggaagaagctttttaaagcctttaaatttaaacctaagccagccaacttgactactaaaattttcaattctatagctccttattcgttcatggttaacgaaacgatgacggttaaaaccggtttagttactttttctctaaccggctcaatctgattaaaccgaagtaaacacagcaatacagctagtaaactcggtattactcttgatggaaaaaggtcaaaaacactctttttattttaaccaaaactaaccaatttttgcaagataatattgcatacctaagatcatttaccttgatctcatagaaatttttttaatgatgcatctccaattataccgatacaatttctagtaaataaatcagtgttcaataaagtgggataggcgtcgtctaggacgcctaggcactaaacgcttttataccgttttgactttttcaaaatcggttctattaatcagtgagatagatttggcagactatgtaaacattaagcggattagactctcattaggtgggttaggctaggcggatctaatcgtctcttaatattttttaaaaatttcaaaaatatattttaaataattttaaggacacctatactttttattattttattttattttactaaaatgttaaattttaaatttatttttaaaaatttgataatttccgttttttataatagtttttgcaacagttcagataatagtatataaatatatatcgttttattctaaaaccgattaaaccggctaaaattgtctaggcctcgactaagcgttctatgcgctaagcggagggtcaccgccagctaagcgcctaacattttcttaaacactgaaataaacacaaaattatatgataagaagtacgattaaaccaaaaataatcgtcacaatttttgccactatgtctaatgtatatgtgattgttttacctttaacaaaagaaaatgtgatttatttacctttaacaatatgaaaatttgttttttttaacacaattagtaattttagtgatattttcactcgaatttgttgatagcaaaaggtgtttagaagaccaaaaagcttaacgcatattggctcggctcggccgaataagttagctggacagtacggtggggcacacgaagatccttaaaccgcagcctcagacaaaccttactcgaagcaaaacagtgtttggttcgttcgtgggggtttaaaaaaaaaaaaaaaacttttgtatttttttccattaaaatatttttttgttaagaagattcaaaaggagaacgcgttagacacactaagggtgggggcaagggaggagaaactcgccggacagagacggagatccctaaaccgcagcctcagactaaagcttcgcatcttatctccgatccatcgttgacttcactcttaggtaaattcgaaaaccctttctcttatcttttatctcccaattcttaaattcgatgattgactcgtcctcctctgttttttcacagctgatcatcatcatcatctctatctctgttcggattctccataattgatccggacc

SEQ ID NO: 14014 - DNA, 3000 bp, Unknown; identical to SEQ ID NO: 14007
  misc_feature (1)..( 3000): cDNA_ID_2705834_gDNA_ID_2214692_Annot_ID_189413 3000 nt of promoter + ATG

SEQ ID NO: 14015 - DNA, 3000 bp, Unknown
  misc_feature (1)..( 3000): cDNA_ID_3021387_gDNA_ID_2214692_Annot_ID_189412 3000 nt of promoter + ATG
atgcacactcaaaacgaaattgaaatcaataattgttattcgtcaatttattcagaatagaacttatctacacattgaacatgcacacatgcatataagcgtatttaatggatctaaattcataagatgtttttcctacaactcatatatatgacaaatgaataaacgatcaatcgatcatcaccttcatcatgtcatcagcatctctatatatctaaagtttctaaaccatatctagattattgaacttaattattggtatgaatcttaagcatgtatattataaaaacatctcaaatttaaatatgaatttttgcaataataatgattaaaattcgtatcaatcaaatctgaaacaacaaggctgaaaaaccgattcaaaacgtgaaacatgttatgtgatttattgagatgttttactagtaatgatcaaaagcaacgatcaagtttttatcagacttatacatatcgatcgatcgatgaattatgtttcatccgaaaagaaagaacacgtattaagaaacgaatagaaagtacctgaaccatgcaagaactcagaagaatctatctctatccgatgcattaggaaaagacaaattacgcaaagattgaggagatgtttttaagaattgatattaaaaatcagataaactaaaaaggtcaaacaattattctgttggaacgtgttttaagcgctttaatattcaccaaacaaagtaaaaataaaaaacaccaatggggaaggatatataagctggctttacgataatataacatggcgatgacagttttgtattttgttcaattctatagttggcaacaagatctgatatcaatttactatatttattgattactggaagatcattaatttttttactctcgtaaacatatcattatcttcttaaatcatttgagaaaatatattataaatttcatgaaaatggtatagtttagataatatattaatatatacaacatacacacacaaagacacgacacatgcatatgcgtatgcgtttgtgttactgtgtctttgtgtagctggagtcttggaggatagaagtggaccacgtcacgtatattgaacaatttacaacaagataaattgaccaatcattactcattagaacttatgatatcgtttggaatcagctaacatatacataattataatggttagatatatatacaaaacaaaggtagattaaagaaaaattcactagcaagttaaaacaaatatgtcgtccacacacaaagattaaagtttttgtctgcctaagcatgaaacttttttttggactatcgaaaactccatatatttaaaaaaaatcaaaagcggattatcatatccgacaaaaagaataagtgttgtgcttttttataagttctactgagcaccgaactatcacaattcatgtgatcctgaaattaagaatacatgtgtctaatttattcacctcctacatagttcatgtgaaccatatccctctcttgcttttttcggtgcaatatatagaaaataaatacaaatacaatgactatataatagttgacatggaaaaacagagaagaagattaaaccgatccagtgtatgaatccaaggcaatgaggtggcgaaaagcgaatgtactatacctgcaaaaatcgtggaacttctcgtcatactttgttgtgttgctaaaaacgtgcggaccagattttgcaggtttttttaatcttatcgaaaatgttacgattctggacgcgaatacggtcttggggagccctcttccaactattgagggttttgtgtttttgtgtttttgaaaactataagttgtttattttcttacccaatattatttttctcaagggccacaacattaataaaataaggtccttattctagtggcttctcaagatttaggtcccaacttttgcaatttctacaagtctcatttgttgcttaatcttacaacttatttaaaatttagctcatcattttaaacatttctttctcctcttttaactaaaacccaaatctttttttttttctcacaagttcatattttattgaggtaagcattacaaacatgggctaaaaaagccctacaacataaccagttacgaaaacaaactaaatcccaactcaaactcaatattgaagaagaagatttgatcagataattcctttcaaagccacatgttatcaacacgtgtatgatgagtaatcaaaagatttccatcgtcatccttcgccgtcgtagcctctgattattccggtgaatgaaattcaacacagtgaattcgtttgtttttcacctgctactgcaaaacagcttaatggataaaatacagatcaattaaactcaaccacttgctagaatcatcaaagaaatttgagatccaacaaaacggtaacagagaataagaaatatgattaatccaaaccaaaactgtttactagaccaatcgaagctaaacagacaagtaacagctaaaggtaattgtaatctgctaaggaaattgctttatatcttcaactaaaattatgaatcccttggataattttcgtaaactgcaatctcaaaggattaattagaaagcagactgttgaataatgcctattttgctttcaaaccatactgaagaagtcaaagagagaacaagtagttacatgtgaaagaagttggtttgaatctagttgcttttgtttacttggaaaactaagctataatctagagtaagcatgcttgtagtgggagcagcctgcaacagtgtaatcgtgtaggtgtcatcgtgtaggtgtcagaagctagtattttgtgttttactttatgttttgctataaggatgtatgtgtgtgtaagaaagaattatgggaaaattctaagaaaaacagagtttatgcatctctctctcaacttctaaatcgttttaattcacaaaacatgagtgaaagtgagaatcacaacatggtatcagagctacgctgattactggaaccaaacgaaatg

SEQ ID NO: 14016 - DNA, 3000 bp, Unknown; identical to SEQ ID NO: 14006
  misc_feature (1)..( 3000): cDNA_ID_3021394_gDNA_ID_2214692_Annot_ID_189409 3000 nt of promoter + ATG

SEQ ID NO: 14017 - DNA, 3000 bp, Unknown; identical to SEQ ID NO: 14005
  misc_feature (1)..( 3000): cDNA_ID_2705814_gDNA_ID_2214692_Annot_ID_189408 3000 nt of promoter + ATG

SEQ ID NO: 14018 - DNA, 3000 bp, Unknown
  misc_feature (1)..( 3000): cDNA_ID_3021398_gDNA_ID_2214692_Annot_ID_189407 3000 nt of promoter + ATG
tatatgacaggcagctccagagaaacgacaggcatttcgtcatgagcttcaaagagttggcaatgaaggcgcaaaagttctgcgtttgattggagaaaaagtggagaaaatggagaatctaggcccgggagagattctaaatgacgttcaacgtgcagcagaggagctacagatgaaaatagacagtaaatcctaccttcttgtgaactcagaaagctgggcagctactaaagagaaagctgaagcagaagaatatgaagaagaagctcacgagaccaaagtgatcaaatccttaagtcagatttgggataccaacagtagcagcaacaatcagaatccagctagtggtaatgatgaatctcagatatgggaatcaacagagagtatgatgttaagaaaccgtgagacatggccaagtgtgtccttcattggtggttctgtggtaaatgagacagtatataaagtatacgaaagcgcgagttctttgtctttagctacgtttgcttcccttctcatcgagtttgttgcaaggctggagaaccttgtaaacgcttttgaggagctaagcacaaaagcagatttcagagacccggttcctcttaacgtagtggatcaagaaggattatggacaacactcatgagacttaggagacttaggagatattttggcagaagttaaaaccgaatcttaaggggaccaagatgtagtaaatgttgtctgattttataacgaattttaatctatctgatcattaagtcgttaattaaattccaaagtgatcactcgcttagggtttagggccggtttatttgtctaatacttttgtaaatcactgccgtggtgaagaagtaaaatcttgactagcacattaccctacccttaattagggtttttccttttgacatttccattgtttcattcatgaccgaaaacatattgcattttctcgtggaaacttttgcatattctcactgattcttaacttaaaagataatcataaacttttataaagtatctccaacatgttgcattattatattgtacttttattgcttttccaatcttctataaattatcttgagcaaaactcatagattattattaaagaaattttcacagaagtggctaaaaaaagaattgctctcatgatttagcaaagtgagatgtggttttcaccatttgtcttttgaatggtttttagaccaaaatacccttaataggatcaaccaccccacagcagttggtttcggtttagtttctacggttcagttttaaaaaaaaaagaaaaaaaaactgaaacgaagaaaccaaagaagaagaaaaagaggaaaagaaagagatggagagatttgaaagagaagtagaaagaagttcaaacttcattatccacttcttcatatttcgacatctctccattgaactccaaaattgaggaagaaatttcttgttttcagagatgaacaaaatgcaaaaaaaaatcacagattcaaacaatttagctttttaaactaaagatactctaggtttacaagatttatatataaatagtaattaaaacgtataaaaaatgagattttgagaaaactgctaaagatggccgcaaaattaggtttgcagaaaaggatacacaggttgaagatgactggaaaattataattatacccttcattaaatttcttctgtgtacgtatattcaatttacagtgtacgtacacaaaattatttagtcgaacgtatatggtacgatttctaataagtcaagctattttattacgtattcttatatctcaataatctccatacatacataataattaaatagatatagatggtgaaataatatttgttcctcatattgaaaattatgtacgtatatgtgtaataatgtacgtatatttttgttggtaaattaatgtatgtacatgtgtaataatatacgtacatctttgtttgtaaattaaattattaagaaaattttattggtacaatattaaaccaatattggcagtgggcgagatatattctaagacgttcatacgatgtgattttgaaatattctgaattcttgacgacttgagcagtcaaatgtcatggacaagtatcatcaacgcataccatcaccaatcttgtaggatatgacctaggttgcttgtagcaaaaagattgtttgattgcgagataagacattgtttgttgtatgacttttctgttcttaaaaacactctccaatctatagtgtacgtacattggtacaaaccatgttgacacatacttcttggagtcacagctggtgtacggtcacccgggtgagaaatgttatctccgccaggtacacgctgacttgtgtacgtacactctgccaacagaagactgaattcccttggatgttgaacaatcagctgtgtgagaatgacgttctcctcaacattccctattccatattcttctacaatttcatcgttccacttgttgtaatcataatcttcgccactactttcactaccatcaatagtaggatcgatggtacttcccccatagatccatcgtcaccctgataatcatcatacccatcaccatcttcgttgtccccccatcttcatcctcatctgttttatcgtcttcaatctcgtcttactaatctatggcctcattattttcatcaacatttaaaacactatcacacacacggtcactttcagcatcgtcaccatgagtcctagagacattattcccgagtgtcttgacggttgtaatgaaagagacaaacaagttgagagaaggatacccaccacgaataaaaaaaatcgtatcccaccctcacttgactgtcaatgtagacaggagggcgtttagtatctatcatcactaacatctctcccgtatccagtaactaattatgggattgatctatggacttcaaactgaaagtctcgcttagtgtacatacaaattccgtgtacgtcatgttttccttaacacgtacacagcgaccaaacatg

SEQ ID NO: 14019 - DNA, 3000 bp, Unknown
  misc_feature (1)..( 3000): cDNA_ID_2705830_gDNA_ID_2214692_Annot_ID_136737 3000 nt of promoter + ATG
ttatgttttcttaaaaaaaacaaagaaacaacttatattttgtgtttgaatttcttgataatgatcggaactcttagcctactgacttttcctaattttatctatatattcaaatctagtaatttgcatgcatgaaattatagaaaaagatagataaataaattatgggataataaatctaagttaattaattagtataaaataggtagttgggtggtatcaaaattattttttaaaacgtataacatactctattaattagacactaatttgagggttattgaccgggtacgtagatgacttattaatcaatcgtaagagccactaggttattacaataattttttagttagattttttcttgcaactgctttgaggaacgatccatgcatatattatatatagaattggaatataaattaggcctaatatacataactaaagcttgtaatgggggattagtgttttgcatgtatgcagcaacgtctatagattatagggtgcgtaattagttttaattcatatgagctatttggtaataatatttcgttactaaatgatattcttatagcgagaaatagtttagtataatttgtagtgttgttaaaatgcaagtcgccacattaacaaacaaacaaaaagtgtccacttttatgaacatggatgattattcaaacattttttaacaaaaatatattttgggattcgaatttctatttacagaatagattgtttaatgttacggtccctattgtgtaaatttttcggacctaagattttagaattcttgtgttagaaaacatgttagaactttttttgtgtgtccatttgttgggaaaaaacaaatcaccgttacatatgtatgacatgtaactaagaaccacaacatgtccttttctctatgttcgattctctcgctgccatgaggatgcaatttttttagttattaaatagatgaaaagctagggatgattggttgtttccaaatcgtttgcaaacctgcaaccatttctaaacgctatagttttatacatgtgtgatacgagaatacaaaccgttttagcattttataacattttaattcgttttaaattttatgctcattctttcaagcatttgtgtgttagtaattaacaaaatttataaaaatatcaaaatatactttttgtaacgaaaatttaatattttctatataatattatgatatcaaaatcttgtatatttgatatatgtaataagagaagagatctatacataaaaaatgtttcacgcttatttaaaatatattttaataatttatactactatgtatttagcataaaatttcagcctttcataatatatgttttggtttctatttttataaaagaaatattgtatttattttagtaattttatgactatcagttatgatattatttatcaatcaattaaaaatgttatgcaattatatatataatagatgttcctaaccgctatatcatataaatcgttcaataacgttaaaaacggtaatctcgtcatctgttcccaaattttcacatccacgttttttctaacacatttaaatcagttaaacgccaaattaaaagttttatttcttctgcaaaaccagagttattatgaacaattgaaaaaaagaagcaaggtataattttgatgatcataagaaaaatgacggtccgatgtctccaaccatgagctgttcgttacatagtatgttgttcaagttatctactttttttttgtgtatgtggtcaacttttacgttaatcttgattgcactaaatttcttaaattattaaattgaaagttagtaccgaagagactgatttcacaatccaactacccttctgttcacgttccaacttacaaaagagaatgagaattctcattcattctctcatttatttatttcatgtctctcactttattactcttttttttttttttgttcttttctcctcaccaaaaaatagtatagaaacaaaggaatctttcaacttctctgacgaattttcgattttctaagtttactcaaattagatattttttaaaaactaccttccatgtacacttttattcatgatatatatatacatgaaaaaggtcctgccaaactaattaatactcaaaacatttatgctaccaaacaaacaaaaaaaacagaaaattaatttcaataattcttgatgatcattttctttgttacttattcacaataatgacaataatgataagttatttctttttcttaaaaaataatgagattaatgataacggttaacaggaaaaaactcaaccaataatgaaaatcaacaattattaactttggaacataataataataactactaaaaattttggagcggctcacaggaaccacgtacgtacccggagaagaatactctgttttatcattgaatctccacgtttcttctctcttctgcaaaattccgttttatcattttctctctctcatatcaaaagtgagaaagcgaccggagttccgtactttggatgagatgtgtttcgtcagtttccttactactaatcaccattagtcttcttcttcttcttctctctctctctctctgtctgaaaacgactttcctctgttcttctctcccccaattcttcttcttcttctctcatcctttcccaatctccatttttcgatgcttcattgattcacgagaagacaattccatttctgatattatttgtttcctttctcgatcgattctttgcgtaaaaacctgtttctgttctgtttcagaatctgtctctcttattactctgttctgttttgtctgtcttaataaagtttctttctctctttaaagacaaattcatagttccagtttccgaacttcactctctcttgtcggattctctgatgagtcatcagatctctgtttgaactatccaatttctcatcctctcttattttcttttttaatttcacttcaccggagatctccaatcgccggagaaatg

SEQ ID NO: 14020 - DNA, 3000 bp, Unknown
  misc_feature (1)..( 3000): cDNA_ID_2710864_gDNA_ID_2214693_Annot_ID_136744 3000 nt of promoter + ATG
ggccgatgcttatatactgtaagtggaatatgtaattcccgaaagtgccctccagatgttcacaaaattacgccatcgtactcgaattaacttcaactctctcttctctctctctttcttttcactcttgtttttgtttctgtgagtgctgtgtgtgttctcggtttgtaatatctaagtcgcacaaagatcagacaaagtctgtttgcgtttgatagcattagagtctgatcgaatttggaagacctgtgagattagggtttctttttgtttgtttttttttattccgaaggagagctgcggagcaattggaattacctcggttaaagcaatcacgtagctttggatcgtttagggttttctcattgggtttgggggatttgtattcgagcttcctcaaactcaatctgatggtgatgtgagacaaggcttaatcctgttaattggcgattctagggtttttcaatggcgagcacaggcgagcctgaccgtaaaaggcgtcactttagctccatatcaccttctgaagctgcagccgccgtaaagaaacagcctttcttttggccctcctccgaggacaaggtttctttcttcttcatctcccccttgtgcatgccctttacatctattctcttacttatccaatcaatcatagctttccagctattagagattcatatactgaatgtcttttgtctcgaatttggtctattttggaattgggattctctctcttaaggagtttgttttcgtttgatacagcttgatactgcagttcttcagttccaaaatcttaagctatcacaaaagctagaggctcagcaggttgagtgttctattcttgaggataaactctctcagatcaaggaaaaacaattaccatacaactccagtttgaagactgtccataagtcttgggaaaaggtaacactgaatttgctttcgattctaatagaacttggattagatctctttttctagagaactaattaatgcttgtatagcagcttacagcttcagtggaatcatgctctgttcgtgtgagtgattcaagcagcggagctcataggtttgtaaacaaggagggtatgaacaacttaagcccgccttttcttcgttctgttagtgctaggatctagtttagatttggttttatatgttacaaatatgactttttgaaaggttaactttaaattgctacacagatgggtcttctccagccgtgaaaaacgatttcatcaaccggctacttgaaactggtgctactgagagctcctcatccaatatctgctcgaatcagatggaagaaaatggagtgaatacgtcaagccagatgacgcaaaccttgtataatctagtagccgcgacagaggatttgaggtgtctgaaggatgaattatatcccacagttctcagaaccaatcttggtaaaggtatgacttccactgcgatcaattgtcagctcttgttatggcctttataacattttagtattaacccaggtcctatgtggaattgctttcttttctagatttgtgcggtcagctagctctgagtgagttggaatcagaaattaaaagtttcagaggggatctagatgatgtacttgtgaagttcaaatcactttctagagaattgcagagtcatcgcgatgctgatgctaaagttagagtagacctcaaacgaataagaggtagctacttagtctcgtctcactcgactatatactgttaaaatggattttttaattggcattgtttatatggatatagtattcatgcatcaaatgtaaatttgtaatcatatacgtggcttgacaaaaaaaggtcctatatacatgaaaagctactgaaatcatatctcgcttttgattgatgaggataagtgtaagtagaggtgatcaaattgtgaatcttccaattccacgcctgtgtatttatgtccagcactactcagttgtttaatagccatgattggatttagatcatagagattaagattgaagagagagatacattaagactggaagaaaacctctatggtagagccagctgttaagaagacatgtagctgtggaagatatactcattagcgaactgatgggtgtacaaaacccttctgagacatgaacttcttagttttcttttataccatttacccatatttatatatttcggtagattttaggagatagagaagctggtaattctttgagaatgacatacatccacataagtgaagcatcttaattttgttgataaattacccgtttaccttaagatgtaagatttcaatactgacagtagccacagttaagaaattcaaagagttaaaatttattttagtttacatgcctgcttttggattaatgcttcttgactaccgcatcaactgatattatactttatttggtctattcgaaggggagctagaggatgaggttgtggagcttcagcagtgtaatggtgacttgtcagcattgagagcagaaagggatgcaacagctggggcgtttttcccagtgttgagtcttggaaataagcttgctaccagtgatcgggagagggataaacaaagggatctgcaagacatggaaacagttctgaaagagttaacggtatctttgtttttctgatttgttttcattggtaattctttaagttttgggttgataacggcctggtttcggtaggtcctggcttcaggcaggctacaacagctaaaaaatcttcatgaggagaggacaaagatgcttggaaaaatgagtaatttacaggtcagtgtattgatccaattggggtatttgtattagtttgtctctgtatggggtttgatatatgaaaatttgtggaatggtagcctcttcctattgctaaaactgatgtaagagttttctaacagaacaagtcaaagtctgtgaggtgcatctcatcttctcaagcctgcctttctttgaaagaccagctagaaaaatccaaagaagcagttttccagtatatg

SEQ ID NO: 14021 - DNA, 3000 bp, Unknown
  misc_feature (1)..( 3000): cDNA_ID_2710862_gDNA_ID_2214693_Annot_ID_136745 3000 nt of promoter + ATG
ctaccattctaatatcagtaatttttccatggccagggcggtggtaatggggacaatgcggttgcaccacaagtgtttaattctttaccagctcttaatgaagctgcttcttatataactcaagcaacgtcttacttagggagctgtttttctgactattcaggtaccctttctttctatctgttgatgtcgtactcagtatgcaattccacgttcatatgctaggctttacttatggaaaatatgcttagcagatatttatggtgttaggatcttatcgtcaccgtaacataattcaggctttgcttagcatctgttctttcaatgctttcttcagtagaatatggtggcaaggatactatttcccacccccatgagttgttacgatcaacttccggagttgacgggaattccccagtgagtgtatgcatttcgcctggtgaaaggttttcaacttcttcagaggcatctacatctgatgccaacagcccgtcgagggaatctacagagattctgccacaggcaacaaatgcaatagtgacttcgaatcggttaaatttaaatggaatttcaatgttccaagggtacgtgtactttgtattacagatacaaattccccatactagtagatatgtaaaatcttaatactatgaatatgtgaaactgaagcaatacaataatctctatacactactacttcttgtcaagttttcagcatttgggtgattgatctattttaattcaatcaggctcattgagcgggcacggaggactgttcgtggctcggcagatgacataggatggttacagcgtgccccggagatgcctcctgttgaagatggaactgataggttcaataaaattctggaagacatcgggtatgaattggttgtagttgcatgttttgtgtgctttgtggccttttcaatatgctgtttaacatcctgttttttactaaatggctgcgttgatctggtttttatatccaggcatggtgtacacaggcttccaaatacagtggtgtacttattggttccaggtagcaattcttattctttgctgccagccacttaaactacattactgtatattaggactctcaaaattagttgaattttttttaggtcttttcagcaatcatggacctctatattttgtggatacgaaaacgaaattctcaaagatgggtttggcgtgtcatattgcgaagattcacagcgaggtaatcataactaactcaacttagtacagttacatttggtgtatagcatactaatatatggagaaatgtttatatatcagtcctcggttgagaaaaatgcgagagagataaaggaatacatagaggaactctgttggggatctaataagcgggttctacttcttgggcatagcaaaggaggcatagatgcagctgctgctttatcactatactggcctgaactaaaggataaggtcgctgggttggtactggcgcagagtccatatggtggaagcccaatagctacagatatcctccgtgaaggacaactaggtgattacgtcaatttgagaaagatgatggagattctaatctccaaagtcataaaggtttgcaacattcctgatctaacaaagtcatttcagttgcattatatcagcttcttgtgattgcctgttaaaatccttagttaggtggaaccgagaaactagggataaaccaaaacttattttgtttctggattctattgctctgctgatctttctgatgaattccttggaacattgtgaagggtgacattcaagcattggaagatttaacatacgagagaagaaaagaattcttgaagaatcatccgcttccccgagaactccccacggtttcattccgcacagaagctagcattagcccagcggttctatccactttatcacacgtagcacacgctgaacttcctctgacaaaccaagccgcaaaactgccagtggtaatgccacttggtgctgcaatggctgcttgcgctcagctacttcaagtcagatacggtgaaaagagtgacgggctagtgacttgctgtgacgcagaggttcctggttctgtggttgttagacccaaacgtaaactagaccatgcctggatggtgtactcttccttgaacgaggttcctttagaagctgatgctgctcaagtttgtgaagcgctcttaactttgcttgtccaagttgagcaagagaggcaacaaaaactcgcaacaaaaatcgattgataaaccaaattgttttatttctactttcgtcttgagacttcaaattactgtatttgtttctatctttttgttttatttcttactaatttactatcaggtttgaatcacacgataacaaaaaaattattacaaacggtagattttatatttataagactacttaatttgcttctttttttttcttttattgttgattaatttttattagaagattagttatgtttttctctctattcctttaacgaaccgtgatcgtgcggctcggatcgttggagattctatggacggccgatgcttatatactgtaagtggaatatgtaattcccgaaagtgccctccagatgttcacaaaattacgccatcgtactcgaattaacttcaactctctcttctctctctctttcttttcactcttgtttttgtttctgtgagtgctgtgtgtgttctcggtttgtaatatctaagtcgcacaaagatcagacaaagtctgtttgcgtttgatagcattagagtctgatcgaatttggaagacctgtgagattagggtttctttttgtttgtttttttttattccgaaggagagctgcggagcaattggaattacctcggttaaagcaatcacgtagctttggatcgtttagggttttctcattgggtttgggggatttgtattcgagcttcctcaaactcaatctgatggtgatgtgagacaaggcttaatcctgttaattggcgattctagggtttttcaatg

SEQ ID NO: 14022 - DNA, 3000 bp, Unknown
  misc_feature (1)..( 3000): cDNA_ID_2710858_gDNA_ID_2214693_Annot_ID_136746 3000 nt of promoter + ATG
tgacaggcaagtggtaagcttttggttttggatcaattgctcaaaaggctccatgatagtggccatcgtgtcctcctcttttcccaaatgacctcaacacttgacattttgcaggttttcttatagagctattttttgttctataacatctgtgcatcattgactacactgacatgtagcttataacaaatacaggattttatggagcttcgtaggtattcgtatgagcgccttgatggatcagtacgggctgaagaacgttttgctgcgataaagaatttcagcgcgaaaacagaaagaggattggattctgaagttgatggaagcaatgcctttgttttcatgatctctacaagagcagggggagtcggtttgaatcttgttgctgctgatactgttcgttatttctggcttttgtttttccatattatttcttgcggaaatggaatacatcggcatagagaaagataaatatgatttgtttctagtgcttattcaagtgcttttgaatatgcaggttatattttatgaacaagactggaacccacaggtggataaacaagctttgcaacgagctcatcgaattggacaaatcagtcatgtgctgtctataaacctcgttactgaacattctgtggaagaggtctgtgactgtcgtagtgtttcaaaacacaaagtcatcaaaaagcattatcaaaatctaaatgcgtgtgtttcaggttattttgaggagggcagagagaaagttgcagcttagtcataatgttgtgggagataacatggaagagaaagaagaagatggtggtgatttgcggtctctagtgtttggtttacaaaggtttgatcccgaggagattcacaatgaagagtctgataacctgaaaatggtagaaataagttctcttgctgagaaagttgttgcaatacgtcaaaacgttgaaccagacaaggaagaaagaaggtttgaaattaattcgagcgacactttgctaggaaatacatcatctgcaagtctggattccgagcttgatgaagcttcttacctttcatgggttgagaaattgaaggaagctgcacgatcaagcaaggatgaaaaaattattgagttgggaaatagaaagaacttatctgaggaaagaaatctgagaattgaggctgccaggaaaaaggcagaagagaagaagttagccacgtggggagcacacggttatcagtctttgtccgtggaagaaccgattttgcctgatgatgttgattccagctcagatgcaggatctgttaactttgtctttggagactgtacaaatccatcaactgtctctcatgagccagcaatcatattcaggtaaaacttcatttcaattgttcatctaaaaaccaaacctctaaaacttccaaatattgattttatggcagctgtgttgatgactctggaaactggggacgtggtggaatgtttgatgctctgtcaaaactgtctaatactgtacccactgcttatcaccgagcatccgagtttaaagaccttcatcttggagacctgcatctcataaaaattgatggtctgcaactttttttttttctatcttcctttcattttctaacaacatcaaagagttctcatgtattttgtgttgtgtagacaatgatgaccaacaaaacacacaagcaagcaagcctctttgggtggcagttgcagttacacaatcttacaattcgaggcgtaaagtcccacgtagtagcatttcaattccagaccttgaaagttgcttagccaaagcttcattctctgcttctcagaaatcaggtacgaacttaattactttctttctttaaagtttcatcatatttggaattataaacaaaagtgctcccaaagagcttaacacttgtgttgtcatttctggtatggtaatgttctctcctcaaaaagcctcactccacatgccacgtattggttaccaagacggatcagaccgatctcaatggtacactgttgagcgtcttcttcgaaaatactcctccatcttcaccgtcaaaatattcgtgtaagtttatatgtgtcgcccgtcttctttcttttgaataatccaaagcaaactcatttttgttgctttcttgtaggtactattatcgtcgatctccctgaatcacacaatgggatagtctttttgacgctgtaatataatttgcttttggttgtacatgtaacggtgtcgtttgtatgtagaaggaagacttgtaattgggcccagtagtggcccatattaatgtataattaaataatagcctaatcttataattcaatcttgatcactgagccaatttacacgtgttgcgtctctagtgcctctggttccacgttggtcgtcaaaattgaaatcgcgtttctattttcttcacgaggtttcttttccccgcggcttaggacaatatgatccgaatcgttgaagaaactgtctccttgtgtctatgtttcgttttgatcccacattcctaaagctccaggtaccttttctacgtttcccgaattctgattagttgattcttcttcctcaatccgttcttcccaaacttgttgccgatttttggatccggtcatcaactttgttgtttatttgtcatcaatgcaaaaattgagagcgtctgtgttttcacttgcatgttatcaattcctaatgttgtttgccgtttcattaaccggattcgagactcttcccgctggatttctttttttcacgtcttcttttctattttttatggatttggtattttgacatgttaagcaaccttcgttaatcagtttaaaatcggtgctttccgaaatttttagaagaaacatggaagcttaaaattttgaaattgctatttggaaaagctatcatttcataggcttagtctttgtaattcttctttacttgttgttcattggcatgaatatatgaaggattttatatttgattgtgtgtttgtttatgttgttagaaattgatcaaaatg

SEQ ID NO: 14023 - DNA, 3000 bp, Unknown
  misc_feature (1)..( 3000): cDNA_ID_2710854_gDNA_ID_2214693_Annot_ID_136747 3000 nt of promoter + ATG
tgtgtcccatatatcatgaccagataaatctctgtcggaagaatcatcatcatcacaagattcacaaccgttgttctcgacgttaaatcttccgacggtatccaacgatccagattcaatctcgtacggttcaccaccttcccataaacaaagcaatcgcccagcccatttcaaaacgctagtattagccacgtttttcatcactttcgtgtttccaaatctcttccctcctttcaacaccgagaaaggacctctatgagtgaaccgccacgtgtcagttacaggatcgtgctcttcttttttagcttccgttttaacgtacttcgccgtgaaagtggctttccgtttgttaccgtcgatgtgaaacgcacggagataaccgtgaccgtctaaaggatgaaccgttgagccatggtcgtcagtaaatagtcctggaccggctaagtagtatgtaccggaagggaagttaaccggtattgaaccttcgattggtttaattacgaccggttcgatagtctcggaacgttgtgacacgaataaagattggtaatcacggaaagctgaagacgtggactcgtcgaggatggtaccggtacgtcctaaaccggtgtctggtatagatattgatattgcggctcgtggaggtgcaagcggtggcggagtttggtgatgatgaatcggtggagattttagcggtggaagaaatttcggcgggatagggagagacattttggtcaacattttttgaaatatgcaaattatagtatagttttctatgatacacgcaaagcatatgttatatatatatatagattttataccaaacaaagattgagtgaataaaatggatacgtcatacgtggctgtatgcatgtttaggaactatggtggggtagaaaaagttgagtgattttgtggaagacatgagcaaatttggacatgaaagaaaaattcgaaaatggcagacatgatactaagccattgctttatgttgtttaatataaatttaaattagtgattagaacttggaagtgagtattattgcgtcacacgacacatgtaccgttaatcaattggtatatttttagttgttgctcatgaaactaacaaaattattgtcaatagattcactcataatattgaatagttggttataagaaatacgtgtacatcaagatagaaagattggagcagacaacaagaaccgagaagtactgatcaccgacacttctcaagttgatcctaatgatagatatggacattttatgttgtatgtatgtgtcttgtggataattatgttgtaatcaaataaaaaactaataagagttccctttttattacaagtaataatcaatacttgtataaaatttccactaacatcgattcattttgtgcgttaatctcattggctaaatcaactaatattttgttttaatgaagcttcaaatcgacccacttcgattataataaaatactttttgcgagttgggactgaaacattattaaattgttaaagaaactcattatggtttcggatttcaacgttaaaatcatagaaccctcattcatatgtcttcagtttggagaacatttagagacaagtcttcggaacaatgatcttcaataaacaatgtcaaaccaaagggcgcccatattttataaattacaagttacgccatgatatcaatctacatgtttttgaacgttatgatattaattagctggttagatacttgataaatatgtggagttggcagttatgaaccgttgaacgtattctttatacttttatagataggagtttgcaagtatttacatgccaagcaatccgatttttttgcattaattaattaaaattttgcaaactctaaactttggtagtattattgagataaaagtatggtactaactagtttgataactaaaaatacccaaatattgcatatacaaaatcttgtaaattatgtatgtcaactagtatcttctaaattttacaccatcgagatggcatgaatgaaacagttttcgccaattactatcttttaaaagtcgtatttcttggttacacgcaaaaccaattttgttgcgattggtcgatgagacatggtcaaataataatgcaaatatagattatttcagaaattgttggattacgtaacctacatgaccagccgaatgattttatcatgtattatccatccacgcataaatacagtttaaatcacaaaaatatgagcacaaatcgtgagtataattaagagcaaaatttacttatggtatacggcagtaaaatggatgtgtgatatgtgttgggaacatagagatggattccttggtaccattaagcagcactcgaggagttttaagagtgaatggaggagtaatggtgggagaatattagtgctaccaaaatatttaaaatcaaaaagagtgttattaaaatgattataagtttgattaaatgtttaatatttgaccatattgccaacaatggaattaaaggtgattgagcgtaggtccttcgtgtctctcttctcatcatttgagccgtcgatgccgaatctgctgacgtcacaccatccacaccacttgtctgtattttggaagctttgtgattatttccccaaatggactttcatataattatcttagtatttccccttatgatttattttatagcacctaaaatgatttgttaacgaattatattcggccaacttcatgtcggaaatccattttagtaatttctcgagtaaaataaaataaatataagtcgtttatcaaatttttttattttttttttataaataaatcaatatatttggtcaatctaaattattgtttaaaacaaaaatctaaagtcaataaaaaaacgagagacgaaaataaacgacgtcgtttattgagcttctattttccttttccggtcttagttaattcccggttcaaccggtctcggttcttttcctcgaaacggtagcgtatgacgaagaaaaaatg

SEQ ID NO: 14024 - DNA, 3000 bp, Unknown
  misc_feature (1)..( 3000): cDNA_ID_2710846_gDNA_ID_2214693_Annot_ID_136751 3000 nt of promoter + ATG
cttgcactggtgtgctttgtgccaggaacacagggagatgaagaatcatctttctgatacagaagcctcatcatcaactactatggatcctcccccagttcaagagatgaacactgaggagagaagagacgcttcatcttcttcgtcctcatccccatcatctgccaaaagccaacacaatgatctcgagatggtccctctataggaaacgttccttattaatctctgctgcttatgctttaagctgttttttctgtgcagagaagttttcgtaccagatgactctattgtccttaggttttaaatatgcaaaagtttgttctaagaacaagttcaatagtactcttaagttttacagaacttaaattcatgacttcattgaatctcttggaagaaggaagaaaactattttgtgattaaacactgcatgattggtaaatttgtttcgtatttcgttattttgttcttttttattataaaacttcaaagtaattacacaagcacccgtggcctaatggataaggcgtttgacttctaatcaagcgattgtgggttcgagtcccaccgggtgtgctattctaattttactgaagctgacgaaaacaaattagaattttacccgactttttgttccctcacattttatctgctaaatttttttctgtcagtagtcatcacatcatgatccaatacaaggttatgagttataaaatgttaatgttactaattttcgcacaaatgactaaactcaaaacactgatgatgttaggaaaccaaagatgaatttacaaagtgttgactgcactaatccaaaacttcttgttttgataccttggacaagttgaccttcttacttgcacctcaggcctcagcttgactattgtcccacgtttggcctctgttctcaggtggtatcccctatcagtactccagggacgccagggccaaaagcttggcatattcagggagtttgcggaccagctttatttccccagaggaaaaaaaatcacacactcccaaatcttcatcctccatcgtggtcaaggcgtttaggctcggaggcggttctccatgaagcgtcgcccaatgtgatagccactcatgggctctcaccatttttttaagaataaatttttcaaattgatgagatgagagattctgttaaattttttttattttgcagtgtccaatagtagtctctctttattgggttttcatgaaaaaaataaattattagttcacacgtttccaacaacattttgctgcttctttagttctcccttgagccctctcttcaagtttgcggatcctagcttgcaatccacagaggtagtcctgttcgaagccattaaaacaacgccaaaagtcagagtagagtgtaaagaactcagattccaatttgatgaatctccaagagcacaagagaagttacaatgcaattatagatatgataggttctgtaagttacaatgcaatttttcttgacagacgctcaatgtaccaaataatgaacactaaagatatagaaaaataaggaagcaaacaagcacacaatgaaataagagagcaaacaagtaagtaattaaaacaagcaacgaatcaaagaagaaaataaggatctttttagacactagaaaaaatcattcaactatgaactcttttcaagatttctgtaactaccaaccttacacgattgtcatggctaattgccatctgtcaaaccttggtccatgtagcttgttgaagctcaaatcactggaaagtggaaactagacacgagttacttacatcatcaaagacccattttacaagctaaagcagatatcaagacaacaatttccatcggttgaacaacaaactctaagcaaaagccactatatccagaagttagaaaattttaaagtgtgtttttgacttacaattttaaagccactataatcaggtaaccattataaagtgtaacccgtcttccttctgccgtaatctcactgcacaacaatgcttaaattagtaacacactctagttcatacatcaaacaagaaaaagatgaatcttttaagtgtgccggatatcaatttcctataaaacacacacctaggagaaaatacgtgcatcaagctagaaaaacttgaagaaacactagttaaatctgcgatagacaatgaatactaacttgaataaacactaattaaatcttcttccaagagatgtacgtgacatgaacatatatgacaaatccagtgagattcaacacaaattaacacaaatccatcatcaattaacacatctactcaaacccatcatcaattaacacaaacctagaacctcaaagggctaggctagaagaacttacaatcgacgtgaccaccgccttcgagaaggatgaatccggcccaaccattgctcttgcgcaaccactgctcatacaacatatcgactgcttaaattcaacccgcaatcgtcggagcaaacgaccggctccgtcgccatcaccagcgttttcattgtcgtttggtttcgagagagtttcgcgaaaaatagaaattgacaaagtattttccttcaggcgttttttttttttcagttttgtcaaacaaaacatccaaaacgtgacacgtacacgtctctcttctctttcaaagtttctctcaagagagacagctctctctgtaaaaacgatttctgatttaatttttcacaattttattctgagaacccactgagagaactctaatatcaagccattggagatgctctaaggtgaagaatcagagattagaagagagaaaaagaaagaagaagaagacaaagataacccatcgggtccaaatgtactccgggtcaaataacccatcgggtccaaatgttaaaccggaagtttatcaaaccgaatctgaaccaaaattgataatacaaacacacacactctcctcaagtctctctcacaaagaaaagactcaaacccattttcctaaaaccctcgtcgtccatacaaagcc

SEQ ID NO: 14025 - DNA, 3000 bp, Unknown
  misc_feature (1)..( 3000): cDNA_ID_2710842_gDNA_ID_2214693_Annot_ID_136753 3000 nt of promoter + ATG
aaaccattaaaccaattgacattagcattattgagttttccttgaaaaaatgagtaattaattagatgaatgtaaataatttcgagtaaacatttgaaaattataaatattaaagaaggagacaagagggataaaggaagagcatatggtctatcatctttgcatgttattcgtcagaagagcttattatctaaaccaaaaaaacgtctcctttttattatctttctatggagtataactttattttcttctaaaaattgacttggaaaaaaaaatatcgagtgttgttgagaaaaactcatataataatattcggtgtcattatgggcacatgaggccgcacgtgttcttgctgtttactttgggatcaccgtcctctgtcacgtcacgtgattcaagaaacaaaaaatcaaaagaataaaccaaaaaaaaaagtttaagcatatagtattatcaataatgacatatatattaatatgaatatatgccagtaacgagcgttcttagtggtcactggtcacttgcacactactagagtcacgagactacaacatttgggagtatcaaatccataagtcaatttttaaaaactatacaattttcttttgtcaaataagaccaaaacaagagactgtgattgaaagagagaggctaaagagaagttagtgccaccgtacgtcaatgtactttccttctattattattttctctcttttgatatttttttggagggaatgatcatatattattgcagcaaatagctaaattttggtttggtaaattatggtataaatagtaaatttgagtacatggaatttagaaagtgaaccttctgagccaagaagaaggtgacagctggaaaagacactgtcggtagtaagtgaaaaataaatataaaaaacaaatatctctcatatgggtacctctcgttccgtgccatcgtgtttaattaatgttgaatgtgcagtggggttgggtccttgtggggagtcactttgtttagtaacaaactaaaaaaatacattagtatatgatttcacataactcaaatattttgttataaattaaattgttttttctcaatgtgatcaaaaccctagcaagcgtcacacgacacggcccgtttctttctcattttctttaattaaactcaatagtatttcgttaagttttgtgtagattcttaaaataacgggaatagattacgttttttcgtgcaaatcaatagtaattaatttctcatttttagggaacttgcacggtgttgcacaacatattcagttcaaacatataaaaattcatatacatgtaggtttatattacttgcatatcatatgaggttcatttcctgaaatattcaattggttttatatttggtattactcttttgttattaacttatttttaatgcatcctctaatattcttcttctttacaattttatggcccccacatggagccacgtggctatattaacttttcctttttacattcgtttattttattttcgtataagatgaaaacaatttatctttagaacttgtgtggatatgtcaataactaaaattgtcggtacttaccatgaagcatgtgttatgcctatgtatatttggaaaaaaaaagggagagggtagtgaaattagcttaactaatagtttatccgccgaacaactcttgtactcgtcaaaaaaaaaacaaaaaaaaaatcagacaaatcggccctcttccattattcgtctgcactctgcagcatatacgtgtattatttcgctaattaaccttattttgctataactttagtttattttgcagcttagttataactaactatatgtatagtatacgcattaactggaggcgatggagcaatgcaaattgtacgtcaattgtagtttgtgtacatatatagaaatgatattgtagcaaacgctgtggtagccactagccaacgaacaaagtttcatatacggacatgcgtatgattatttgaaagaaaaagagcacagggaaatagatagatagacccactaaataagtaaataatatgtacataatatatagtacagaagcaatgaaagagacgtatatatatgttgactgaatatctttttgtaattataagaaaaaacaaaatatgtaagttttaaacgatcgatcatggatataactctatttgctggttggaaaaaaaattgctttccatatcataattttctagctcaatgcgataacacaagattctatatgttaaaacaagttaaataaattgacaacaaatatgattgtttagatgaattccctattactgaatagagttactcatacattaaaacgtgtgtttcctagttaaattttattttgaagaaatcaggagaatgaaggtgaaacatacaatattagctaatcaattatcatttttttttttttttcaaaatcaactcatggtgaactagcagttgaaagttagtcatatgacatgtaaaactcgagttttcttgttcgattattttcacttcgattagttggccatataacattgctatatactataaacacataaaaaaaatatcaaaaacactctattcctccacaaaactcacatagttttgtaactcttatagtgaattaatttgtgtagttcttaataacaatttgtataaatataagtgagtttacactaactctattcatccgtgtagtataagtttttgaacatttcaatagctcagtaggtgcaaagttttaactctcttcttcttatagataaaagtggatgataaattaaaaaataaataaagaagagagaagtgaataaggtcgagtcggtcactcacggtgcatggtcactctctctgcacgttctcttgccctctctctctctcgttatctcccctattaaagactctaaccagtcacacagagagtgagaaagagagagagacagagtcagagtcttcgtctgcaagagagaacaataccactcaatcataatctataaca

SEQ ID NO: 14026 - DNA, 2225 bp, Unknown
  misc_feature (1)..( 2225): cDNA_ID_3021416_gDNA_ID_2214693_Annot_ID_189453 3000 nt of promoter + ATG
taacataataagcatgtctactttacattcatacacaagcaaccaagaatttcaatcttgtcttggaaatccagctgcccatctccttgtttgattttcatttactccacttattgttgttaaatacatacataaccacttgatttattggtaatgctattatattattgttgtgtgcttgttatggttgtagatgtagtagtgaattagatatagaataaacaaatatgttagcgtgatccatgttatgtcatcgaggtgtttcattaccacgaattttcttagaaattgtgaacaacatattgggaccgtgcgattaatttgatttgtgttgacaaggaaaaaattgttttataattttaacataagtttggtttccaacaccggtgtttagtactgttttaatattgtatacctaatgtaagtagtttattaagaatggacaaaatgtacattaactacttaatatttaaatgaacatttgttttaaaacaaatagcagagtgaaaaatttgacatagcaatgtcattttcattgaccaaaattaatatatcaaagtgcgattcaaataatataaacttatagtttaggtttttaacaaaatagtggaaatgtttcgagatgctttcacacaaaacaatactagtattttcttcaaaaactttaatacatatatatatatatatatatatgaatataatgtagttttgaaaataaattccatgaacaaaaaaaggtcctaataataaattcgaataaaatagtgttagttatttaactaacacatgttatgattaacaactttaagttctttgcaaaaaagagtttagtttttaaatcacgagttaaagtaatcgacaccaccaccatcttagattttgtagttaagactaattaaagaaaaaggaagaatacttccaacataatttagagccaatggatttgaagtgagacaaagcatctcagccgttgaaagattttggtctcgatgttttcaaaaaatcttcaaaaagccacaccagagagacactcaaatagagcaccggtccgtcagattcagtttcgaaaaccaggcccaaagccacctgccagacttgtttcccctctaattactatattgtccttctctcttttgcagtgtcttcctcgaatcttaagggtaaaattgggaattaaagtaaatattagtaatgaaccatctgcgtcagtttcgtctttttgctctgtttcctcggcatatgtaagatttttttttctttcaaaaaacactgtttcagatcagtgaccctttctttcattattttggagaaagtattcgaaaataaagtacgtgaaaacgggaaattatttaaactgagaggtgaaattctttttttttattttcccttccgttattgtattattttccaatggtatgttggaagaatttgttttagatttttcgaagataaagaaaaatcaaccaataaaaataaaaatggcaaaaacatgttttagttccttttgaggaaatgttgttatagagggattatccagttatagacatcatcgcaagaccactaaattcgttgtacacaaaaatgataagcaactagtagtactttgttgtttcaaaatttacaagtagatagaattagctcgtacacaaacctctataatagtactatagaagaagcaacttacggccaaaattgaaagagtaagacaaattaagttgtagggggagagtagagtcacgcgctggatttgcgaagagactcgacaatgatggcacaagaacacggtacatatgtagataagtacatctacagacataagccacacatagaggacgagaaaccagaaagaaaaaaaagaaatgaaaattccttattacaaaaaccaaaagatttagagagagagagagagatagagcattgatgaagaccactttttatatattgcacgcatccatataacagctacagagaaagaaaaaagaaagaaagtgattttagagaaagaagaaaaaattaaagaaagttggggcgccaattacaagttttgagctttgcatgtgtttctttcttccgtacattaaccactctgagacataacctctctctctcttcttttgttgtctttctgttctgttcttgagatctctctctctctctctctctagggttatttttttctgggttttttgtttttacagttactctgtgttgttgaggaggcgatg

SEQ ID NO: 14027 - DNA, 3000 bp, Unknown
  misc_feature (1)..( 3000): cDNA_ID_2710816_gDNA_ID_2214693_Annot_ID_189452 3000 nt of promoter + ATG
tccatccattcctaaccttgttactattatctatcagtctttttgataattaatacaaatgttgatatgtagagtacgacgaatcgtaaattgtaataattgtttcgttttgctgtaatttggctctatctttatacattagaagagataatcaaaaaagagataaaaataaagccaaaataaatgtgttttttttgcgctggtcaaagaaaaaaaaagaagtccaaatgacagttatacccctaataacgcaccatgagaactcagacgattaagggtgtaatagtaataacaagaagtgagtctccggtctgaaactaattaaggagacggcaagagaaacaagacatacgtttgctgtcccacgttgatcttgttgtttactctctctctctcctccatcggcgacgaccaccggagatcagcgtcaccgtaccaaaacatcatttaccttcttttagatttgttgttttttaatcagttgaatcggaataaaatatcgcatcagagatgagtaacgagcttctcaccatcgatcctgtcgaccttcaattcccttgtaagccttattttttcctcaacttttcgatgattcgcatatgtcttagatccaacttcttccgaattagttgtaatgattttgtgatttctttctttggatgtgtagttgaattgaagaagcagatctcttgttctctctatttgggtaacaagaccgataattatgtcgccttcaaggttaatttcaatttttgaattggatatatattcttttgtgtatatcttaatgttttcaagggtcaattattttttaaaggttaagacgacgaatccaaagaagtactgcgttaggcctaatactggtgttgttcatcccagatcctcttctgaagttttaggtttgtctctctttcttttcgttattgatctccaatggataaaagatgaggaatttactagttttgggatcatggttttgattttttgttttgttttttaattagtgaccatgcaagctcaaaaggaagctcctgctgatctgcagtgtaaagataagttcttgcttcaatgtgtagtcgctagtcccggagccacccccaaggatgttacacatgagatggtattactatttattattatttaatttggaagctttggttacttaagacagtgttttatcgtgtaatgatgaacactgcagtttagcaaagaggcagggcatcgagttgaagagactaaattgagagttgtctatgttgctccaccacgaccaccatcaccggttcgagaaggatctgaagagggctcttcaccgagggcttctgtctctgataatgggaatgcttctgattttactgctgtaagtaacacacatctcttgctgagatatcatagattttttgtactagtgttgatttccttgcgttatctttaatttaggctccaagatttagcgcagacagggttgatgctcaggataattcatctgaggtaatttaataacccatctgacgcttcatgtaactgagctaacttggcatgataaagagtggatgagttttacactattacgctacctacattagtttaccattcaaccctatggaattctctttcttgtcaggttgtttagagcagtttagtcttttttttgttgaagttcagatcattccagttattagcaacttaatggctcttttattgtacactgcttgatgtgaaattctcaaacctattaggccaataatcttaactttttgtttattactgaagaattctgaataatcttaaccttgtttgaatgaagctttaactaatttctgaaaatactgtcgtccagaagaatattgtttcctctgctgtagttttagctttttactgattatgcatgcaattgaattggtctaagctgcaacatatctactagctattaattggcacattttagcattgaagttacgagacctgagtgatcattctattacaatgtaattttgacacctatcaatttgtatgatatcaggcaagagctctggtcacaaaactcaccgaggaaaagaactctgcggttcaactgaacaacaggcttcaacaagaattggtaagcaacttttaaactattccttccggtggttggtttaagaatcaaagaaactatttgtctgaaatgggaattgatgattaacactttcataactagttacccggttttaggagtagcggccattttcttgttatctgagttgttagatttaagctcaatgaagtctatgtaccctgcttttcttttttgttgcgtaacaaggacctctcggataacaaaagatttaatattgcaggaccagttgaggcgcgaaagcaagagaagtaagagtggtggaatccctttcatgtacgttcttctggtcggcctaatcggtttaatcctgggatacattatgaagaggacatgatcagatcccttcaacaaaatactccaaaagtctcaaagtgcttaaaaaagcattgaaaaggaaagaaatcaaattgtgtgaggaggacaatcttctcttctgccttatcgtcgtcatgcacctttggttaaaatctgaacttagtgcgttagaggatttgtattacggtttccataagacttagaattgtcacaaaatctcctttttcctctctcttattacaactttgtgtagtcttaaacacttttgtttcttcgtcttctctcatcttaactttttctctccatctctcatagaataaagggatgaaacatgtcgccttatcattgttttagtgaggatacaaagactctaaataagtcggaaggttctaactctacctggtacatcttcgtagctacaaaacaaaactcgccgagacattaaccaaatgacaaatacgaacacactcttcctcagacatgatgatgattcagagattttgatttttcaagaaaactctgtttttcctctttttgtttttgcctcttggggcatttggagagca

SEQ ID NO: 14028 - DNA, 3000 bp, Unknown
  misc_feature (1)..( 3000): cDNA_ID_2705845_gDNA_ID_2214693_Annot_ID_189451 3000 nt of promoter + ATG
attcttatcctctgtaggcgataagattgtgaagatctgtgaaggcaagtctcgaaagttgtcacctttatgtttcctttggaatttgtcttgtctcgaaacaaagagatttgattgattgttaaaatctggattcgattttgtattttgcagagtatggctactttgaaagaaatgaggtcagtaatatcaaagctaaaaacattcagggtctggaactagagctgacatcagagcgtcttcaggaatatgacttcaactctatcaaatccacttgtttcaataaagaggtgcgtgcgtgcgtgttataagtaacattgacgaaaattttcacgattttgcttgcttgcttactcttttactcgttattggtgttagattgggatcttgtataagcttaagtatggggaaataggtgctaagttgatatccaaatcatcccgtcctatggctcagttcactggtactgttagacacctcggtaaactctctggtttggaactcacttccatgagtattgttgacattaacggacacaagctcgataagtggcatgttgggctcactctcattgcagggaacgcctctgtgcagattagacggttagtagttttaaaacgttgattcctccacctcttatagaacaataagcattgtgtggtgaattctgaatatgtttcctctttgcagagaggctgatagatacgttgtttcaacccgccatcatattcacccgagatttgtgtcgctcactgagctgagatcactgtatttctggcgcatatcactcccgtccactgtggcgatgggattcgagttcgagcttaaccctaggataactcttgaagtgatggtctccgaatcccatcttcaacctccgagtgttgcactccaatatcaatgttcaagggctcagtgtctcattagagtttacggtgatgtctactccaaaaaaaatggtgtatcttttgcgtttcgtccttcttctttcgtctagttactcggatttttaccctcaaattactttttttttacttgttggcctcggctagttattgggccaattgtttctatagtgggccgtgtattacagacagacacacctaaacgacgacgggtcgagaggataaataaatgggaatattctcggaaacattgatgtgattccaaatattttattcccaatttggtattcttcttcatcatagctcgaaaccctaactccccacttccatcgaccatcgacatgttttaatcttagaattgtgaccaataaggtgatggatacatttcaaggcaagtccgaaggcctggaaccacaattggcatcgaaggatcttcaggcgtcgaagccgataatttcatcatcttcttcgttatcagagcgtcgatacaagagtggtacttttcttttctccaattctcgatcatacttgaatcatatgtgtttcgttttgctccgaatttctaaatcaatcagaattacgtggttatgtatggctgatttgttagaattattagtgtagctatagaccaagattttttcttactcaagagttgtgattttctctcgcaggcagaaagatacctattattgctattgaatgccgtagatgcttatcagtctcttctccggtagttattgccgacccttgcatgcacagattctgcggttaggttcttctttactctttctttaacccactagctaatgtgtgtgactgaaaacaatcagggtgtttagctttgtcttattttaacacaaacccctgattctggactaacttattaccctaacaaaattgtctttttttctttcttaatgcaacagtgaaatgtatcttattcctctggggacgccagaaacgtagagaaccttgtgtatgcccccttgatggagaaaagatgatttgcttacatcctcctatgaacattgccgaatctgcggctgaggagattactggccttgtcgacgtttataatcctatgttcaatccacgccattacatggtaattaatcagttcacctcctaatcaattgaacatgctctaatattcttagtaagggagtagttattaatatcttttctaactctctgcttacgaacattatgttgtttcttctttgaacggaaaatcattatgcatttttaggacatggccgagacacaacttggtaagttccttgatatatgctttatgtatagatgtttttagactttgttttgttgaacctaactcttttagttacacgttttttttgtagcgcggacatttacacggttttactgtttggatctcactctcctactcatgggggcacttgcgtactgcttcaagtgttctaaagcctcccgcacttagaagtctctattttaattctcttggaacgactttatgagtatgttataattaaactattttaatcctgaattctggttatggatctgtgtcattttggtcaaactcatcatgtctttttctccgatatccatccattcctaaccttgttactattatctatcagtctttttgataattaatacaaatgttgatatgtagagtacgacgaatcgtaaattgtaataattgtttcgttttgctgtaatttggctctatctttatacattagaagagataatcaaaaaagagataaaaataaagccaaaataaatgtgttttttttgcgctggtcaaagaaaaaaaaagaagtccaaatgacagttatacccctaataacgcaccatgagaactcagacgattaagggtgtaatagtaataacaagaagtgagtctccggtctgaaactaattaaggagacggcaagagaaacaagacatacgtttgctgtcccacgttgatcttgttgtttactctctctctctcctccatcggcgacgaccaccggagatcagcgtcaccgtaccaaaacatcatttaccttcttttagatttgttgttttttaatcagttgaatcggaataaaatatcgcatcagag

SEQ ID NO: 14029 - DNA, 3000 bp, Unknown
  misc_feature (1)..( 3000): cDNA_ID_1450508_gDNA_ID_2214693_Annot_ID_189443 3000 nt of promoter + ATG
caacatgataagcttgatgtatttatcatcgtgtggtgaagaataataaagtaaagaaaaaaagaatagatgaatctggagggacaaaataaagtaccaagtaataaattgagataaccaccgccaccgcacgaatacgtttgatattaaatgccaaaaaagggaccccgttttgatttttcttacacacaaaatatcgtcccgtcaaaaataatttactatttcatcattgcttccctgattcatttttttttttttggtatttatttgtctctcccccactttatttataagatttaacatcatatcttttccttaatattcatggcaatgatatatcattgtcattttaaaagtaagagtatatactatatagtgtgaacatcattctaccaaaaatgcatatgagaaacaatctttatttcaaatgatcaataaacataacaagtatttttgaatacggaaaactaatctctctattatacaaaaaataacattaaccaacatcaaacttagacatggttttaataaatcactgctttttggggatatataaaataaaaatacacagcattgattgaaaggaacacatgaatgaatgaaataagattttggaaatgatcgatatgtacgaaggtaaaaaaaacagtatacatttgtcgagtctgtgaccgtacacaaaatgtcaggctccataaccttatgcccgatagaaatgtatcattacactctctgattcacatatctgtctccatctcgagattcgtgtttcagatctaatacattaatgtctacgtacttttgttcgtacgtacgaattcgatacgaaacttctttcatgattcgtatcccaattcccaaccttacttacttttctccaaattattagtcattaacaactaaatcaccttataatcaaaactcatatggaaacaatgatgtggacctaatttcggttggaagatattttgtttatctggcttagattttgtcctttgatttagggaatcaaaagaaagtcataaacattaattttgcctgtaaaatcacacatttcagatttgttctcgtatgacctacaaataaagtatatgattacacaatcaatctttagattcaagaactttgtccctacttcattatattcagctaacatttctttttaattctctgtcgtgcgaaaggttgttgacaatataaatgatatatgtacttgtacgcgtaatgctgctaatacattttaatttgggcttcttctgggccttaatatttgggctttaaataagttatctctcccacttacgcatgtaaacacagctctgataattacgctgaggtggcattttttaattggctaatgcattaagagatgcgtggcgagaaatttcccctcctataaaaattgttgaagagtccggtcaactccgaaagtcttcaaatctctccgtcacgaatcgttctctcgtcgtcatcaaaatctgttagccgaatcaggtgagccctttgttatttttgttgtttatgatctggatctctgttgattgaggaaattggtagatctatggatttgttagatgagcgtgtgcgtagatctgaaaatgagatctcgatgttgaatctgaatcgcggctggtatacgattcccgatctggatacgattcaacatgcatagcatctgagaattttacatagaattttgcatgttcaatttttgtctcgctgatttgagaattttaggattgcttcatctaatttagttttgttgactcgatgctgaaattagttttctgcgtttgagagtttcgaatcttccatctcctgaaaatgcagctcaaactcatatagtatatgtcaaattgaaacaagttttttcaattacgtttctaagaactcttgctaaccagaacaggattgtaccaagtaatttacatgattaaacctgaatttgtactgatttgagcttacggataaatggaaacaatgtgatagtagtatataaatttgggtatacgtagttgccttgtgggaagcaaatcttttaccagaggtttctagtatcatatagaatgtatgaccatggaaaactaaacatgagcttaatggtgtttagatgtctcctattatttcatttgcttaataattctctgtttttttttatatatgatcgctcttttgcttccgatttcctaaaggccaaccattattctcagatagagaaaagaagaaagaatggtgggaagtggagctccacagagaggaagtgcagctgcaactgcaagcatgcgtaggaggaagccgaccagcggtgctggtggaggaggtgcctctggtggtgcagccggatccatgcttcagttctacaccgatgacgcacctggtctcaagatctcccccaatgttgttcttatcatgagcatcggtttcattgctttcgtcgctgtgcttcatgttatgggcaagctctactttgtcaaatgatgacaaagataatagttgaagacaatgccaccctaagtgactgctagtgatccaaatattatacagtggtttcaagttaatgttttaattttgtggtttattaccagagtataaacgatctttcacaattccagtttctttacattcaaattttcaatattcttcacacatattataggcatgagctttttatacatctcacaaatgacaatgagtactattatcacctttttaactttaaaaaaattcaattgttgatagcataacacactcatagtcaatggtcttgagtgaaataactaatctattaaccataactaatctataaaagtctctggcgtttattgaacaattaagaaatagatgggaaatgttggagataaactaaacttttcagggtcttagttgtcaatctgaaacggggcccgattaaattatactcgggtcattcttttgtccaccgggtttttcttcagaacttgagcgaaggaggtcgcgatattggagagatcttttctaatg

SEQ ID NO: 14030 - DNA, 3000 bp, Unknown; identical to SEQ ID NO: 14025
  misc_feature (1)..( 3000): cDNA_ID_2710842_gDNA_ID_2214693_Annot_ID_189442 3000 nt of promoter + ATG

SEQ ID NO: 14031 - DNA, 3000 bp, Unknown; identical to SEQ ID NO: 14024
  misc_feature (1)..( 3000): cDNA_ID_2710846_gDNA_ID_2214693_Annot_ID_189440 3000 nt of promoter + ATG

SEQ ID NO: 14032 - DNA, 3000 bp, Unknown
  misc_feature (1)..( 3000): cDNA_ID_3021440_gDNA_ID_2214693_Annot_ID_189436 3000 nt of promoter + ATG
catccaccaagcaaagaagaggccttcgcagatcacaactgttgtttgtggatcaatgtagccactgaagagtgcggttactgctgcaagtgccatacctccttcgacacatacagcatggcatacacatggttgggtccaaggaatctcttccctcacagcttcaatgttacgcccaaacagaacacacggacaaaagagaccagtcctgcctgcaaaatcatacaatagcattgattcaaagtgtcccttaggtgcatattgaactacaatggaaacgtttcgccaaagtaatagggaactcatgcacaagaacaagtgattaagaatcatctgtttggacagttacaaaacaaagaggaaaaacttacagctctctggatcttcagcacaaccaaaaatgccggtggtccagttttcatcagaaggaggttcataggtttcaggtagaacttgcatacattcatggcacttgcggacattcaactgtaaacaatttcaaaaacagaaaaagcagtagagtggttgtaatacatgacgccacactacaatgactaccatagtgagagcagaagaaattcagagaaagattctagtttcttgattccatcacacattcttataaggaagctcaaaggaacgtacactactagtactctaggcttattttaatagttgcttgatgagactagactaatcagtgttgatacataaaactttaaaacaggtagtggtgccaataagaaatcgctatatgttcatgtcacaacagatatgcactactagaatctatatcacatcacaaggatctaatgcacggagaaattcaagattgatcaaagaaatcaaatcaacagagactagttacactattcctcaatcaaacaggacaaaaatttcatctctaagacctcatcgagaggtggagatcgacacaaacaacaatcgggatcaacaagaactctaccaccacagattatcaaagccatcaaatcgattaaggtacagatctaaaggaattacgagatcggagttctctagaaacgtgcgttaagagtaatgcagggagggagaatctaacgtacctgaggaacatcaatgggctgattgagttcaccgggtgtgatatcttcttcgacaggagcctgctctttcctcaatttcacgtaacgcgaactggcgtttccatccgccatcgaaaccggtcaagagaaatataataatctctgaagatctttcaccaatgaggtcgccggaatccaagaactggaattttctctctaacaacaacgttttgtttcgatacgcgtgagtcgtcgtgactcgtctatatccatgtgagaaagtcttctcatgattaagaaaacaaatccgaaagatagacgccacgtcgtcgttttaccctctttaggcggtgtacattgtgatgaaaaagtaattagaagaaacttgggataacaacaacaaactaccagtcaatcaatagtgttcaatgatacaaatatttatggtaaaatcagacctctcttctttttcatagaaaaaataacacgaaaactacaagaagataatccatttcctgagattatgtggtttttgtaattcttatcaagacatccagtgctttggagccatcaattcacgatctccacccgaaccttgcaatgcgattttttgaatccgagaagagaattcctctgcctgttcaatgttcaaataaatgttgcaagttaaaacacaattgtagttattgtaacaatgcgtagaagacaaatttaaaaaacttactttctcatcaatccacattaaggaactgagttgattgttcaagattctgacaactacatcaagtggactcatcccatctatcgcttcaagttctccaccctgtttccacacaaacatgtttatgatgtatgttcccagcaaaagcaaacgaatagtatatgataagttactgcgttacctggtttgcatttacggattgtataatcgatctgatttgttcagtcatatgctccagttctctttctactagctcagactgttcatacctgggatgaaaaaacaaagtatattgtaagaaagcatagaatcaggatgggatgcgcatgatagagctaattcttctaagcatagatcaaatcatatttgtttccgtgtctgtgggttttctttcattattcatcagaataatatgaagcagaaaggtaatgatgcaaatagttctcacattgcatctctagttgatgctgcttcatcgtccagaagtgatttccgctcgtcattatatatacgctcagcctcttcctccatgctttgcaaagccttgtcaaccttaaacagaaacagagaatccaaatgattagcacagtggctttggtatttgacttgcccaatttcgaattaagcgaggtagaaggtagacaatctccatgtcagataaaaaaagagtgcgactgagagagatgatgaacaagagatatattgatttcccacagataaggcacacatgatttcccgctgcaagttacaatcagaaacctcatttaaagattaacatagagatgtaatagttttattgcatacctcttgctgatgagtctcgattaattccagctgtcgttccaagctagattgggtttcaaccacttttgcaacttcaatctgtttgttggtcaagtacacaaaaagaatgagctaattatagagtagaggcctgtatgagctaaacatacaaactcagaggtcagctcagaacaatgtctctgaagaaagattcataacggaaagaaattttaacagagactccataatatgacaaagttttttcacctcaagtctcaaaagaacatcacggttttgcaagatccgcttatcccactctgctattgcatttgcctgtttccggaatctccctgtgcgctcttgtagctcagtattccactccttgataatctacaaataaccagcatttttgaatattatatatataacatg

SEQ ID NO: 14033 - DNA, 3000 bp, Unknown; identical to SEQ ID NO: 14023
  misc_feature (1)..( 3000): cDNA_ID_3021443_gDNA_ID_2214693_Annot_ID_189434 3000 nt of promoter + ATG

SEQ ID NO: 14034 - DNA, 3000 bp, Unknown
  misc_feature (1)..( 3000): cDNA_ID_2710832_gDNA_ID_2214693_Annot_ID_136757 3000 nt of promoter + ATG
cggatctcatttcttgcatggagatgaaacttccgccggctggttgaatttcaacattggacaaatctccatcgccgttttcatactcaacaacaaatgaaatgtagtacggatttgctccagcgtccatacgaaaaactatgttagttcctcgatataaacatgccgcactgataataagaagaaaaaaaaacaatagtcaagattttcatattttttgaacatcttatatgtgattggtatatcatgtcaatagttgaataacaaaatactcaactaagaaaaatattttaactgaattaagttctttttgtagaaaaaaaaaatggtaacgtaatttatttgatttatcagagttttattttctttttacgcatcaacaatatccaacacaatttttctcaaatacatggaaacataacctcatggtttctcttcaatttctatattaagtaaataaataacttaattaagaaaaaaaactcaaaaccgggaatttttaaagtatatatatatatatatatatagttaccgtttgtagttgacacgtataacaccagcggatcgaagttgatcggcttggccaggtttggctaaggcacccatggctttgccgctaagatcaatgtggactggttcagaggcgcaaggaccaccagggcactcgtcggttatcgtcaccgttattggtgaccccgagcacgctggatgtccgatgcatacaacctaataaataaaaaagttaacatatactatattagttgatacaagtaaaatcttgttgtaaccatataatatatatacattccgatcttgcatgctacgtcaatttttttccaaaccaaatagttaatgttcattctatctgattaattaaatatgtcaaacatagtttaccatttttcaaagatataataactggtcattttattgaatatataattatatatactcaatttatcatgttttatgaacaagtttagctatataaaaaatattgtatcctcttagatgaacatactataataaattactaaataatacattacagaaattaaaaagcattaataaagctgatcaacaatacatatattacaatcgctcttgccctatatacattcatacgaacctgataacatgttccacatccttttccattgttgaacagcgaaggacctccggctgaaaccatcgcgtatagtggtggattagccaccgcggaaccgtacccacaagctcctcctacacacacatatatatatatatatatatacacacatttaagcatcatataaatgaatttactattctaagaatttatgtatatatattgttagaaatatgtaatattattacgtaccggtgctaccggcgccgaatggttcaccgtaccaagtaactccggcggttcccgatccagctacatctatagtctcattttggcaataacaaaattttagtgagactgcgaaaagagctaggagagcgaaatatctttgtgatgatgccattgatatatctagctatatactttgttttgtataaaccaagctttctatactcttttaaaggtatttgtgaatttgattcattagatgacaaagctttttagtttttataatggtttattttttgaacactctcacgacgcgttcaactttcaaggaaattgtatatttgcaatataagtgaatctttgtatctatggaggtcaaactctccaatcctcttacatgaaaggtaaatttgaagtgaaaagagtaaaactttagtctaaaagataaatgcattcaagattgtgttgaacaaattttggtaattgatttcaaagtaatttattaataacttgctataaaaacttttggtaaagaaatagcatcattttttggtcaacaaatacatatcttcttatataagattttaattatattggtatatttactaccattgacaattgactaaactttttggtaaaaaacaaatgtaaatactattaagctaatattaaacaaaatatgtaatgtctattatgaatcgatgaaatgtaacttacgagagcaatattcatgatagagacaacgatagataaaaatatacaaaaactaagaaatagaagtaaatagtgacaatttgccagcagtattcatgacaacataaattttatcaattttttttagaaacaatattatataactagttttattataatatcataaaagcccacaaaaataaaattattttcagaagcaatttaaaaatggtatattaattgctgtaatttttgaaagaataaattatatatataagaccaaaaacatgtatttaggctaaatagaggaaaagagtaaaactgtcgtttaatgatgctgccgagcgccgagccagtagtacatcgggataaagtgtagctccgaaaaatgcagcacaaagacgaaaaacccttattagtattttatttattcgtttgtagggaaaaaagttgtcattaaaataaaaatatacaaggcaaaagcccaacacgcctaaggcccaaacagaacgagagaccatcttctcttgtgccccacacacacacacgcggcgtctgattgtattcgtgatatcatcctctgctagttattgaattcaaaccaaagtccctttattagtatttaaccctctgcttccccagatttctgaccttgtatgcttcttcgtcgtgttggtacgcgttccctttctctttaacttccttgtgcaagttggtttagagcaagatattattagctttaggtgtgattcgatattcatgggtttcagaatgcatctcatatttgccactagtgtgaaaattaacaacttcccctttagggtttttgtcctcattcatcaattttggaaattctgatggaaattcgaccttggttagattttggaagctttaggctttattgatcagtaagattggaagctgttgtttcgcatcgattcaagcctcaaaatctgagtttgggagctatg

SEQ ID NO: 14035 - DNA, 3000 bp, Unknown
  misc_feature (1)..( 3000): cDNA_ID_2710820_gDNA_ID_2214693_Annot_ID_136760 3000 nt of promoter + ATG
ttttataaatatagaattaaataaaagaattgaagtttaattgttttatttttatttttgtcttcgtcttcttctttagttcgttggttgcagaagaagaatgctttttgtcacctactctcctttgtagtttctctactctttcttcttctctctctatctctgttctgtaatttttgtcgtgttgaaaaatggagagatacaagtgtagattttgcttcaagagcttcatcaatggaagagctttaggtggtcacatgagatctcacatgcttactctttctgcagaacgttgtgtaataactggtgaagcagaagaagaagtagaggaacggccgagtcaactctgtgacgacgacgacgataccgagtccgatgcttcttcttcttctggtgagtttgataatcaaaagatgaatcgtcttgatgatgaattggagtttgatttcgctgaagacgacgacgttgaaagtgaaaccgagtcgtccaggattaacccaactcggcgacgatctaaacgaactcggaaacttggatcgtttgatttcgactttgagaagctaacaacgagccaacccagtgagttagtggccgagccagagcatcacagctcagcttctgatacaacaacggaggaagatctcgccttttgtctcattatgctgtccagagacaaatggaagcaacagaagaagaagaagcaacgtgtagaagaagatgagacagatcatgacagtgaagattacaaatcaagcaagagcagagggagattcaagtgtgagacttgtggtaaagtgtttaaatcgtatcaagcattaggaggacacagagcaagccacaagaagaacaaggcatgcatgacgaaaacagagcaagttgaaacagagtacgttcttggagtaaaggagaagaaagttcatgaatgtccgatctgttttagggtttttacttcagggcaagcacttggaggtcataagagatctcacggaagtaacatcggagcaggaagaggattgtcagtaagtcaaattgtccaaatcgaagaagaagtatcagtgaaacagaggatgattgatcttaatcttcctgcacctaatgaagaagatgaaacttctttggtgtttgatgaatggtgaaaacgaaaggtaacaacagactttgcgtgattcgggttgtcaaaattattattctttgttttttggggtttgattacttttatgttaatgcaaaggaggctacttttacatgttctaacgccaagttgtttcagtactagcctcacgtcgtgttggcctaaatcagagagagcattcaattttctttgttttttttttgtttgttagacattttttaaggtattcgtaattgtatcaatttcttggtttctctggcaattttaggtattactgtttcaatttagaagctagagaagtaaagagtgcccacttcatctatctctttcgcctactattaggggcaaaaaaaagaaagtcaaatctaaaaagagaagagaaacaaactttattgttgctcttatagtttctatatcattttcactgtagaatcaaatttggcctttggctttggggtttaagctataccacctacttagaattattcttcacgtatactttattctttacttatgattggaaacatacccaatcactaataatgttcgtaatcaccactcaatactcaatagatatcaacaaagttgtgtgattcaaagttgttgtgattgttcaactagacttatcacgcaataatttggtgggtacttactaggattgtacagattaaaatcataaatccattttttgcttggtgtctaatcacttggatttagtgtttacaaaatattagttatgaatgtcttttttaataaaattgtgtcattcaagagtttattgggataaatttcaagagtttttactttttatttcatgtcaaaaagttgtatatttcatgcttttatttttgtcaaaacgtttaattttgattgacaatttttaattttataagatggacagaaacacgttttccaaaaacaacaaatggacataaacacattgggcttagcccatacaaagtggatacataaaatagaaaaaccaaattaaatgactagaaataaaaggactgggcccgagaacgtgaaagtaagcccaacttacatagaagtccaaaaacactaaaactttcatgttgttaatattttccagtttgcattattttacacttatacaaataacaacagatgcttgattctcttggaatcttcgaattctctgtctttaagactttacaaagatctcattaattaccactttaaccctgaaatctggtcacgggtctgggtcattttggtcacttttatctctaatcccacaaacgtaccggcaaattcttccttttttttctgctcgacggtctctcgaggacgcgactcacagtcacatcaacagcatgcattcagaaaaatcaaaaaacaaatgaattatatgataaataaaattagttgatcgaggaatcaacctaaattctatagtttataccttgacaaaaagatagcatgaaatcagcaaactcatgtaatataccaaacataccataaaaggtccggtcaaaaatagaaaaacacgaaaaagcattataactaaattcaaagttcaaacataagactcaaagagaagttattagagaccgaatatgccagaggatttgtatcttcttctttttttactatacaacaacaataatctaaccttattttttttcatctctttattacatgccatattcacaacacttcgtcacgctaaagctaagcatatccgctttcatattcctttacacaaccactatttatatatctctatatttaccctcttcttcttcttccaatttcgttataatatacttctttccctttttcaatcaaaagaaagaaaataaaccacacacatttttaaggtaaaaacttgagtttatattttg

SEQ ID NO: 14036 - DNA, 3000 bp, Unknown; identical to SEQ ID NO: 14028
  misc_feature (1)..( 3000): cDNA_ID_2705845_gDNA_ID_2214693_Annot_ID_136761 3000 nt of promoter + ATG

SEQ ID NO: 14037 - DNA, 3000 bp, Unknown
  misc_feature (1)..( 3000): cDNA_ID_2710816_gDNA_ID_2214693_Annot_ID_136762 3000 nt of promoter + ATG
ttttaattctcttggaacgactttatgagtatgttataattaaactattttaatcctgaattctggttatggatctgtgtcattttggtcaaactcatcatgtctttttctccgatatccatccattcctaaccttgttactattatctatcagtctttttgataattaatacaaatgttgatatgtagagtacgacgaatcgtaaattgtaataattgtttcgttttgctgtaatttggctctatctttatacattagaagagataatcaaaaaagagataaaaataaagccaaaataaatgtgttttttttgcgctggtcaaagaaaaaaaaagaagtccaaatgacagttatacccctaataacgcaccatgagaactcagacgattaagggtgtaatagtaataacaagaagtgagtctccggtctgaaactaattaaggagacggcaagagaaacaagacatacgtttgctgtcccacgttgatcttgttgtttactctctctctctcctccatcggcgacgaccaccggagatcagcgtcaccgtaccaaaacatcatttaccttcttttagatttgttgttttttaatcagttgaatcggaataaaatatcgcatcagagatgagtaacgagcttctcaccatcgatcctgtcgaccttcaattcccttgtaagccttattttttcctcaacttttcgatgattcgcatatgtcttagatccaacttcttccgaattagttgtaatgattttgtgatttctttctttggatgtgtagttgaattgaagaagcagatctcttgttctctctatttgggtaacaagaccgataattatgtcgccttcaaggttaatttcaatttttgaattggatatatattcttttgtgtatatcttaatgttttcaagggtcaattattttttaaaggttaagacgacgaatccaaagaagtactgcgttaggcctaatactggtgttgttcatcccagatcctcttctgaagttttaggtttgtctctctttcttttcgttattgatctccaatggataaaagatgaggaatttactagttttgggatcatggttttgattttttgttttgttttttaattagtgaccatgcaagctcaaaaggaagctcctgctgatctgcagtgtaaagataagttcttgcttcaatgtgtagtcgctagtcccggagccacccccaaggatgttacacatgagatggtattactatttattattatttaatttggaagctttggttacttaagacagtgttttatcgtgtaatgatgaacactgcagtttagcaaagaggcagggcatcgagttgaagagactaaattgagagttgtctatgttgctccaccacgaccaccatcaccggttcgagaaggatctgaagagggctcttcaccgagggcttctgtctctgataatgggaatgcttctgattttactgctgtaagtaacacacatctcttgctgagatatcatagattttttgtactagtgttgatttccttgcgttatctttaatttaggctccaagatttagcgcagacagggttgatgctcaggataattcatctgaggtaatttaataacccatctgacgcttcatgtaactgagctaacttggcatgataaagagtggatgagttttacactattacgctacctacattagtttaccattcaaccctatggaattctctttcttgtcaggttgtttagagcagtttagtcttttttttgttgaagttcagatcattccagttattagcaacttaatggctcttttattgtacactgcttgatgtgaaattctcaaacctattaggccaataatcttaactttttgtttattactgaagaattctgaataatcttaaccttgtttgaatgaagctttaactaatttctgaaaatactgtcgtccagaagaatattgtttcctctgctgtagttttagctttttactgattatgcatgcaattgaattggtctaagctgcaacatatctactagctattaattggcacattttagcattgaagttacgagacctgagtgatcattctattacaatgtaattttgacacctatcaatttgtatgatatcaggcaagagctctggtcacaaaactcaccgaggaaaagaactctgcggttcaactgaacaacaggcttcaacaagaattggtaagcaacttttaaactattccttccggtggttggtttaagaatcaaagaaactatttgtctgaaatgggaattgatgattaacactttcataactagttacccggttttaggagtagcggccattttcttgttatctgagttgttagatttaagctcaatgaagtctatgtaccctgcttttcttttttgttgcgtaacaaggacctctcggataacaaaagatttaatattgcaggaccagttgaggcgcgaaagcaagagaagtaagagtggtggaatccctttcatgtacgttcttctggtcggcctaatcggtttaatcctgggatacattatgaagaggacatgatcagatcccttcaacaaaatactccaaaagtctcaaagtgcttaaaaaagcattgaaaaggaaagaaatcaaattgtgtgaggaggacaatcttctcttctgccttatcgtcgtcatgcacctttggttaaaatctgaacttagtgcgttagaggatttgtattacggtttccataagacttagaattgtcacaaaatctcctttttcctctctcttattacaactttgtgtagtcttaaacacttttgtttcttcgtcttctctcatcttaactttttctctccatctctcatagaataaagggatgaaacatgtcgccttatcattgttttagtgaggatacaaagactctaaataagtcggaaggttctaactctacctggtacatcttcgtagctacaaaacaaaactcgccgagacattaaccaa

SEQ ID NO: 14038 - DNA, 3000 bp, Unknown
  misc_feature (1)..( 3000): cDNA_ID_2705859_gDNA_ID_2214694_Annot_ID_136766 3000 nt of promoter + ATG
catcttctggctttccttcaatcctatataaacatttcgataaagggttcttgagtttgagataaacaagaacaacaataaaataaaaagaaaagagcatatatgagtttaatggctggaggggaaacatgtaaataaagcaatcaaagaggttcgatgttatattgttaaaactatgtaccctgaaaatgaaacacgctctcctggtttagcaccagcaggtggtagcaacggctctaccaccgagtgatcttcacttgaagcacaaagaacctgcagcaaagaaatcaaaaacacagaaaatgagcaaatgtgagagtgtgaaatattttgatagctgatgagctggattgaggcagacagaagagagtattaccagtccttgtgacattacatctcttagctttccaggtttgacatttgtgatgagtgcaacgaggcggttcttcatcataataacgcaggaatcaagaaaccatagataagtaactttcaaccaaatttatagattgataaaccaaattttacgcctacaaacaatattagtaaattaagacataactataccgttagatcctcaggactgcagaactttgctaagccactaactacttgtctcactttatcctccccgacatctatttcttccaccagcaaactgcattgtcaatacataagaaaagtatttcaacaaattagcagatgttcagtgaaatctttaacagagccataaaagtgaaatgtttttgaccacaaacctatccgccgatgggtgcttccatgctttacgaattagaccaacctgaatgttaagcaaactgacactaagctctgcctctttcttagctggttctggttcagcaggcttcttcttttcctttttggcatccttctcttttgctgcatttttctttggttcctacacgaaaaaggacagaggagaacaccagattcaactaattaaagagactcacagtcattgaaatcaaacttaaaagttaaaataagtacctctggctcagttttctttgtgcccagctgcggctgcacatctggcttgtcaacaggctttacaccttctgcagctttttttgaattagaatttgtttccaccttaatggcaggttttggtacctacgtttagaataaatgaaaaagatcagaaaaccattttctcatcgcatgtaatacatctgaaaaaagtagcatgttattattgtttctcagtctaagaaaatgggtatgaaaagataattcacctcgaagctaaattctggtagcttcacaggtattggtgcaaataatgtcgacaactcttctttattctgtaaaataatacgcagcatatattcgtaaagcagacaatcacaaggaaagaaaaatgtgaaaggtgatgttcagagagtgcatatctagctatagtcactaacgccgttacgcgtacacataaagtagtcctccatggatttacaggctacctcggcgcaatcaagtaacaaaactttatgatgtcgaacttacctggatgtaattcacccatcttatgacatgtggtactttctccttgtctgaatctgagaggccaagctgggaacagcaagtcaaacagataacagttagtatttaatacctttagtcatcagtttatgaaaatttgatcgtagcatctttatcaagtaacataaaattacttatacaggaacgaaaaataagtagactacggaatatagagaagtggtaccactgaagaatgcagagctgaaaacacagcaacatcagctgccgatggcgtcaatccgtttcccaagagcactgacttggtagctaactctaaattcaacttttcaagagctgaaaaccaatcctttgaatctgaagagaaaccttccgcaaaatctagccacttcaaaacctgaaataggtttttactctttaaaatgtgaaacaatgacgcattatgcaaacgaaagccaacgaatcctcatcatttagcattacacagaactcaaacatactaattcattttttttctaacgtggtagcaacgagaagggaactcaataaattcccagtaagagtttggcgtttatgtctataggaaccaaattcaagaagaaacgacttacatcgttgttttgtgcagatacttcctttccagatgccttcaatacattagaataaagtgtcttgatatcactttcacccgctccgcccacaaaaggttcctaaacaaatgaatcaaatcaatttcagaaacagaaccaataaatcatcacaatgtaaaatcataaaagccaatttctaaagttttttcctttttcatgaccagcttgatgcataagcgtaaacactgataagtccaaaacataaactttctaattgatttcagtacccaatcagataatgttcgagttttctccactaactaattcaaaaaatgatcatacacatactcagctaccaagcaaaacctcacaaaaaagcagaagcttttgagatgtcatcttcttcaatacttacaggatccaaagagaagtgtttgcagagagctgaaagaatcatctgcttcgcctttgaatccatcgtcaacttcttctctttctctattttcgaaattttgttcttctctttggggctcttcgctgtaagaaaacacactgcaatttcttcgatagggtttttgcttgatgtaactaacggtcctaacggacttccaactaacggcgttatctccatctataatgggcctagatatattagcagcccattaatatgttcttactatgggctttaccaccgaaagcaatcattaataaaataaaataaatgaattaacttctcagattcttcaaagacctagagtgtcttcgtcttcgacgacggcaaattcgtggaagctgtttcatcgattccggcttcactgaagcggcgtcgctcgacgtttattattccgacgactaggcctttgaggcagtttctgattaacttcaggcgataatg

SEQ ID NO: 14039 - DNA, 3000 bp, Unknown
  misc_feature (1)..( 3000): cDNA_ID_2785798_gDNA_ID_2214694_Annot_ID_136767 3000 nt of promoter + ATG
ataccaggctgaatcagagcagttcgtcttcggatagaaacgtcgtactcttcatcatctccatcggaatacatggtttcatctttctcaattctatttccgcagaaaccttgctgggttctgaaatggcgatcgccgacggtttcgagctcccggatcttagtacctgaatctcccacacggaaacgcaaagattcatcttcaacgtggaatacgaaccgaggatcgatactgtcgttaacggacatttgcttttccgccggaaaattcagaaggcgatcgatagagactggaagagcacagagagagagtttaaaacgacgtcgtcgtaagtgggacatgagtagcacgcgcgtcgtgatggttaatgattatgaaaccgtatcatttacctataagcttttggtgggtccgatttacatggactcataaagtgatatcgccacgtagacataacatataggtttttatatttatctgaattaccttaaaaacaactaatatcaagaaccgggttacattcagaatttctcgaccacaattcgtttacggtttagagaacatacagtacaatgccattacagattctccattttgttctacattaaagagggatcaggtaaactcaaaaaaaccaaaactatagtgagtaggatcacagtgtagtaaccggtttagctgggcaaatgaaccaagtttcggtttgataaagatgtcctcatttcacagttcagtccctgaggggtttcattcccagtgatgctctcagtctattcatctctgcaatttcaggatttggatgatcggttccatcttccttcatcttctccttcttttctttctttttcttaggttcttcccgatcccgcacatcatcagtttcatgtctcttacgatccctactcctgcttctacttctgcgccttgccctgtctcttctgtctcgttctctatctctgcctctttccctgtccctatctcgctctctatagtgatccctgtctctctccctatcccggtctcgaccatgcccacgttctctttcatagtctctgtcatgatctcgatccatatcatagtctctgtcataatcacgatccctgccaatcacagaaccatggtcaaattataattcatgaaacaatgagctcaagtctcaacatcaatcataatgaaaatctgtaacaaaaagaaaacattgattgagctaaaaactagatgggaagtgctctcatgattaactgatctttttcaaagtaacacaatgacaactaccatatactgtatcagggtaaggattgtaataatgtctgatccataatacttctctctgaacactgtcagtacagagaaacctggaaggatctctacaaatttaatttcggaagctgtatccaaccgctgatggcttgagatgccatagtggaaacagacactcaaaagacagagtactagacatgatgcaagagcattagctagatcaaacagcttccacaatcacaaagaatttttttttgaaaaatgttaactagcatagaaatgtatctagtaaaggtcacggattcagatacctgtgtctatgactgtcgcgtctcctgtctctgtctctttctctttctctttcaggactcttacggcgctgatcctgtaaaagaggaggaagatggtatcatcttagagctgctagatagaaacagaaaacagatcacataaaaactattgcagaatgaaagcactgaccatctcatcttcagatccatcagcaatcccttcattctcctccttttcttcctcttcttcaaagtcgtcttccaaaacacttttccttggctctaataaaccattctgttcaagcgtccacctatcatcagagtgaaaaattaaccatcttaaaatactgcagaaaccaaaaactaattattcagcttcagacaaatgcaaaagaagaaaccttttcttcaaacgtggcattgcaatatcacaagaataatccttggttagaagttcctcaatgacttcgtccacatgtgtcagcgaaaactctattccaaaccaaagaaataaatctagttagtgaacaaatcaatcaaaagttaaacacaacggatccatcgaaagaaaatgaaacttactcccatcagataacttttgtctcactttccggtagtcattgtagagaggttcgaggtagcgatagacatcaacatcagtcccagtgagacgcagatagaacgcaccaagaatacgaacatatctgcagaaaccaaaagagtaaatatttcagtaattcaagaacaaatatctgcagaaactaagagagtagattatctaagaccaatagatttgagagacattccatacctgtatacttgagaaacaactacgacaaggctaatagcagtatccaatctagattacgcagaaataagcttttggttagaaatcttacttgtagtcatcattttttatgaactccacgacaatttccttctcaggctggatttgaagcatcttcaatatgaggcaaaggaacggagtaggcttgcggctaccaccaaaggtaccacctagatggtcgagctccatagctttgtccaccaatgtctccgccgtgagaccaaagcactgctccttccaaaaggtgtgctgataaatcttcgttcgcacaatcttctctaccagattctgcggattcgttcctcttatattctttgccaacggatctgttctgtttgccattatcgcctgaagttaatcagaaactgcctcaaaggcctagtcgtcggaataataaacgtcgagcgacgccgcttcagtgaagccggaatcgatgaaacagcttccacgaatttgccgtcgtcgaagacgaagacactctaggtctttgaagaatctgagaagttaattcatttattttattttattaatgattgctttcggtggtaaagcccatagtaagaacatattaatgggctgctaatatatctaggcccattatag

SEQ ID NO: 14040 - DNA, 3000 bp, Unknown
  misc_feature (1)..( 3000): cDNA_ID_2705869_gDNA_ID_2214694_Annot_ID_136771 3000 nt of promoter + ATG
gatttttttgatgaataaaattttgcattcattcaaaaaaaaataaaaaaaaaaaataaaaccgaaaaccctaaaatccgaaaacaccaagaaacgacaccactccctatgaactggactctagtaaccaataaaacgacagaggaaagagcgttttggtagacgacccaagtgagataaaaaggcccaactgaatatcgttaagggccaagaataactgcaaaagacgaaaaagaatctgttcactctctctctctctggctcgctcgctctcaatctttccgatttggttgggttcttctccaactccaagtctctgcgaaaatggcggcttcggtgcaacctgcatgcttagacctccacttctccggaaagcatccaccgcttcttaaacacaacgctattatcgtccgctgcgtttcttctccaaatgtaattcccgaagctgactccatctctggtccgcctgatatcatcaatacgaaccgtgaccagcgcaaagtggttcgtatcgcttgggagaagttggttcgatggtctcgttctttgcgcgctaaagctaaaaccgatgttcttgagcgtactcgcaaggttttattatcttcactttctttcttaatttcgtttgcgttttggagaatttgaaagaatctgggggtttttaggttgttgttcttggtggaggttcgtttggtactgcaatggctgctcatgtagctagaaggaaagagggattagaggttaatatgcttgttcgtgactcttttgtttgtcaatctatcaacgagaaccaccataattggtactttatagcgtttgatttttatccaaacacaattcataattcttgaagacttcgcagtgataaggttgattctgttgccagtaagtattttcctgagcacaagttacctgagaatgtgattgctacaactgatgcgaaagctgcattgcttgatgctgattactgccttcatgccgtgcctgtgcaggtttaagcacattgagtatttgtttttagttttgttgatttgtttctatgttctgctgattaatgtggggttgttgttgcagtttagctcttcgtttctagagggaattgccgattatgtcgatccaggattgccttttatatctcttagcaaaggtctggagcttaatactcttaggatgatgtctcagatcattcccattgcgcttaagaatccccggcaaccttttgttgctctttctggcccgtcatttgctctggagctgatgaacaatttaccaactggtttgtttgactcttgttcttcttttgtttaaatcgaatagcattatagttttctattgctgaatgatgagaaatgttttcttttggtatgttattttgcttgcagcaatggtggttgcctcaaaagataagaaattggccaatgctgttcagcagcttcttgcttctagttacttgagaataaatacttccaggtacaacatttcaaaacaagactccattggtttcaatgatttctggatgcatttccctgctgggctatgataatatccatttgcctacctgcttgagagtttattcatgtcttgtatatgtgtggtgttagtgactgagctctaatggtcaacttcttaattcctcgagggagttttgtgcactcagcttgtaacctctgatcatttcagtgatgttacaggcgtggaaatcgccggtgccctgaagaatgttctagcaatagctgcaggaattgttgatggaatgaatctcggtaacaactctatggcagctcttgtgtcccaaggttgttcagagataagatggttagccacaaaggtagtaagtttaatttgtgtctataattgcttcatagaaagtggttttttcggtccatgcaactcactacaatgattactaaatcctgtgtttattgcatttctgcgtttttctgtcttgtatgtgagaagatgggtgcaaagccaacaaccattactggtttatcaggaactggggacataatgcttacgtgttttgtaaatctttcaagaaaccgaacagttggagtcaggttagggtcaggggagacactagatgacatactaacctctatgaatcaggtgtgtttctcattggtgtcgctcttcatatggtaaaacaaaaaggattggttgaatctgaaacccatgaatcaaataacaattgctgcgcaggttgcagaaggtgtagcaacagccggggcagtgatagcattagcacagaaatacaatgtgaaactgccggttttgacagccgtagctaagataatagataatgaactgaccccgactaaggctgttcttgagctcatgaaccttcctcaggttgattataggtttcacagattcccatttcgactcggctactcttctggtatttttatttgactctgttctgtataattctggttttgcagattgaagaagtatgaggtagaacaatcgttttgaggaccacatattcaaagagatggctttaaggcggcaagagctttgcattcgtttagagatagctaacgatagagatgattcgaagtgagttttgtaatcgatttttaggcctgaatctcatgaatgtgaattgttcataaacattttacaaaatctctgtaaatttttctcttacatctataaaaatgatgtttcagtatcttgtttagagtggagtgtggaatttggaataggcttcgtatgatcttcagactttcggagccatggatataagtatgggtgtttcaaattcgggtacacccaaccggtttaatccaaacttaaaccgtaaaaagccgatcaaaaaaataaacaatgcgcatgggctttgaagttgagaggcccacaatttttgaaggctcagacgtaaacggtgacgtataggaggcaaaacccttgcaattgcagtgtcgtcgtcgttgagtagtcgaagacggagggaaagaaacagagaacttgtttgtttcgtcgaagaataagatg

SEQ ID NO: 14041 - DNA, 3000 bp, Unknown
  misc_feature (1)..( 3000): cDNA_ID_2705877_gDNA_ID_2214694_Annot_ID_136774 3000 nt of promoter + ATG
gacccggaaggtgaagggatcgtcgttaaggcgttggacttgtttcttggccgggcaattgtatagcttttggtgggtgcacctatagtacgccctgcaaaatagaaatttaataatcttacatctatatgataatcaagtagtagctaataactttgttttttaaagtacgtagttaatgattgaattagattaaaggtatttgataacgaaatctgagaaagatatgtacttgtaacatcgaagtttcaacttccagctgaactttaataataggattatttggtcattctatcactaataaacttggtggttaagaatcaaaagagactgattacaacatatgatgtgatgggaaaatatgtaattaactaaaggaacttcttgtgaccttatatatgaaaagatattattatgaccttattctacattactaatctagaatctttgacttgttctggacgaaaagcttattttcgtcttccaagttccaactaaacttgggttatattaatctcagatatagtataaatacttatttggtaactaaagttaaattacctaggaaacctagagccaagaatttctttttgaccgtatttacgccaagtatggttatcgtcgggtggcagatctgtgttccccgtccttagcgccgccaccaacaccgtttgttcttctccttcgtccttcctaaataacgtactcatttaatgattaaattttaatcgtagtatcgtacatacgtcatataaagtacataccaagttcaattattggtttgcaaacaaaaaaaaaaagtttgaatgtgaagtggacttgaggtggttttccacttttggctaacctagtcacatgtaactggttcaacccacctctcccctttatggagttaaaaaaaatgtagaccaaaaggcaaaagaaacatgaaagtggactaatcaatgatcatcgatttaaacctagtgagttttaaaaaggtttaaatatttgtatatgtatgttcttgctttaattaatttttggtaaagattagggatacaaatatatttaccacatttttatgttctaatttgattatgttatcattcataatatttatcaaaatctgatgttttctgaaaaaatatttttaaaaagatgtaggtacatcatgataaaaaaatgtatctaattaggaaaataaaatttgcaaaaaagtttttaaaatttcgtgataattgaacaaaaactatgttcagcccaaatatttatatcaatttatgattattattattccgtcatttcattattcatctcatacacatccattaattttgtttatacgttacgtacgttaccaattttgttatatgcactttgttccaagaaattatttgttacatgtatagcacgaattatacctttgttataaatttccagataaaataatacttgtatattttaccttctccgctgccttggcgtggaggaaccgctagcgccggatctttctactgcagccgtcaaattcctttctccaccaccatcaacggccatgagctgcgtctggaacatggcctccgttccttgagacgacgtggacccgccataccttaaccaatactcttgcatcagacccggttccatctgcatcaacatctggtttgcaacggacacaatcaccggtttggttttgtttaacgcagtctcggagttcttaatctctagtaacatcttcagccgctcgtttgcatcactgaatgtctttacgatctcgtcaagagatgtcaatagagattccggtggcttttccggtaagctggactcgagcgatttaactagtttcattccgtggaagatcattgacattacctcttccatctggtaacttatttttttgtacgagtacatgtttttaaaatttatgcacacatacatatatatagacgaagagatacgtacacgacggttagtcttgttttccaacagtttgcttcgatgttggttccaactctattgaaattttgaatatgcagattattcaaacgttgtaattatctacttaaagcgacataatatcattacctatactgttattttttggggctgggttaagtaaaatggaattttctttgtcgacaggtgaaatatgtccaagaatcaacaaatatttactaaataacgttacaaatactcgtttagcaaaatccaaaccaaagatctaactaatgataacccattgacccggtcggagatacttaggatgggcgagttcgttttttgttataaacacggcagaggaactggtaataacattgaccaagtcatggtcttctatatatgttttgagacttaattaataatgattatttatttctttcaaatttcaacattacaagattttcttagaagtctagacgaagacttaagattttcaatgctgagactgttgaatttttttttcttaaagtggagacacataagctaagaaatttctaaggcgttgaagcaagtttggtaagtttcttgacaagattcctaaatagaaatttactttggatccgaattatgtcttgttatagttacttatagccccttgcaaattggaataattaacggggataatttgcacaagaaaatcattggacaagaatataagcccacaaaattatacggcccacatactatgaattcggcccaaaataaaaatgtcaacagatccaaactctacgacgtttttataagtaaataaaacaacacgaattgtaataagcaaacacgaaaacggcaatggagtaagtccgttcaggtcgatcataataattccgacgaattagaaagcgaaaaaacaaatctacgaaattctcctctttccgaagatgcagattgaagaagaaggagaagaatcataagaataaagctttgaattatcccgttttgctccaccttcgttcttctgattccatatagatccgtttaatagcagcaacgttgttcaattgagaaggtggaaacatg

SEQ ID NO: 14042 - DNA, 3000 bp, Unknown
  misc_feature (1)..( 3000): cDNA_ID_3021476_gDNA_ID_2214694_Annot_ID_189476 3000 nt of promoter + ATG
aaaaattatcttcaatgaagactccgtcagatctccaacaaccttccgctccatagtaataatctctttctttaggttttcgtttctattggttagcaaatttacttattataaatagggtaaatgttgcctcccgggagaatatgttaacaaatctacgtatgaacatttagttattaagtaaaagtaaaatcaaaattttagctacaaattgagagattttgttttcccattctctaacatttaccggaaaaataaaaacagttactaatatttgagctaaacgaccgccacaaagggtgattccaacttatataaagaaggtcttgttgataaacgactaagatgtaaactgattcgcgtaagattaatatcaacggtcaaaatttaaaatctagtgttagaggtcaaccaactttgactgtgttagacaatccagctggcatttactattaacactgataaataatctcacacgtgtcaaatttccattcgttgattaaacagaagacatctaatcataaataggagaaaataaattgaggatgaagcaaaccaatcaatgattattaaaacttgattgtccttgttgctaactgctgaataatgattcttgggttctacatcaagaaaatgaaaatttgttggaattttaccttgttgattataaaattggatttttacgtttcgaataaacatcatactttacctagcaaacacacccttatttcacgaatcctcaaaacttaagattaaatgcctccaattccaaagcattaaatcgttggaagttaagagacttaaacacaatatttttcgtacatttaattttttgttaatgatatagctcgttaaacaccttgcctgaattccatgatttatattatcattagtaaatatacaaaaaaaaaaaaaaagattctaagaagaaccattattcgttaactagattaatgtcaacattccaacacagccatcgatgatgatgatgattcatcaagaagaagaagagatgccctcaaaacattcaatcgtcattagaagatccaaataaataaatcaagacaacttgcttgaattccattattcatattatcattagtacatatgcaaacatgcatgatttaatttatgataacttattatcagtatgcattattcattattcataacaatatcaaattaagaattcacaaccacatacagatgataaatcatgaaggaacataaccaagtatctcaaattccatgagagtaagtgacaattgaagaaatccggtttcctcaggaccagagaggttaacttcacggtaaaaatcaacccctttaaccgttggcaacaatgtgactcttctcccaacgaaataggtaccagttgaattcgttttgaaaacatctacatataaagattctacgggaaaattctgatcttgaaaaagttgtaattcttcatcaaactcaggatctccttcggttgctacaacctttgtttcatgtttctcgttttcatttgtccaagcttcaaccttgtattgatatgggcgaccattggtgactccgattgtaccaaagatattcacaagtagcttcacatcttcacctgtgattattatctttttccctcgcatttttcttcttttcaaataataaatctgagtagaataatatgtgtgattgatatgtcaacttaactacacctcaacaattgtttttgtggttttttctctcactaattcacgaaattcgacattttctaaatatatttatgttaaaatgcacgtgtttcatgttgtaattctttgtttataaacaagaaaaaatagatgctaaacaatgagaaataaatgttgtttgaataataaaaaaaattgaatgtttcttaataccatttcaaatactaaaaacaatgaaatatcatatttagagatttatttctatataatatctattttggtcatattcttagttatgatatttgactactattcaaaaacctaaccccaatatagtcaaaactatataaaaatgcagtaagatattaaatgctgttgaacaaaattcaatatcttatggcttgaaagtaaactagtaagatagctacaaaatgcatggtaagaagttaggataatcatattttaagaaacgaaaataaaatacctaatataagcttcgacacatacagctctttcttactggaaatcttgcatattccgaacatacatttttattttaggacggatatacctatagattcatttgcaagattgatttcctattgaaaaaaaacatgttgtggattcaaatatttgtcgctttttgttcattctcttttgtaatttcctaaacgagaggtcactaatccaaaaatcgttagcaattaactagaacatcttccatggttaacaccacctatcaattatttattttcttcaatgaaactttatgaaactctttccattttattaatttatatattaaagtttttgttcacactaaatttattgactcaatatatatctactttataactaaatactaattatttcatttactttttattttattaataatctacatatatatatatattgtttgtcttgtttattgtttttgcggtttgtatatttatatctcatattcatacaattttttagtatatatgcttaattaattaagatcgaattgtggcttgtttattatttttgcggtttatttatatgcatctcatattattacttttttaaattaatcgattaaaatttattaacttacgtaacatatttgatattgcataaattaaaaatcatatgtatataattctctttagtttaaattttaaaatgaataaagaaaaaaacaataaaatttgaaaactgaaaaccttttaaaacgaaaaagaatggctaagatgatgaatcggtctcgtacgggaaacacctacgttttggtttagtccggtttggttgaattcccagagactttgcttgaattgggtcccca

SEQ ID NO: 14043 - DNA, 3000 bp, Unknown
  misc_feature (1)..( 3000): cDNA_ID_2705885_gDNA_ID_2214694_Annot_ID_189473 3000 nt of promoter + ATG
gtcatgtcttttaattttagagtcccttcttacattgaacgaccttttggctacatatgtagacacaatcaatagttgatcataaacaactttatatatgtatatatatatatatatatatatagatatttatatatttataactttataagacaaagagtgggttcagattagtactcacagaactcaaacaataatagaaccgatcaactagccaaaacagaaaagtgttcctagttgaaatcaaatgacacctagaaataaaacaaatcactaggttacaaaaaaaacggtttagtacaaattaaaacttgatagtttgagatctgagtagtgatcgctaaatgggatttagttctaaatacattaaagattaaaaaaagtagaggctgccgtaaaattagtggggactaattaagaaataaaataaagtaataatgaccataattataatttatataactatgagttggatctagttgaattattgacgttttcaacgtacttttattggtgttcaactttttctgtattttaaaaaaataatatgaaattagattcgtacgtagcaaggactgtctcttgcgaattgatgaaataattatacttgagacaaagaattctctgattgggtatagcacgaaataagattcaacttacacatttaagaactatatgttttgcatataaaaaattaaaccaaattttaaatttcgtgacagataatgatccagagtagtcttagcgataagtagcaatccgttaatcgaggcctcttggttaattattttttaagacaactaagcttaagattagattaagcacaaaatgatgtatttataataaacattgttattattctaataaccatttgtcatttgtcaatagcagttccccaatcatcgttgacctttctctcatcatctccgaaagaaagcaataatttaacatttgaatataactagtgtccatattttgacaatctctaaatgattaatcagttgggatttatagataaatgccgaatttggatgagtaaacgaagaagtaaaacaaagctgtttggacatatttattggttcaaaccgagaaataacacattcatctttttacgatcgaagtcaactactacaacaacaaaaatatcgttaattagttcgtacacaaattatatttcataaatatttcatcgttctaccattatactactcaccgttcattattattgttggtataatctgtttcgttaagttgtatgataaattaaaactagtaaagccgttttgtttttgtttatagttgaaaaagtaagcgtaatataatctgtaatttctagagaattaataagcaaacaaatggatttgactcttatggattttttttatttatttgcgagtggatgtacaatgtggactgaaattattgtgactccgaggagtactcagtggcacctgccccctcattgccgtcacaatatcccaatactaaacaaatgttacttttttaaaaaatattgttttttttggtaggaaaaaagatgtattgttttatgcgtcacagaaataaaaataataattaaccaactcaaaattactcattttaatgaaacgaagatatttttcattcaacggatcaaaaattcaaaatgagtcatttcttacgatcataggttttaatttatttttggtattaaatgagatgactcacacaaatatttcaatagttacacgagtattaattaaagtagtgacagtttcaacaaattttaatatttttgttcagttcaaaattcatagatttttaataaaatcagtactgccaaagtgatcagggccaagcaagcaataggctgacataacctagagttgtgacttgtgattgtattggttcttttaccaaatgatccaaaacattgattatctacttaagtacttttccggcgtttttaatggcagttctacaaaacataaagataaaattaaataacgttggcttagtataatgagattaatcttgattactagttttagatccgaactaagcggtctcaccacgattatctatatatatatatatatatatatatatatatatatgcttatagcttttagttttagtagctagtctatccatgacaaaattcatcaatgagaatattcattaggatccttctgcttccgtaaatgcacgagaatacacacgtataaatagtttcttcttaggaaaaatactactatatagcaaaacatatacatttatatcttcaaaataaaattacgagattgataaaactctaaatattattctgtcttaagactatttgacccaattactcttaaaatatattagtggttggtctgatatagaatatatcttgtcaacatttatcctctttaattatcaaaaaaaaaaaacagttctccttattttggttctttcccttgaaagtgaatttcgtggtactgaaaaataatttgaatgtcataaaatattagttatataactctttctccaagataaaaacaaaataatttttcgcaaaaaacatttaaaaatctaaccaagttgttggatcgttttcatgagcattaattaattaaataaatccgcgaagaaaggagaaaaaaaatacccaccaagccatcaaacgtgttacggagatgggtgatgtcattccacatcatcaatgtgacataagcaaagctcttgcaagccaatgggtgaatagataagttataactttccaattataacctcaaatccatgactaaattcataactacgttggttactttccctttataccctttcatgttcattataatgcataagcatctctctctctttcctaagcatcttcctttgatttttttctgatcaagagaaaaaatctattttcttctctttccactatattacaacatttcttcattctcaaatcatcatactaaaaacctaaaaaaagttacatattcattgtatctttgtgagaaaaaaatg

SEQ ID NO: 14044 - DNA, 3000 bp, Unknown; identical to SEQ ID NO: 14041
  misc_feature (1)..( 3000): cDNA_ID_2995201_gDNA_ID_2214694_Annot_ID_189471 3000 nt of promoter + ATG

SEQ ID NO: 14045 - DNA, 3000 bp, Unknown
  misc_feature (1)..( 3000): cDNA_ID_3021484_gDNA_ID_2214694_Annot_ID_189469 3000 nt of promoter + ATG
cttgatgaatgagagtaaatgtcctttaagataaggcttgttaattgggtgcttcgagaataaaatattcaattatctgcttaaaaatttgttgctgggctgggacagcaatataatgttcaatgatctgcatattaaaggaggaacaaaaacgtactttcaaggcttgtctaatgatgtttctgaggttgagaatctcagttatctgctaaaattctatcttgtcgggctggggacatgataattcaacattctgcttaatgatgcttttattaaggcttcttgatagtctgcaaaatactctatatcttgatgggctgtgaaaccatgatgatgatcaatgttctggtggagtaaaaatgacatctagtaagacttctctaatgatgtctgagcagttcaagtgtctgctctgctatattgtgcatattgatgggataaagaattcttttaacgatgcttctcgataggaagattcaatagtctgcaataactctataatttgatgagctgggacatcatgatgatggtcaatgttctgcttgaggaaaaatgttctttattcaagtttctcttgttgatgttctagtatctgcttaaacatcatgacaaaaattcaatattctgcaaaagctccatattatgattgcttctcgacaggaaaattcaatagtctgcaaaatctcatatcgtgatggactgggacaatcatgttgacgatcaatattctgcttgaggtaaaatactattgctgagctggggcagcattgatacaatattcaatactctgcttgatgaatcagagtaaatgtcctttaagataaggcttgttaattggatgtttggagcatgaaatatatctgcatattaaaggaggaacaatgtcctttcataaggcttctctatggttgcttgactgaggcagcaaaaaaacatccaattaaaggaagaacaaatgccctttttataagaggcttgtttatgtgttgagactagagttgagatatgagatatttcaggtcatttgtctgcttagagagatgcattgctaggacatcatgagaagatcaatattctgcttgaggtaaaaaaatatcctctattcaagcttctctaataatgtatgactgagaagtttgcttaaacatcatgacaaaaatttcatattctgcatattgctaaagggaaaatgtcctgcaatataatactcaattgactgcactgatggaggagaataaccttttaataaggcttcttgaataacagattgaagagttcgagtgtctgcaataaaagctatagatcatcttgttgggatgacaacatgattcaacattcaacgatgtcccgatttctgaatttcaagtttctgcttgttgatgggactataaaatggtgtcctaagattgaaaaattcaagtttctgcttaaacgacagttgcgttgggacgacgttataaaatacttgaaatgatatccaataatctctgagattcaagtttctctgctaagaaaaaagaagaattcaagtttctgcatatattatcttgtgttgtactggggcaacatgatatattcaatcttctgcttagaccagcctttgaaaaagcttgtcaaattatataaaatcttcttgaggaaagatcttaggacagatttagagtattcaatcctctgcattcatcttgctgagacttgatgaagaaagtactcaatcctctgcgtctctaccgtctttgcaaggaggtaagtgtttcatctcaactatattgcactcgtctatgcagtgcagtgttatattttgacattggtctagtagcaattgggaagttcatttttcttctacttatgtacttctcttacaaattaatcactgtgttctaactacattttttggtgattgcttcgtaacagggaagtattgcagaaatccagttacgtgactgttgaactttctcagaggtgttctctttcagatccttaactctcaggtttcaggttgctctcttactctttcgcatcttgttgagcaaaatttcgtaaataagaagcataaattttatcagaggaggataggagctacatgtctactatttttagttttttagccaatgggagagctccacttcataccccacttttaccaatcgtgtgattccacactcagtctcacccatgtcgcgttgagcgcgtgtctacgatttctaaagggggttaatccacaaaaatcatgcctttttggatccacgcacctcattctcaaaaacccatcgcgtgtcttattttttttggttttcttctctaaaccaaagtaaaccgaaccgagatcaatttgaatttcaaaaccaatgtaaacccataaaacccatcgctgtgaaaacaaaaagctcggccactgtaaccacaaaaatggagacgacacaacttcgaagagaaatcaactcgaaatagccaagagaatgttcgaaaccccccccccccccctcaaatccgatgcttcctttgattccagcctccaaaagcccatctgctcaaatcttcatttcgaggacgaggactcgaggagtattacaaggtacctctatagaatcaatggcttccatggattttgaaactttacttctaataaacaccattgtaatgtctttttggttgtgtaaggaacaaaggatagtgaaagctgaagagtgggattcgtttatggagtttcagagtttttttgactaagtggcctctgtttttgattcttcagtggtcaattttgtgatgggatttgattgaaattgtttttgatgctcactctttatcttagttatgatgcattttgtgattcctagacatgttaacaaaatagtattgagcctttgaacttttgaaacagagcctgactatatatcattgaagctttgtcttttacgccttttaaaaggaagttggcttttggggtgtacatcaacacttaatgtttggtatcattgttgagaccttgaggacaagatg

SEQ ID NO: 14046 - DNA, 3000 bp, Unknown; identical to SEQ ID NO: 14039
  misc_feature (1)..( 3000): cDNA_ID_2785798_gDNA_ID_2214694_Annot_ID_189464 3000 nt of promoter + ATG

SEQ ID NO: 14047 - DNA, 3000 bp, Unknown; identical to SEQ ID NO: 14038
  misc_feature (1)..( 3000): cDNA_ID_1448161_gDNA_ID_2214694_Annot_ID_189463 3000 nt of promoter + ATG

SEQ ID NO: 14048 - DNA, 3000 bp, Unknown; identical to SEQ ID NO: 14043
  misc_feature (1)..( 3000): cDNA_ID_2705885_gDNA_ID_2214694_Annot_ID_136776 3000 nt of promoter + ATG

SEQ ID NO: 14049 - DNA, 3000 bp, Unknown
  misc_feature (1)..( 3000): cDNA_ID_3021559_gDNA_ID_2214695_Annot_ID_136789 3000 nt of promoter + ATG
aaacagaagttaattatatgattattttaacattatgttacattcattatatatacattattaaaataacacaaaaaaaaacgttaaaaatttgtcttaacaaaaattcattacatgctattaattttcatagatagtggatacatacgctatagtgacactgacatcttaaacaaaaatcaaatgtattaatttgtcttaactgtgttaagaaaattggacattgaaatattattcggtttgagttgaaattggcatttgacggatccgtggtttgcatggtgtaccaagcaagaatcgttggttaaaagaaaagaacacacattaattatcatgtttatgcgtaattgatatgtaagttaagtagattatatgcttctcaaaactaggtatttagacaatgagattagttagtcttaattattaaattaatatcccgatcttatcatataagccaaattatacgaagattcttaagaataatcattttaatttcactaacctctctctatctctctcttcattatccgaattaagccaatcgaatccttttcaacccgacgggtcgtgaaattccccaaaagattcctctttctcagctcaatttccaaaagctccgacctttacgatcctctagattctcggcgccggtttctcggagtaaataatggctcagttcacgggtcgggtcgttggagactacttggtgggtcgtcaaatcgggtcgggttcgttctctgttgtttgggaagcgaggcaccgcgttgacggtactgaggttgctatcaaagagatcgccatggacaggcttaacaagaagctgcaggaaagtctcatgtctgagatttttatcttgaggaggatcaatcatcctaacatcatccgtctgatcgacatgatcaaggtttctttttttgatttgaagtttcgatttttttggtcggttctcattttttagctgagaattttgaattgaggttagctttgttactatatatgtttctcatttgctcatcccaatgccaattttgtgtcataatgccatgattttgccggtgaattttggatcatatacatggaattaagcttcaattgtggaacaaaatttgggtctagtttgatgttgttctgatttgggcaatgtgatgcagtctcctgggaaagtacatttggtgttggagtactgcaaaggaggtgacttgtctgtgtatgtccaaagacatgggattgtccctgaagctactgctaagcatttcatgcagcagttaggtaaattctagtggcacttacttactctctgttttgttgtttttcttggttgccagaaacatgttttgtaatctctgacgggttttattttatgtaacagcggccggcttacaagttcttcgtgacaataatattattcaccgagatttaaagcctcaggtgtgtctgattctcattcctttcatttcaatgatcttctgtgcaccaggtgttttttattgttaatcagattagtgtgttagttgatctcactgttaaatgatacaactttcagaatgatgaaaggatgctgtagaagggtgctctgttagtttccaataaaacatgtttttggatatgttggggtttccttgtccaagtcttggagattccatctttgttgaaatttaattcttaaggttctttcgtttttgaaacagaatcttcttctatccacaaatgaaaatgatgcagatctgaagattgctgattttggatttgcaaggtattgtcatcagcaccccttgttactagatcaaagagtgtaatatgaatgaattagagaaggtttcaaatgggctcaagctgcttttgaatgtatattgtcgaatttctaggtaatttcattgttttcttgggggattatacttattatacgcctcccccattttgaacatcgctcttttcttgacgcagatcgttgcaacctagggggctcgcagagactttatgtggttcaccattgtatatggccccagagatcatgcaactccagaagtatgatgcaaaggtcagacctttctcttactaagctacctaggcccttctcttgacattatctccttacaatcctagctgaatacacaggcagatctctggagtgttggtgctattttatttcaacttgtgacaggcagaaccccttttacaggaaacagccaaattcaggttttgtgttctgtctcattgacttctatattatgtatgtgtttgtattctggtgcattaaactaatacgttctccatcgtgtgtttacagttgctccaaaacattataagatcaaccgaattacattttccaggggactgtagagatttaagcttggactgcatagacctgtgtcagaagttactgcgccgtaatccaggtcagcactaattctgcttgaagtagtggagactactattcttttgcatgaaaccatatgccccaggttctattggcatgtgtgttgatctaaaaatgtgaaattatattgaattgtggccacgttggattggcgattcaagcattttataatttgtaccgtgttcagagttttttgtttgattagcacaattaaaaacacaaattgtactgttgccatttcagtctgtcctaactttccgagtaactcatatcaacgggagttgcggagttttccagaacttggaattgtgatttgaatagcggtttatactaaactctagtcatctcctacagttcaccgcgtattttattcgagagagcatggtcctactctgtgtgtatccaaatacgattacaaatcattcttgaatatattgtcttttgcagtggaacgtttgacatttgaagagttctttaatcaccctttcctttcggacaggcagtcatatgatttctccaggtagatgtgacaattgtgggggctaatgcttttctctattttatgcagaaatttgtactgattaaactatctgtgctacaggagtagattggggttaagaaca

SEQ ID NO: 14050 - DNA, 3000 bp, Unknown
  misc_feature (1)..( 3000): cDNA_ID_2705917_gDNA_ID_2214695_Annot_ID_136790 3000 nt of promoter + ATG
actcatatcaacgggagttgcggagttttccagaacttggaattgtgatttgaatagcggtttatactaaactctagtcatctcctacagttcaccgcgtattttattcgagagagcatggtcctactctgtgtgtatccaaatacgattacaaatcattcttgaatatattgtcttttgcagtggaacgtttgacatttgaagagttctttaatcaccctttcctttcggacaggcagtcatatgatttctccaggtagatgtgacaattgtgggggctaatgcttttctctattttatgcagaaatttgtactgattaaactatctgtgctacaggagtagattggggttaagaacaatggacggttttctttcgtctggaagcagtccctcgagaaacatggaagaaagttctcaagaagactgtttgccgttccttctagatgatgattctagtggacctgaggggagcccttcatatttaaaaaagacatcctcaatgaagtcgtcctctggaattaaagtcgatacgagaattgagaggaaggaggtggaatctagtcctttaaaacatacagaacttacttctggatatagtagtttcaaccaaaaagtggaaaacgatagatttagatttgaaactcaaataaattcagataggagaaaccgcagggaaccgacaggattgactgattctagatcacttattgctccaggaagaggtaattgaatctttaccattttatccaccgtagagaatgataaagctttcttgttctgtttctcacatatgtcagttctgcagtagatgattctcaagactccatggatcaagacttcgttctcgtatctggaccaccagtagatatgccatcatcttcatcaagttcttcgaagccttataattttccattcaagtctcagtctcctcctgtagagttattcaacagaagcataagttcaacggctcccatgccaataattggtgctactagcaacagcattggtcagtttgggagccttgacagtcagtattctgccccgagcacttctcatgggtctctggatcttggtgatgcttttgaacagccatcaactcacagcctgacaagaatcaggtctctgagaaaatatgcagcaacaattgcagaactagtttatgaaagggtaacgaaacttttcactgtttgtagatagtcacatattatcatcgtgacatcactggccatcatgagtttctgagtagattattttcatgattctttgtatagattgaatctgacaaacatctagaagctttctcgatccaattggcgattctggcaatttggaaacaggcactgcacatatgtcatactcaggcaatttcaggtttggaaggaagcccaagccaagacattaacaaactaagaagtagcagcctgaaacacgatactcacagttctaataaagtcactgatctcagccatgatggatcggaggagatatcctctcagattcagaggcaatttatacaggagattgagcttgctgaagaacttgccaagagtattgaacctggtatgtttttttttctcttgggaaaaaataaacatttgtttttgaggtattaaagatcttaaaaggttttcatctacatgtttgtaggaaatacaaaaatgccagatgcaatggagacgatatttgaagcagcacttgatcttggaaaacttggaggagtaagtttcctttgtcttttcacaaagaatattgatgaacaatccaaaaacaatgaaaacaaaacaatcaacttgtctatactcattctcatatatggtgcctgtggctttttctgcaggttaaggaggttatgggagatacagagaacgccggaaaccaatattcgaaagcagtgcgtttgctggtattccttttagtagaagcaccaatgctgattctgaatccgccactgtctctcacaaactcagtcaggtatcgtctcaggacatatattgatttcctcagcagaagattaaaacatctgcagtcacatagaagaagttcagctggtcagatgcaaggatcatcgttagctatgatgaacagacaatcataaatccattcacttgggttgggttctcttgtttcttgtgttcttttatgaaaaaaaaaaaaaaatctaaaagagaaaaatgtatatgtttttgtacagcaacatcatatattcttattcttttggggttaatctggagggacgttggggaaatgatctgtgtgatggatgttgtaacttgtaacattttcttgttctattttgatcttaatcctatgttttttacttgactttatgcaaaaatatatgttatgatgattcttggatacattatttatgtataaataaatctatgactatgtttttaaactaattgtagagtatttatgatgcatattttaaaatcttaaaatctccttaaatctttctaataaatgatattcttaattttggttcgtcaagaataatatttatctcttacttaagtctttgacttatttatgtattgtactttattcgtatctcaaaattatgcaataaggacagaaccttaagggtttcagtttcccacacgtatgcagatgttaccacacgtgcaagagactgaaaagaaatatatacagtgaagccgaagaaaaataagcgccagtggccctaatcactcttgcagtcaccactgtcgccgtccgtctctccttctccttcttagggaccattcctcctctttcagaccagattctaggttagggtttcatcatcatcggctaaagtttcaatctttgaaatttccgttatctgttgatctcattattctctgattttgtgtagtttccacaagtttattccttttgatacattcttggggttttgttgtatttgcaaaagctttttttggaagaagcttcttatagcttgctggatttgatttgatatttgtcgaaattgccctgtttacagaagaggaaaa

SEQ ID NO: 14051 - DNA, 3000 bp, Unknown
  misc_feature (1)..( 3000): cDNA_ID_2705937_gDNA_ID_2214695_Annot_ID_136793 3000 nt of promoter + ATG
gacaagttcaggataagattttgatttggagattcactttgggtttggatttaatgaaaattagaagtttaaagtaagttttatagaccaagttgttggacaagcaatcgaattgggagctatgttatgtcttgattatgcttacgagttcttttatgttacctatattttcacctatgtgaatacggccgttgtgttgactcatcatcctcaacatgaatgtggaaaaaattaaggaaaattagaaaatgaaaactgcttgaggctgaaaataaggcaatgtgaaaaacactgtacaagatatgactcaacacagtgagcttacgcctatatatagaggaccaagtgttcttcttctctaacacacacacactgacacacacactccttaagatcatctctctcgtgtagtgtattttgtcaataaaagttgaacagatggagcataagaatattggtgcagaagtacttcaagatacgtacgatgatcaacagaaatgggttcttgattcttctcttgatagcagaggacgtgttcctcttcgggctcgaactggcgcttggagagctgcactcttcatcatcggtacatagcccttattgagattgtatatactttataccatagaattataacactgaaagaagtgtactataatatcccaaaatattaaatctttgtgaagtcttttgtttcgtcttctctgcacagcgatcgagttcagcgagagattgagttacttcgggttagctacaaacttggtcgtctacctaacaacaattctaaaccaagatctcaagatggctataagaaatgtgaactactggtcaggtgtcactactttgatgcctcttcttggaggctttatagccgatgcatatctaggccgttatgctactgtcttggttgcaaccaccatttatcttatggtaacatatgttcttacctctgatatatcctaatccaatttatttaaagattccataaacaaccttaaactgtgtcttgatggttaaacagggtttggtccttttaacaatgtcctggttcataccaggcttaaaaccttgtcaccaagaagtgtgcgttgaacctagaaaagcacacgaagtagccttcttcattgccatttacttgatctccatagggactggaggtcataagccttcccttgaaagctttggtgctgaccaattcgacgatgaccatgttgaagaaagaaagatgaaaatgtctttctttaactggtggaacgttagtctatgtgctggtattctaacggccgtgactgctgttgcctatatcgaagaccgggttggttggggcgttgctggcatcatactaactgtagtcatggctatatcactcatcatcttcttcattggaaaaccattctatcgttaccggacaccttctggtagccctttgacaccaatcttgcaagtctttgttgccgccattgccaaaagaaatctaccttatccttctgatccttctctgcttcatgaagtgtccaagacagagtttactagtggccggcttctctgtcacacagagcatcttaagtgagtagaaccaaactcaaaagtcttccatttgttaatttcaaccattctaaactgtttccttgtagatttcttgacaaggcagcaattatcgaagacaaaaatcctctggccctcgagaaacagagtccatggagacttctaacgttgacaaaagtcgaggaaacgaagctgatcatcaacgtgattccaatatggttctccacgttggcctttggcatatgtgcaacacaagcttcgacgtttttcatcaaacaagcaataaccatggacagacacatcggtggcttcacagttcctccagcttccatgtttacacttaccgccctcacattgatcatctcactcactgtctatgagaaactcctcgttcccttgctaagaagcatcacacggaatcaaagaggcatcaacattctccaaagaatcgggaccggtatgattttctccctcatcaccatgatcattgcagctctagttgagaaacaacgattggaccgtaccaacaacaacaaacccatgagtgtgatatggctagctcctcagttcatggtcattggctttgcggacgctttcacactagttggactccaagagtacttttaccaccaagtccctgactccatgagaagcttaggtatagcgttttacctaagcgtgataggtgcggctagcttccttaacaatctcctgatcacagccgttgatactctcgcggagaatttctcggggaagagttggttcggaaaggacctaaacagcagccgcttggaccggttctactggtttcttgctggtgttatcgctgccaatatatgtgtctttgtgattgtggcaaagagatgtccttacaaaagtgtgcagccaagccaagggctctcctgattcgtccatatccgtcgacgtctaaataaacaagacatgcaatgctaagtatatgtcgttaagtctaacattaaaaatcattagtaatcaatgttggtgttagatttttttctttggttaaaagataaatttagagttgaagatttaaatttcttatgaaaaagtgccaacatactttgttcaatatttgtattcgcattacgcttactagtaacccaaaatatatttccatttagaaatttgtcggaacaaattgtcattaacaaaaaaaattgaaagaagaaaagtcttggaaaaaaaaagacaacttgagaaactgttacgcatattccgggtatctcagtatctgagctgttttaccaaaatacccttctccttctccaagcaagatttagggtttctcaaagagttttccttttccctctctctcccatgtcgatgtctccgatctccatcgtaattcagtttccttcaattgatgtgaccttcgattccaaactcgcaaacccagaaacgggttactcatagaaacagtgatagagagatatg

SEQ ID NO: 14052 - DNA, 3000 bp, Unknown
  misc_feature (1)..( 3000): cDNA_ID_2705941_gDNA_ID_2214695_Annot_ID_136794 3000 nt of promoter + ATG
agagaggtgatgatggaggtaagaggaggactgaaaatcgtggtaatggtgggagattgagaaatggagggtcttcttcttctcaggtgtatgatatgactttgcagaatgatgggagatatgaaattggatcttaggtatgagttcttctttgttgtgtttggatcattgatgtctctgaacataatgtgtatgtaatctggaatagtttgattgtgattatgcaaagttttcagttttagggaagcaagtctctgtgttcaagtataggttttggttgatggattattgattggtataagcattgtctataaactggttaacccaccaaagtccttaaaggttggtccttttacctctacatcacaattcttacttccctcttcactagatatacctttcatcttcattttcttcattgtatcggcacaaaaaggcgtcatggatttattagagtaagaaacacgtaaaccatcattggtgacatcaaactgcatgttatcttccgatgtcaatacatttccggatgatgaagcagaataaggcgatgatgatatacataaatccgaattcctctgttctgaatcatctctcctctgttttttcttagtcctacttccttcactttcctcttcttcttcgctcaatgagtttatgatttgtttgactttgatcatgagggtttgacgtttcagccgaacgcattcacggttattggaacggtgatcatcaacaatctcctccacagttaatcccttatttcttgattctgtaacaagtttcgtaaatccccgaataggaacgctcccgctgctacttcctcttttccccatctcaaagtttttcagattagggtttctcggaaacaggggaaggtgtgttcttattacaaaattggggaggtgtagcaggctagccgtgagcagctgaaatcctaactctacttgaatggcgcagacaaatttatgaagccttaattgctcactcacttgggccttggatatcataatgggcctttgattcataatcatcatctaaagcacactatttatggttatggttatggacctatggttcaaattcttgccaattttttttactaatgaagtttatttattccgttattcttgatcagcattggtgatcatttaatacactaaataaaggaaatctatatgataatgaaatggcttaagtctattggatgtcaaaaagtttgcacttgataatggcatgatctccacaattcgctttcttgccacttctttgtgtggtacgttatcgctaaatcaattattagatgattggacttcatgtcaagataaatttatgtcaattttcttccagccactctggtgaatggtgattaatgttcaacttttaagaccactgggtctgctctaattggttatccattttaccgacgttcatttttgtcatctttagatctttatggtaacattttctgactcatcaaccattgcatggtgcttcatttgatttacagccatattgttaagcatatgtgtatcctatatatgacccacttctactgtttttagcagtgcataacaatgggagactgtattataactttctatgcgtggagcaaagcacgtgaaatagaaggatgcttagtggaggttagtattttcaatcaagtactttgtctaatttatcttgttgccatgacaaacgtgggaaagtagtcattctagcttctgtaatttgagctctttatttctcgcctttggccaagaaatcaaccagcatgtggtacatgtgctttattatattctgtgagctctttcttaaaaggagaactctaagccaattttttctttcttaaaaagtaacctcactgaagtggaggtcctactttcaggcaaatcaagtttattttggttaaggtggtgaaaaagagaccattcattggagaatgtggttttgatgagtcaatattcaaaattgatttacttttaagatgtccaccatttacattgtcatacttgctaaactgcgccaagtcttgctagaagattctatctctcttttcactatttgtttatgttggtattgcttgttggtgattcagttaatagtggttagcactatgggacaaggtttatctacttacctcagccataggccatagccataaagtcccatttggggttgactcttaggaattacaatcaattgtttaaattctgttggagaaagattgtaattataacaatctaagcattctatcctagtggagtaggtggagttaagattcagggttaaacaaacaaggtaatattgtcttagaataaagttcgttgtgacaagatgcagaacattgagagttttgattcccaataagaaaagtaaattgagtgggtagttttgagttgaattcatgtttttcattttggtctgtcagaaaaaggataagatttaggttagcgggataaaatcttttagtagaagaatgtaatgagggaatttttctttgttgtttttgcctgaaaaggtgaaaagaatacaaaaaccatcctgtaaagtttgttgaaggacaagttcaggataagattttgatttggagattcactttgggtttggatttaatgaaaattagaagtttaaagtaagttttatagaccaagttgttggacaagcaatcgaattgggagctatgttatgtcttgattatgcttacgagttcttttatgttacctatattttcacctatgtgaatacggccgttgtgttgactcatcatcctcaacatgaatgtggaaaaaattaaggaaaattagaaaatgaaaactgcttgaggctgaaaataaggcaatgtgaaaaacactgtacaagatatgactcaacacagtgagcttacgcctatatatagaggaccaagtgttcttcttctctaacacacacacactgacacacacactccttaagatcatctctctcgtgtagtgtattttgtcaataaaagttgaacagatg

SEQ ID NO: 14053 - DNA, 3000 bp, Unknown
  misc_feature (1)..( 3000): cDNA_ID_2705949_gDNA_ID_2214695_Annot_ID_136797 3000 nt of promoter + ATG
aacgatgttgatttgaagcaggagaggttaattccgatcatcgtcgccgccattggagctgaggaagccgagcaaattattttatccgttccagattttttttttattgttctttaatataaaattgattttacaatttttaggttgactttttcagtcaactcaattttcacaaaatgttacaaaacaactctcttaattatattcgaatgcacacacacacatatcaaatcaataaccaaaaaacattccattctcatagggtttggttggttacactcacaagttattgaatatccctattcctaaacgcccgcccacggaaaacagcgaacccaagagcatgcccgaaaatcgcggctaggaaaacaccaccgttgaaggaaacaacagccagaatcactaggtagctaaagccggacttgacggtatacatagccgtgcgaaatgcaactttagcaagcttatcggcaccctgtttgatggatgacgcgtcagagcaccgagcaagccactcagctaagaacgccagaaagaagacgaagataagtgcgagtgcatacatcccacggtcagaaccaggccagcctgagaagagcacttggcagttgtaaccccaatagaatgttgggtgtaacagtgacggtctatgtggcgtttgcgtttgcgttgtggtggtggtgttccaagcctctactacgacaacgtttttgctcgacaacatctcctttaatttggtgtaaaaagagaattgggatgtcgttgtcgtagtggaaataggagactcgctagtctttgcctataaaaagtgtttcgtcttgagaggaagagactggtcctactaaattatatgctatgttcatgttatgaagcaaactcaagatttgattgtcggatttttctttcgaaaagctacaccatgtccatcaataaactatttttggccgtatatttgtaatcaaaattcgtttttaaacgtatatataaatacattgatgcacatatcataagctaagctagctaactaaaagtaaagtatcttatggtttaatatgtttttttgtctacgttagaatattttctttgcttttttatataaattttatcacaagctattgcaagcaataataaaaatattaaataaaatatgctaataaaaaccagtaattttattttgattcacttaacaagtaaattagttatttccccaagcttgttttcaaataatcatcaatctattctaggctatctagtggttaatttgtttttagactagggaacaatcgatcatatgattagtcgatatacgaaattttttgattatgtcaacaaaaagtgacataaaattttcagtgataaaggtgagctagcccatgttacaagagctaaatactaatccgatcccctcgattcaacagaacatttttaaacttatccaatttattattatatgctttacgtcaagtttgcgttcttccacgagagaagccttaacacatgatggaagagtgtaatgttgcccatgccaattgccaagaaacaaacaactatgcgtctatgcttatggcgggcaccgactaggccacgttctctatttcacaagtttaaccgcgaacacacaaaaaacaaacaaccaaaaaaaaaaaaaaaaaaaaaacttaagattatgagtttgaagacttggatgcacgaagcatagcaacgttgaaggtgaggagaacgatctttaatgggtatagtccactttccatcatctaacctttgtttatacggatattccaactcaagtataatccactttaaacttttgtgatgagtgaaaactatttcaaaactacactttgctttttttatgcatttcaaatttcactttattaatgtaaagtgtataaatatttgaataattggttttgaatctagatcttaatgtcaaggcacctataaagagaaaacatcaattcagttgcaattaagggcatgtagctatatacatttttttgttcttcagccgaaacagtacttcaataatgattcaaaacacacacacaaaaaaaaaatagatagcgaaacagttatatcttagccggaccaaattttcctatgaaatcactgtcagctttcttactcattacctcatgcggcactacctttggaccaccccgatttgataatcacatccaatagatttcaccacgacaaggtactcaaatcctctaactaaatgtaagaggaagaagatacaattaccaaattcagtaaactagagaaaacttgcactaaaattattatttctataagaaatgttttaaatattttaatttattaaattagagtaaaaatggatatttaacggaagagagagtggaataattaataaagaattaaatccagtagtaacagaaaactcaagtgtttggacttcagtggcagttttaagtactttgcttcggtcagaatccttcaaacactgtttcttcatctcccttcgtcttctaccttttgatttcgcgccaccacgctccaaccttttcgttttcctctcactgctttctccgatctgcctgagtttctccgtaagtggtccctaattcccactttttcctctctctggtttggtttggagtgacaaaaagaaaagggaaagttacaatttcgttttcctttctctttcttctttggtgatcccattgctaaaatttgctgatttccttgcaaaggtttctgattctcctaagttttagttagatctgtgatctactgatatcctctagagcctcaattcttcaagagactgtttagcttttgctaagaattgagtatgaagtactgaattgtgtaattccaatgaattctctagtgatatttttatgcttaaactttatgtctttgttattgcagagtggttagtgtaaaggtggatgaagaaactaagatttggtttagtccctgaatgcagtatagagtcattgctttgaggttgctggtaattattctaccact

SEQ ID NO: 14054 - DNA, 3000 bp, Unknown
  misc_feature (1)..( 3000): cDNA_ID_1397867_gDNA_ID_2214695_Annot_ID_136798 3000 nt of promoter + ATG
atccacaaatcagaaactgttttgttcggtgttgactcgactaatgaagagcttgcagcaatagttcagacaagaaacacaactacaataatactcccaagtggagttcacacattgcctaaagacggtaacaattctcctctcccgttgattaaccggtggaaaaccggtggagaatgtgactgcggtggttgggacatcggttgcaaactccgtgtcctgtcttataatcatacaaagactcaaactttgtcaagctttcaattgtttgatcaggtaaactaacttgttcacttcaagcagctttcgggtatcgatggtttgagtcatttttcaacaatttgatttgattctcacaggaaagagacgagccagctttcaaaatggtgagccacggcgatgaactccactctgttgagtttggctcatcgatctctctcttggaagcgttctttatttcgttagcagtaactagtcatcagagttggtgtcaggaggaagaagaagaagaagtggttgtgatcggagattgtctgttaaagagagaaacaccggcgaagtacgcaacgaacccaccggtttctccaatcggtcgggtctagaggcagagagagttgggcttagacagtgttggatctggtttgggctgggctttaatataattgtaattaagaattacatggcataattaatcgtttagaatttgggtaatgtacaaaatagtgaaatgcatttatgaataatatagtgcttatggtttttcctatagtcctttgaaaaaaatcgaactgaaattattttcagaaaaactcatttcgagacgttttttcggttgaatcaaaactattttagattttagtatttgatgataaaaggaatagagaggcatgtgaggaagaaaccgtatttgacagacatgcttcgctgcattaccctacgtactcacatgcttctccaaatcatattcctccacgtgtagtgtttttttcttctttctcaattagatatagttaaaccttaattaagttttgttaagatttgcaaattggccacttacttaactctggttaccccgacattaccttcgaaattttaaattaaagcgtcaataacggttggtgggtttcatctcgtgaccactgactactttttagttttacttactgaacaaaaaagctctttatcagaattttgaatataccacttgtttcctatttcggataaattgatcatataaaattataaagtaaaggtttttctcttagaagataaattttttttctccaaatttgcataccatttaaaaaatgaaaaagactcttttaaaacaaaacacaggctgggactgataatatgatattctagaatctttcctgaaaaagaaaacttacatagaaacttcttcttactatgaactttttgtaaaagaaaaaaaaaggttcgaaatgagtgaaaatgattttaacgtgcattaaacttgtttgatatgaatcaattcatgtaataggattgaatgctgatagtaacatcatacttattttctgacaataatttaataaatgagtacacttgttctaaagttctctttgagaattctagaatacaagtctgcttaatcaaaaggctattttaagataaatgaatttttaaaaaggttaagaaaacgtatgaaagacttactgtgatggacatatcaatcgacagttattgggagtttttttttggagtagcaaagaaatgtaagaaaaaataatgagaagaagataaaagccaaagttgtgaggcttgtcggaccaaaaatggccaaaatgctagcaatccttgaaaacaagtgatggtaactggaacaccaaaatttaatgggttgattgaatcattgaaagatttgactttcaatatttttgatattttcctaaggagacttttatgacttttctttcattagtctctctagccaaatttgttttgcacggctcacattttgccttcaacaattttcattacttgatctaacatagttacttcttaaaaaggcaaaacaaaatttactttaatagctgagtttcttttttgtttctttaccatttaaatcatatagaatggctaaccatatttgaaatagtattgaatcgaatgtatctaccattagaccaccatgaatgatttcatttatactcatgtattttacagtttgttaagttgattcatatactaatttaacaactgataattgttacacatccattaagctttcatcaatacttaaattaatagcaaaaatgaataattaacagctaaatacacccaaattttacagaaatattctactcctacaatttctaccagtcactactctctaattttggtataaaaatcatatagctcactatataacagctatcaacctgtaatatataaattctgataattaatattggagaatttagtctaattagctaaacattttattcgtataaagaaactttttttttcctcgtataaattctaattttcgtttcgtggtttgaattatactttttttgtttttatatataataattttcaattcaaccgtttctccgtgttgaactctaggcctttttaatctatgccttcatttctcagattcttctaaagaaaaatttcgcttttctctctacttcaaaacttttgataatcttctttaaactttcttcttcgatctctctttgttaactttctttcgttacgtctctctcgttctcgttatttcttattctcagatcttggattcacgaccatctcgatcgttgaccgtcgaatttgggttcggctaaaaatccaatctttttttttccggtgagaagctcgagagagtatataatttaataaagggtacgtacgattttggttgagtgttttgatgatgttgacccaatttgttggggtgtgaagtatacttatggaactgattgtcacaatacaagaagaacaacatcatcaacaaacaagaataataag

SEQ ID NO: 14055 - DNA, 3000 bp, Unknown
  misc_feature (1)..( 3000): cDNA_ID_3021527_gDNA_ID_2214695_Annot_ID_189514 3000 nt of promoter + ATG
agttgggcaaggaagctttcccttaccgttacagttggtgcatctgcggagaaaagagagttttctgtaattaaaaccacacttttcattttgcaaccatcaaagtataagtagagttcttgatctgaactcacattgtgtcggacccatctttatgagcaaccaagcctcttccatagcaagtggaacacttcatcatctgattctccttgtaaaatcctggctctccatcagcattgcatgttggacatactacatctcctcttccggtgcaacctgtggatcagttaaaccaagtctcatcagtatttacaacattctgattgtcctaatggtcatatgtacattacatttgatacctgtgcacttctcaacagtctcagaattaggaaccaggacttgagtttctttatacgggacaaacagagtaggaaactgcggtctcaggtccagttcccataaccccggttcagatccatgtttctttccattgaattcaccaccagtgaaaggcacagtctgtgtcaaagcttccctctcctcaatgaaagtatcaagagttccgacataaacattgcagtcttcaacagcatgaatcttccatgtacgagcaggacggcttccccaacagcaacgatgaccaatatgatcaataagcagctctcttatttcaatctcatcaagaaactgcctgtaagaaattacataacgttcaacataagttaagaaagtgagggctaacaacagcaataagggaaaaattaggaaccattatcactagaattacctttgttgcaattcatgacctgctccagatgcacttggataaccaatagcttgagctgttaaatgccaagaagaaatcagaaatttgtataaaaccattaagaagcaaagagagaagattataggaaatgaatcaatgatgaaactttcacatttggaagatcaaaaatcaaaatctagagaaaacagcatgtagatcacttccactacgaatcaagactcgaataaaaagtctgctactttcaatggaagctgatcaaataactaaaggtgtcaatacaaaattttgaaggatcaggaaagatggaacgagacttacgaatgggtaacgaaacaggggtcttgataacgggaggataaagagacggaggatcagaagaaacagcagaagcggtacggatttcttcgacggtgacgacgccagctccggcgaaagatgggttacgagcagatgagctatttctctgcaggtattggtatgaatccaacctctcggattcattcgttttctctgatcctaaatgagcatttcgacaagacaattttatgaatcagaggactcaaaggagatatacacagaggagatgatatgttcgtctgaatttacctgaaagcagaggcttatccatggattacgaatctctctgtcttcccaattaaccaaagtagtggtttttcttagagagtaaggaaaaacccaggtcaattcgatcttcttctccgtgcgagagaaattttcattacaagaagaaacaagacaagaattcgagtttttcttatcgggtcgggtcagatccagatagaaccgggtcttcgtattgccacgtgtgaaacggttgaggatattttcacccactatataattggttgttataagtacgtaagctaaaaagagattcacgagggaaataattgcgcgttttggtccagtgtttaaggagagagagcaggtatatgaaaataacacttacacatggatgcttttaagtcctatcacatgcggcatatcggcaacaaaatctttttcatgttcgttcatttccaagttattcaatatgaacgattccaaaattttgtcgttgatttgattatagttgacctggaaaagatactatagatactaacgaacatcatctctgttggtctagtacatgtatttaggagtggacacaaaatggattttttttacttttttggtgctctgtccggattcaacatatatctagttttgtgtatcattttgattcattatggaataattggttacaagttacaacttcataatgaacaatttattataagacgtcgtcgactctactgatctcacctcacgtatgattaagcacaatattggtgtatgtttcttttttctagtgttgagatgtctttcatacaaatcccatgaatatgcatgtctcttgttctctcaatctctgctaacacaatttacgacctctatgttatattaccataaaaacattacaagagaaagaagaaaaatttaattagttttcaaattaataaaaatttagacgttttaagaaaataataataatttacaggtcataaaaaaactgattgaagaaatatatttccagctctaaaacccaattcctaaatctatattcatttagaaaatatatatacatttggtatttaatattcttaaatggagtaagataataaatttatattgtaatattaaataccaaatatatatattttggtgtctttttaattaataaaaaaataacaaagacacttattctaaattaagaagagtcaattaacgaaataataaggaatgaaattctcaattatgaaaaacacctgtcacgaaagtaaacgggaaaaaaatcgcacgatagataattgcatcggtgctcagtgctctgtttatctcgttatataataatgttagagaaattggatgtgaatgcaatggggcggtttaatgtgaattgatgagtagacacaacaagagtttggtttggtaatggtagcaacaagccaagagcactaactaccgacaaccactcgcgtccacatttgaattttcctcaattcccccactcacgctttttagctctttctcaatctttcatggcggattatctctctctctctcacttctccttctcgtgtgattctgattctcctctctaagatccgtatctctcttactctcccttctcaagctcacttcaatcaacc

SEQ ID NO: 14056 - DNA, 3000 bp, Unknown
  misc_feature (1)..( 3000): cDNA_ID_2705969_gDNA_ID_2214695_Annot_ID_189513 3000 nt of promoter + ATG
agtaaacgtatatacataccccggaccacggccatagcacaactcgttctgtccattgcaggtactgtgattgaaatcacaaggcagtccagtgtcaatgcaaaaggtaccaagagtatttggactcacatcaccacagtttgattgacagaaggcagagacaaatttacgcttcgaaccgtttcttactcgggttttaacatcaagggacttatccacagaatgtcctctagatgacttataagtagccgcaatatccaaaagtctactctctgaaacaaagtaaaacaaaaccataactttccacatcagtctctctgcaactgcaatgtagagaattgctacattaggtaactcaaggaaaggatatgactcacggtttctactgaaatcagaaacaatggttgatactctccgagggatgtttctagagctaacagaattcttctgtccattctcaaaccaatcctccataaaccgagctgcagcgcctttgttatctccactaatcaacgagttagtccgactcatggaagtcccatgagtagcaaaccagttaaaactaccagtaggtcccaactgagaatcaacaaacttaacaagagtcatttccttatcaacatcatacttatatttactcctctcagctgcaggattgttcagataagaactcggacttcgattcacaccagcatccaaaagatcccctattaacaaatcatcacacaaaatggctcaacaaacacaagaacatcaataaaggagattgacaaagaaaagattgtaacttctttacctttgttaacaaaagcagaaccaggacgtaggctttcgtgtgcttggacaatgctttgctcaatgccgttaacaacaacgtcaaaagattgacgaacaaatccaagagacgtcacaatatatgtgacgtattgaagatatcctcctggtccagcatgtgtgtgaattccacttattgctacattcttctctgtgtaaagctcaccatacctattgaacttttaaaaaattagctatccattctcatggattaatcactgattccactaacactctactcaaagattaaatctttagctaattaaatattcataccttgctttgagacgctcaagaactttgattgtaacgatttgagaagccatacaagcgtcgagattgacaaacacgacgcggttaccttgaggctcagcgacgatgaaggcacgagctcgtaaccggaaatgaataccggaagcgatttgatctgagtttgcgtagcccatcatgttgacatcagcggcaggaccagtgatgtcatagcttccgactccgattaagtatgcataaaccgttcttgaaagaagaagaagaagaagaaagagtataaattgaaacaatggtagtgaaacagccatggttgattgaagtgagcttgagaagggagagtaagagagatacggatcttagagaggagaatcagaatcacacgagaaggagaagtgagagagagagagataatccgccatgaaagattgagaaagagctaaaaagcgtgagtgggggaattgaggaaaattcaaatgtggacgcgagtggttgtcggtagttagtgctcttggcttgttgctaccattaccaaaccaaactcttgttgtgtctactcatcaattcacattaaaccgccccattgcattcacatccaatttctctaacattattatataacgagataaacagagcactgagcaccgatgcaattatctatcgtgcgatttttttcccgtttactttcgtgacaggtgtttttcataattgagaatttcattccttattatttcgttaattgactcttcttaatttagaataagtgtctttgttatttttttattaattaaaaagacaccaaaatatatatatttggtatttaatattacaatataaatttattatcttactccatttaagaatattaaataccaaatgtatatatattttctaaatgaatatagatttaggaattgggttttagagctggaaatatatttcttcaatcagtttttttatgacctgtaaattattattattttcttaaaacgtctaaatttttattaatttgaaaactaattaaatttttcttctttctcttgtaatgtttttatggtaatataacatagaggtcgtaaattgtgttagcagagattgagagaacaagagacatgcatattcatgggatttgtatgaaagacatctcaacactagaaaaaagaaacatacaccaatattgtgcttaatcatacgtgaggtgagatcagtagagtcgacgacgtcttataataaattgttcattatgaagttgtaacttgtaaccaattattccataatgaatcaaaatgatacacaaaactagatatatgttgaatccggacagagcaccaaaaaagtaaaaaaaatccattttgtgtccactcctaaatacatgtactagaccaacagagatgatgttcgttagtatctatagtatcttttccaggtcaactataatcaaatcaacgacaaaattttggaatcgttcatattgaataacttggaaatgaacgaacatgaaaaagattttgttgccgatatgccgcatgtgataggacttaaaagcatccatgtgtaagtgttattttcatatacctgctctctctccttaaacactggaccaaaacgcgcaattatttccctcgtgaatctctttttagcttacgtacttataacaaccaattatatagtgggtgaaaatatcctcaaccgtttcacacgtggcaatacgaagacccggttctatctggatctgacccgacccgataagaaaaactcgaattcttgtcttgtttcttcttgtaatgaaaatttctctcgcacggagaagaagatcgaattgacctgggtttttccttactctctaagaaaaaccactactttggttaattgggaagacagagagattcgtaatccatg

SEQ ID NO: 14057 - DNA, 3000 bp, Unknown
  misc_feature (1)..( 3000): cDNA_ID_3021531_gDNA_ID_2214695_Annot_ID_189512 3000 nt of promoter + ATG
tcgttttatgtctgtgtttgtgtaaatttttatatagtacagatttatgtctgtttgtgtttatggccttgtggggattttgctaattatatgctttttttggttgattttattacattctttgatttatttattagtacttcccaaatatggtacaatagaatattttcaagtttaagcatctcatatactgtatatctggattttaaaactttgggtatagataataacactagtcataaatgttcacgaatcattcataagccagtgacatatttgctcaatcggagaaagtgaacggaaaaggttacaggataggccggtgatggaagagaggcaatctccctcagcgtccataggttcacacagagatagagagtgtatattgttttctacgattagagcaactatatatatattacccaattaaaagtaaagttataacttatataagttctaacttacataagttctaacttctaacctatcccacaacaaaatggtttgtagtttatacccgatccactaacactctctcgcccatgtacacctctagatcacggccacacatgtcgttcgtttaccctttaattattattttgttatttagaaaaatgaacaatgcaacttagttgctatcattacatgttttaaaatgtttattatctttgtctttaaaatttttagctaatttcttacactagaaactgaaaaacgtacaaattaacacttgatcaagatgtaacatgtgggccaaaccttagatttgccgtcaaatatattggacacgtaacccctaaccacatacctcctatcacctgctaccacgtggattcattccaaacactttccggatctcaagccggtcggcaaagagcaccagcgtgaaattcgtcttctgcaccttcttcgtgccttgatggccgttggatccgaatcagacggccgatacacgatctcccttgatcttacatgtgaacttgtcatttgcgttaagtcaagtaccaaatcatttgtaaatatgtcggacgaggtacaaaaatgtgttgttatacaacaaaatatttaaaactcatataaaataaaggtatacaaatgtgaagagtattgcaaatagatttagctggttagtgatgttttgaacgtcatggatattgtcgtagtatgtgtttataagttgatcgttgtctatgtttcaatgtaaaaacagatttttggatgtaataaattagaaatgacaatcggttttaaacttcaattttctgataagtggttcattgaaatactcaaagttgatgatttatttttcctcgtttagaacttgatgatcttcgcaaagatcttaatcataatataattagattttgtttgtgagtaatccagtcatatatagaattaaacactagcattgtatgtttaaggcaaaattgcaattacaataagattcggtttcatatcaaatctcttgtttatggaacatgtatgtgtcttttttttttaagaagtttttttgaatagaggtttggtgatagatatggtcctttttttttaagaaagggagggtataacgatataaatatattcttcttccaaaaaagagtgaagggcaacaaatacaagaagaattatgttgaaatcaggcgttaattaaaaacataaaattcagatgtgtattcatgctgcattgaaattatttatatcgaaaatgataattgtagtaggagtagaataacaaagacatacacaagtgcaactcggtgtaattagataagatcactgctttgcttctttgtaccttcgatcatgttcttgtataatcaagattcgtatagaagctaatatattcacatgtttttgttcttctaattatgaagttgaaccatctattattgtagttggggattaatggacgatttgaaagaatcaaccgaaactcactagatcgtgtatttgtgtcttggttttatgttttatctttttaaaaatttctatactgaatctggttttcttagcagcttaaatttttaattaatatcagaatgagatcatgataaaacttttcacaaaattgttgatcttgtattagagaacaaattgaacaaccatgagaatgaatttcatgagtcacacacatcttcacattatctagatggaaacaagtatacttactagaaaattcaaatggagccacctatcaaataaatcccctgttagataactcatgatcaagatattcatgatcaagaaattatctactcgattttctgttttagctcttttgataaacactaatttttaagtgttttatattcctcacacacatattcaccaatagattagtcattaatctcaagttaacacacgtacctttatattcaatagacctaagtcttgtttctgacctcaaactgttggtgccagactcccacttccatgttcgaacttctttacattctttaagtcaggttattttttggattccaactgtagtgacaatccatacattccatggctaccaaacttatcttgattcacattatgctaagaagctaaaacatacaaaaagaaccgaaattgtcgtgagtttttttaatacgatagggtattaatgtattcttaacaacgttatggtcttgagaaataaaatatgcaaatctcgggtagggttatttggattagtgaaatttgggattttcttaatttaaggctaaaaactatgaaatttagagatttatgacagttaataaatacgaataacggtgttcgttgcaattttatgtggtacttatttgtttttaaaaaaaaagtttagtactaaattgttcgatttcgaaagttaaatatatttttgaaagttataaaggaagaaaggatttcttagcaaatttccgttatttaagttggagagaaaaggtttaactcaaaatatcgcaaaaccctaacaaaaaattttcattcttcctccactctctcaattccaaaacactgcgccgggaagac

SEQ ID NO: 14058 - DNA, 3000 bp, Unknown
  misc_feature (1)..( 3000): cDNA_ID_2705961_gDNA_ID_2214695_Annot_ID_189511 3000 nt of promoter + ATG
tcataaatctctaaatttcatagtttttagccttaaattaagaaaatcccaaatttcactaatccaaataaccctacccgagatttgcatattttatttctcaagaccataacgttgttaagaatacattaataccctatcgtattaaaaaaactcacgacaatttcggttctttttgtatgttttagcttcttagcataatgtgaatcaagataagtttggtagccatggaatgtatggattgtcactacagttggaatccaaaaaataacctgacttaaagaatgtaaagaagttcgaacatggaagtgggagtctggcaccaacagtttgaggtcagaaacaagacttaggtctattgaatataaaggtacgtgtgttaacttgagattaatgactaatctattggtgaatatgtgtgtgaggaatataaaacacttaaaaattagtgtttatcaaaagagctaaaacagaaaatcgagtagataatttcttgatcatgaatatcttgatcatgagttatctaacaggggatttatttgataggtggctccatttgaattttctagtaagtatacttgtttccatctagataatgtgaagatgtgtgtgactcatgaaattcattctcatggttgttcaatttgttctctaatacaagatcaacaattttgtgaaaagttttatcatgatctcattctgatattaattaaaaatttaagctgctaagaaaaccagattcagtatagaaatttttaaaaagataaaacataaaaccaagacacaaatacacgatctagtgagtttcggttgattctttcaaatcgtccattaatccccaactacaataatagatggttcaacttcataattagaagaacaaaaacatgtgaatatattagcttctatacgaatcttgattatacaagaacatgatcgaaggtacaaagaagcaaagcagtgatcttatctaattacaccgagttgcacttgtgtatgtctttgttattctactcctactacaattatcattttcgatataaataatttcaatgcagcatgaatacacatctgaattttatgtttttaattaacgcctgatttcaacataattcttcttgtatttgttgcccttcactcttttttggaagaagaatatatttatatcgttataccctccctttcttaaaaaaaaaggaccatatctatcaccaaacctctattcaaaaaaacttcttaaaaaaaaaagacacatacatgttccataaacaagagatttgatatgaaaccgaatcttattgtaattgcaattttgccttaaacatacaatgctagtgtttaattctatatatgactggattactcacaaacaaaatctaattatattatgattaagatctttgcgaagatcatcaagttctaaacgaggaaaaataaatcatcaactttgagtatttcaatgaaccacttatcagaaaattgaagtttaaaaccgattgtcatttctaatttattacatccaaaaatctgtttttacattgaaacatagacaacgatcaacttataaacacatactacgacaatatccatgacgttcaaaacatcactaaccagctaaatctatttgcaatactcttcacatttgtatacctttattttatatgagttttaaatattttgttgtataacaacacatttttgtacctcgtccgacatatttacaaatgatttggtacttgacttaacgcaaatgacaagttcacatgtaagatcaagggagatcgtgtatcggccgtctgattcggatccaacggccatcaaggcacgaagaaggtgcagaagacgaatttcacgctggtgctctttgccgaccggcttgagatccggaaagtgtttggaatgaatccacgtggtagcaggtgataggaggtatgtggttaggggttacgtgtccaatatatttgacggcaaatctaaggtttggcccacatgttacatcttgatcaagtgttaatttgtacgtttttcagtttctagtgtaagaaattagctaaaaattttaaagacaaagataataaacattttaaaacatgtaatgatagcaactaagttgcattgttcatttttctaaataacaaaataataattaaagggtaaacgaacgacatgtgtggccgtgatctagaggtgtacatgggcgagagagtgttagtggatcgggtataaactacaaaccattttgttgtgggataggttagaagttagaacttatgtaagttagaacttatataagttataactttacttttaattgggtaatatatatatagttgctctaatcgtagaaaacaatatacactctctatctctgtgtgaacctatggacgctgagggagattgcctctcttccatcaccggcctatcctgtaaccttttccgttcactttctccgattgagcaaatatgtcactggcttatgaatgattcgtgaacatttatgactagtgttattatctatacccaaagttttaaaatccagatatacagtatatgagatgcttaaacttgaaaatattctattgtaccatatttgggaagtactaataaataaatcaaagaatgtaataaaatcaaccaaaaaaagcatataattagcaaaatccccacaaggccataaacacaaacagacataaatctgtactatataaaaatttacacaaacacagacataaaacgaaacagagagagattagaaaaaaagcttcgacgcctctcagccttaagccgaatctcacggtggctactaatacagaaccccccccccaaaaaaaaccataacatgcctaaccactactaaccctctaattccaaaaacaccaacaaacaaacaaaaaaaaaaacaaccttttttttctctctctctcaaaaaaaaaaaatcaatcctttttttcaatttggcgcttttctagagattgattttgtttctcaggcggcgagatg

SEQ ID NO: 14059 - DNA, 3000 bp, Unknown; identical to SEQ ID NO: 14054
  misc_feature (1)..( 3000): cDNA_ID_1397867_gDNA_ID_2214695_Annot_ID_189506 3000 nt of promoter + ATG

SEQ ID NO: 14060 - DNA, 3000 bp, Unknown; identical to SEQ ID NO: 14053
  misc_feature (1)..( 3000): cDNA_ID_2705949_gDNA_ID_2214695_Annot_ID_189505 3000 nt of promoter + ATG

SEQ ID NO: 14061 - DNA, 3000 bp, Unknown
  misc_feature (1)..( 3000): cDNA_ID_2705941_gDNA_ID_2214695_Annot_ID_189501 3000 nt of promoter + ATG
ccgtgagcagctgaaatcctaactctacttgaatggcgcagacaaatttatgaagccttaattgctcactcacttgggccttggatatcataatgggcctttgattcataatcatcatctaaagcacactatttatggttatggttatggacctatggttcaaattcttgccaattttttttactaatgaagtttatttattccgttattcttgatcagcattggtgatcatttaatacactaaataaaggaaatctatatgataatgaaatggcttaagtctattggatgtcaaaaagtttgcacttgataatggcatgatctccacaattcgctttcttgccacttctttgtgtggtacgttatcgctaaatcaattattagatgattggacttcatgtcaagataaatttatgtcaattttcttccagccactctggtgaatggtgattaatgttcaacttttaagaccactgggtctgctctaattggttatccattttaccgacgttcatttttgtcatctttagatctttatggtaacattttctgactcatcaaccattgcatggtgcttcatttgatttacagccatattgttaagcatatgtgtatcctatatatgacccacttctactgtttttagcagtgcataacaatgggagactgtattataactttctatgcgtggagcaaagcacgtgaaatagaaggatgcttagtggaggttagtattttcaatcaagtactttgtctaatttatcttgttgccatgacaaacgtgggaaagtagtcattctagcttctgtaatttgagctctttatttctcgcctttggccaagaaatcaaccagcatgtggtacatgtgctttattatattctgtgagctctttcttaaaaggagaactctaagccaattttttctttcttaaaaagtaacctcactgaagtggaggtcctactttcaggcaaatcaagtttattttggttaaggtggtgaaaaagagaccattcattggagaatgtggttttgatgagtcaatattcaaaattgatttacttttaagatgtccaccatttacattgtcatacttgctaaactgcgccaagtcttgctagaagattctatctctcttttcactatttgtttatgttggtattgcttgttggtgattcagttaatagtggttagcactatgggacaaggtttatctacttacctcagccataggccatagccataaagtcccatttggggttgactcttaggaattacaatcaattgtttaaattctgttggagaaagattgtaattataacaatctaagcattctatcctagtggagtaggtggagttaagattcagggttaaacaaacaaggtaatattgtcttagaataaagttcgttgtgacaagatgcagaacattgagagttttgattcccaataagaaaagtaaattgagtgggtagttttgagttgaattcatgtttttcattttggtctgtcagaaaaaggataagatttaggttagcgggataaaatcttttagtagaagaatgtaatgagggaatttttctttgttgtttttgcctgaaaaggtgaaaagaatacaaaaaccatcctgtaaagtttgttgaaggacaagttcaggataagattttgatttggagattcactttgggtttggatttaatgaaaattagaagtttaaagtaagttttatagaccaagttgttggacaagcaatcgaattgggagctatgttatgtcttgattatgcttacgagttcttttatgttacctatattttcacctatgtgaatacggccgttgtgttgactcatcatcctcaacatgaatgtggaaaaaattaaggaaaattagaaaatgaaaactgcttgaggctgaaaataaggcaatgtgaaaaacactgtacaagatatgactcaacacagtgagcttacgcctatatatagaggaccaagtgttcttcttctctaacacacacacactgacacacacactccttaagatcatctctctcgtgtagtgtattttgtcaataaaagttgaacagatggagcataagaatattggtgcagaagtacttcaagatacgtacgatgatcaacagaaatgggttcttgattcttctcttgatagcagaggacgtgttcctcttcgggctcgaactggcgcttggagagctgcactcttcatcatcggtacatagcccttattgagattgtatatactttataccatagaattataacactgaaagaagtgtactataatatcccaaaatattaaatctttgtgaagtcttttgtttcgtcttctctgcacagcgatcgagttcagcgagagattgagttacttcgggttagctacaaacttggtcgtctacctaacaacaattctaaaccaagatctcaagatggctataagaaatgtgaactactggtcaggtgtcactactttgatgcctcttcttggaggctttatagccgatgcatatctaggccgttatgctactgtcttggttgcaaccaccatttatcttatggtaacatatgttcttacctctgatatatcctaatccaatttatttaaagattccataaacaaccttaaactgtgtcttgatggttaaacagggtttggtccttttaacaatgtcctggttcataccaggcttaaaaccttgtcaccaagaagtgtgcgttgaacctagaaaagcacacgaagtagccttcttcattgccatttacttgatctccatagggactggaggtcataagccttcccttgaaagctttggtgctgaccaattcgacgatgaccatgttgaagaaagaaagatgaaaatgtctttctttaactggtggaacgttagtctatgtgctggtattctaacggccgtgactgctgttgcctatatcgaagaccgggttggttggggcgttgctggcatcatactaactgtagtcatg

SEQ ID NO: 14062 - DNA, 3000 bp, Unknown; identical to SEQ ID NO: 14051
  misc_feature (1)..( 3000): cDNA_ID_3021551_gDNA_ID_2214695_Annot_ID_189500 3000 nt of promoter + ATG

SEQ ID NO: 14063 - DNA, 3000 bp, Unknown
  misc_feature (1)..( 3000): cDNA_ID_2705983_gDNA_ID_2214695_Annot_ID_189519 3000 nt of promoter + ATG
gttctcaacggatagtgacaaaggaaagagaaaatagagagggttgattagtgagattataaaagaaaggtgtgaaattagaataaagagaaaatatgaggggtcaggttttgaaaattccttatcgctagttccgttgtataactttagcagtgagtcggtagtacaacactactactactactgcagacagagtaagcaaaaaagtctaggggctctcgcttgttaaatgactgttacgcccctaggttttacttctactatcactacctatgaagttaaaaaccaaagaccatctttgttttgtttcacgaacttgaagggacaagccatttgtttgtctactcaaattttgagttttcacactcttttttttttttttttttttttttttaatttgtaaggtaacgtatttccaaattagctggaaccaaaactcatcatttaagactatttttgtccttacacatttttattcgagtttaaatgtgaataccgaatgtccaaggtcaaaagtgacaccaatctttgtgttttgatgttcgtacgttttgaaccttctttgatcttgttttctacttttatgcatgttttactatttttccatgattcgagttgacatacctatttatgttaaatccatggactaattagtttgatcatacatatatctattctatagtcgatttatggttaaatgcacgctggctggtctagaataagttcgttaactcttatgttctacggaatttacatgactagtatcatgtatgcatgtatgggtcttgtagagaacatggaagctgagtgcaacaatatccttacttggatgataattgtatgtgttagtttatttatgtgtgattgtattaatataatgaataatcataatattgattcttaaatgacattttaaaatatatttcgattttttttttcaatttacgaggaaaaaacatatgaatagtgtttatactttaagggggaaaatgcaaagtcaggtaatagctcgaggatgtttctgccattacttattcactttataatcacatttcgctttcattttttccttttctgtcattctctttatattttctgtctttccactttcattttattttagctttttcttgttccattgctctttttgttttctctagcttttgccttttgagaacacatcaaataatgcatgttaaataagatgttaattgtactcgtgtaaaaacctcttacataaaaaatgccaactttttatatgttttccatgtacaaaatcccatcatcttatttaactttattatataaaattggacacatgaaaaaccaagagtagaatttagttattcagtgtggaggtaaattcacacacgtgaatagtattatctcatcccaacaaaaaaaaatgaatatccaaataaactcaggatttaaattttaaaatgaaagaaaaaaattaattgggaaaatgaagaagggcgtggaatagcaccgacggcgcacgggggagagtgatgaagattgatgagagtcacgtcggtgagtcacgagttacttaaccagactggtgtaaaccacacatatatcgattttgggcttagcttcggcccattttcttgagatagatgactcatgtcttcatatggtcggatatattaggctaaaagtttcataagaaaatgttattttgttctgtctctttcaattgttcccccgtaggttgttgtatatttaaaataggcactctcttcttttttagatgtcgtagaagtagtttttatattggtgaaagatcatgtttctctcttcttttttagatgttgtaggagttttaatggattttggaatcttttatttatttaggaaggaattcaaaacatgcgagggtaatgtgacctctgccatgttatgaaccactcataggtgcattcccactttgaactttttttttagactcacttttgatgatttgaaaatacgtatagccccaaatgaacatatcttgagaaacacgagcaatttctcataaatgcctaatagtttagccgtttaggcatctcatgatctcactgtaaactattaggatagttacacatacacttaaataatagttacacatacatctaatattttgaaaatcctttatattctatgaattatccacaccaaatgacatcatgtgtgactgtataaatacgactacaaatctatgtaacctataccaattacaaatatgtttttctatgtttaatagctataccgtttgtgtgtgatatatatgattagttacattaagatactttaacacaattctagatttctagtgcaatgcagttatcaaatacttctgattttgaattgacaaagcgacttaaaaacgattgattgtaaaacaacttaccacatggcaagcacactcctaaacgcatcgaacaaatccataaactgcatcatacatacaacaaatccaatggctttgtcattaggatcactaccgtagcaccagttggggcatagtgaaatacaaatgcctttttcttatgtcattgtcttaaacagacatgaccatctctctaatttacgactactttttcctttttgggctttgaatgaatcacgctttcaaataattgggctgcttctttctttcccattttagaccaatttcaaagacaaaaaataaaactagcaattgctaaccgaaactccggtatcccggttaacccgttgtaggtggggctgacgtgggtgcaatcactttgtcatatcaacacatcacgtgtctccacgtaggatgcagcagaaactatttactacattgactaaaatacccttcaccaccaaacaccaccagcacacgaaactttcatacgtttctttcatggcggattcgctctctcgctgaaactctctctctctctcgttactccaaccactcctaattattcacatcattattggcatgaaaagttaatctttcctatataacaattattaatg

SEQ ID NO: 14064 - DNA, 3000 bp, Unknown
  misc_feature (1)..( 3000): cDNA_ID_1807244_gDNA_ID_2214695_Annot_ID_189518 3000 nt of promoter + ATG
gtttttctctttcattatctccgcttattacattcttgatccgcgtatcttgaagaaatcaagattacagaaaaattaatcaagatttcaagatttggtttccttatataaatagctaaatatagcttttcacataattgaatcgttcgtaaattccaaaattgtttttcaaaagtgtaaaacacatgaaagaatatccgataatttaaacaaataaaataaaataatgatatataaattagaaaaagagggagtggttgttgaaaaaaagagtaggtgcgttagtttgagcggcaagcgtggagaaggcttgaccttaatgtgaatgtgaaacttattaccaaaccgtttataatgtggccgtgtgggtcacgttaattgtccttttattgagttttgtctggcttcaaagctaaaaattagttacaatctcctgattttggagacattcaattccaatgcaaaggacagaaccattacataggaatataggatatgatcctaaattttgagtttagatcactgataaaccgaaattcagatttaatctcaaaacaagtaaaaaccagactttcttgctacttaaggtgtggatgatctaaaccaatagagaagttctcaattactagattgatttcttctatatatataggttagggcactttgatgagtaccacttaaaatgtttggctaacactatatatatgcttttggtactatgacacttgtttattttgcagtcctccttcctatggggttacattttttcatccgttatcggaggggcattggtggatcggtatggaggaaaaagagtgttggcttggggtgtggcattgtggtccttagccactctactcactccttgggcagctgcacactcgaccttagccttattgtgtgtccgcgccttttttggcctcgctgaaggcgttgcaatgccctccatgaccaccctactctctcggtaattccttttattctacattttgaaaacgttttacgtttttaaactattgggtttgaaagaaccacaacctaagttagatatatggtttcctcaggtggtttccaatggatgaacgagcgagtgcggttggtatatctatggccgggtttcacatgggaaatgttgtgggacttctgttgacgccactcatgttatcttccataggaatctctggtccatttattctttttgcatccttaggtctattgtgggtatccacttggtcaagcggagttacaaacaaccctcaggacagtcctttcatcactaggtcagaactcaggcttatccaggctggaaaaccagttcaaccgtcaaccatttcgccgaaaccaaacccatctttgcgacttcttttgtcgaaattgcctacttgggcgatcatttttgctaatgtgactaacaactgggtgagtttgagtttaatagtatctttatcagagcaatacctcatcttttgttgccataaactcacacggttttcgttagttgttgttcacagggatactttgttcttctctcatggatgcctgtttacttccagacggtatatagggattattccatgttttcattcagatatatatgaacttcaagaaaatatatgatgttttatatctttgtcttgtttgatcataggtgtttaatgtgaatttgaagcaagcagcttggtttagcgctcttccatgggcgacaatggcgatctcaggttactatgcaggagcagcatcggacttcttgataagaactggtcactctgtaacctcagtacgaaagatcatgcaagtgagtattagaagtgccatacttggttaactaaatagccgacccataacattctaacggaaagtccctgcttttgtttgtcagtctattggatttatgggtcccgggctgtctctgctctgcctcaacttcgcaaagtcgccttcttgtgcagcggttttcatgaccattgcattgagcttgagttcctttagccaagctggatttctcctcaatatgcaagtacgttaactctcacccttatataaccaaccattcattctaaacttgattgatcactaacctaaccattttgggataatcttgaatctcacaacatcttttggtttctctttgcggaaacaggacatcgcaccgcaatatgctggtttcctgcacggtaataatgttatcagatggtggatcttttcttcttcttcttttgcatcgattttgtttcttgctgaaaaagttagggtttgtatatctggtgtgcgagacaggtatttcgaattgtgcgggtacgttggctgcgatcgtaagtacaatagggacgggatattttgtgcagtggctcggctcttttcaggcgttcttgacggttacggcctttctttactttgcaaccaccgtgttttggctcctctttgcaaccggagaacgagtcttctagatccaaaacgctctccttggacactttactgtttagagctttgactagaattaaaattaaaattcattctttcttttatttggaagttagagtagatatttctctggcacgtctgtgataagcactatatatacttccgattaaatcataaaatagaaattagtttttatatacagtattgtcagtatcattcaaaaaaatgatttcagtctagagattgaattagttaataatggtggccaagtggccaaaacctagcttctttagagatttcacttactatttttcttaaaaatgacccaaaagatgaatgagttagagatatataataagtacacatcatacgaccacgagaaatgaatcgtttacatgtgaaaaacgacaattctagtaatattatcatgtgtgaactattccattatttgtgaatttatttacagtaaacaatcagacccaaaaaataaaaaattccaattaaagttctccaattggagttgattctgcccttattagagagatctgatctttccccaattccataacccgaaaaatg

SEQ ID NO: 14065 - DNA, 3000 bp, Unknown
  misc_feature (1)..( 3000): cDNA_ID_3021519_gDNA_ID_2214695_Annot_ID_189517 3000 nt of promoter + ATG
aacttacgtttggtcaaagaggagaatcgagcaaggtacgaatttatcgaccggacgaaggagtttggagatcggagcgaagacgaaacatcaagcaagccacgatcctattttcttcaaattaattacctttttcagaaaatatacttttttattctttttgataaataccatattttatggattttacattaatttggaacaattattttaatgatacatgtataattatttttttttaaactatgggttatttttttcaaaaaaataatgtgtggatgtttcaaaaaaaatcaaatttcataatgaaacaaacaaaaattcgaagaagataatacacattgtgttgagaacaaacaattattacacattgtcggattaaccatataaataccgaactttgccttttgatttggccaaaaccttaaagttaaggtaaaaccttcatagctgtccaacaatgttaataaatccatcttagagtttaaggtcattgacagaactttcagtaactttgtctcccaaagcactccttatgtgatacacatacactaatgggtaaaaaatttcaatttctctgaccatatcaataaatgtcaacggcagaggcaaaaaaaaaaaatttggtcaacgaagcaaatcatagtggtttctaccactgtaaagaagcctaacaacattcttgtttgtcttcccctttccccagcctcctcgaaattcacttccatactcttgaatcggtataaaacccggcccataccctcctcctcttccatgctagataaacaataccaaataactcaagttctgaatacagttactagaacaaaagaaacacctagtcttgcttacataagactcaaattcaaagggcgtttacctcgtgctcaggtatgtagacgatgataggctgtttacatagcttggagagaacctgttgaagcaaaacactgacattagatcatttctctatgatggcagttttaaatgcaggaaactcactagcagctcggactctcctccccagaaatcgtgtcttccaatccgctggcaaaagctgaagaaaaatgcttaacgtgataaggaaaaacaatgccatttagctgaaaagtggtaatgagtgtgaatgaattcttatgagttatgactcaccgtttcagagactcatccacagtgatagccactaaagcttctttgtacttctccctttccttggggtcattgcatataacctctttcacagccattcgtaactcatctgtgaaacaaaggcaagttttgccacacaaaaacatgatgaacaagagataaacattcaaatgtatagaccagagaaaccacaaaacatttttccaccaaaaaggctaacagaatgaaacaaaatccagttttgattccccaatctcagcaagcttaacacagttcaatctcttagatttcaaaaacacacaacaaaaatcaaaacaaggctatatgatcaaatatatagttacctgcatcatctctctctcgttgggggttaagagtaatacccttattaaaggccattcctttcacctaatttacattgaaaaatcacatcttttattcaggaaaccccaacaagaacacataaaaataacagaaactacattaccaatgctcgaaacagacatctcccatcccctttaactctatccacagcatacttctcaacctttttcgctgcaggagaccgattcctagagatgaatataagaatcaattcgcagattagcgtaaagggttttatcagagactcgattgttgaattcaataaacgagaaaacacacatcgaggaattgattctggcgaagaacacataactatttcccttcgttgtgcttatgaatgaagcagggagtgaagtggaagatattgaatctgacacagaagcagtaggagaagaaacaagctcgaatctagcgaagccatttctcagctgctctagaatgttatctgcgatattaatgaatgatagtgttagaaattaaacgagaacaaagcaataagggtgcagagcaatgaagtacttactgttggaagaagatttgagctccattgcaggggacggagataagggaggaattcgaattttgacttgaagaagcaaggaagaagactcagaaatgtagccatgaatgtgtaataagttaaatagttaaataactctacgataacacaaatccgttgtagtctagctggttaggatactcggctctcacccgagagacccgggttcgagtcccggcaacggagtttttttaatagtttttctttttttttgtcggccgtccgattaatccattaaacgacaccgtcacatataacctaaccccaccaaatccaccggaacatatccaaataagtgataggtgttaatctcacacgtaggaggagtcacgtgggcacgtgcgagagagcaaaggtctaaactttatggtttaacgaccaaccggaaagttctggcaattggcaaggaaggattcgaagctggttgtttcccaatctgcataagaaatatcgaaacacttccacacaaaatccacgcgctctctcacgctcactcactcgcataacacttgttccttcttctctcaatttcaaaaaacgacgatctcttcgatgctttctcttccttcctccttcatttccttctgactctgctcttcttcttcgtcttggatcttcgaatttgtctttgtgatttgaggtaaagtttaattctttgagctgggttttgttttgttgttgatgggtttcagagatttgcttgttttatttctgagacacgaaatgggcagtggaacaaatctgaccaatttgtgttcttcttcaattttatttaatctctcgtggattcagtgatcgacgattgcttttgatctaatttgtgttggttttggtttctgtcagtgttatagaataaagatctgtttggagtggatccattcaagtaattgaagaactcaacgcaaaaa

SEQ ID NO: 14066 - DNA, 3000 bp, Unknown
  misc_feature (1)..( 3000): cDNA_ID_2991191_gDNA_ID_2214695_Annot_ID_189516 3000 nt of promoter + ATG
cttggctctattggttcgccctctatgaacactccaatctttcggtacttagccatcctgtgtttcaggagctcctccccactcatttttccgaattcctacaagttcccaaaaaaaagttagaactcttttagatccacatccagcgttgagaagaacaactatgcctacattcatgttttcattgatagcaatctttatttgctgcgacgtccatgaaggatcggcatgggcccctccaagcggttcctgtacaacatgtgagagttactcagtgatccaaagtgagaaaagaagtgtaagaggaaacagatagattagaggtaggatcagttacaggaatgattccatcagctacattaagcttgaccagctccttggaggtaattctaagcttttcagcagcctgcgtacacgagtttcattcaagtgtaatattagagtctacatgatcacttttaatcgagtagtagagcagtgtacatacctcaggagcagccttagaagtcttccacaagatcgctgcacatgcctctggactgtgaaaggcaaaacaacagacgtgataaatcaatctgtaaaaacatcatctcatcatacctactacattgggaaaaagtttacctggcaacatagaaaactgcgttttcgagcatcagcattttattcgcacagccaatggctagggcaccaccagaaccaccttccccaatgacaatagaaagaattggcactttcaggccgaacatcgtcctcagattgttggcaatcgcttcaccctgttatacagataagaaaaaaaatgttatgatgcagataaaccagtagtacatttcaaacataaaagacatttcttctacctgtccaagttcctcggatttaagatctgcataggctccaggagtgtcgataaatgtcacgattggaaaaccgtgatggtctgcataatacatcatccgaagtgctttcctatatctgttgtagacattacagaaatttgataagagagttgttgactctgaatgtttctatttaactacaaacaggaagctcctcgtgaaaacatacccgtgaggagtaggcataccaaagttccgcattatattttctttggtgtttctacctttctggtgacctatgaacatgtaacgttttccatctatggttccaatacccgtcacaattgcagggtcatcataccccgctcggtctccatgaagctccataaactgaaacaagagcagagagtcccaagaatgtaaaaaaacaagaatttatcgtcaatgcatgacaaaaaagccttactactgagagaccaaaccttgtcagttatgttatgtatatgatcaaggaaagtaggtcggttgggatggcgcgcaatgttcacacgttgtatcggagtaagatgcgtgtaaagatctttcagtgcctgacattaaaatggcgggggtcagtaagaagtctttcccaaacaaaattgtagctatacattaacatcaaatttgaatggtgggtctccctcaactatataaattgaaaaccaacctatactagcatttttacctgtctatacttgttctccaaagtgataatctgctcagtgaaatccaaccccgtttcattcgccatcttcctcacctgcatcacaagaaccaatgttatgagaaacttcacaccatacaactgctaggggaaatcaaactaagatgcaaacagatgataagtattcacattcgtacatcaacaatcttcttctccaattcgactagtggcttctcgaaatccaaagtgacaggcttttgagtatcccccaatggtttgaactcggccaggtaagacaagactcctcctttcacattcgggtcaggatttgcaggccatggatgctcaaatttcttccctttcttgagccgagatgtcaccgccaagtccttcctcctgatggtagtaaacactgctcttcctaaggttttcaatggtaccccattaacaccattgctcgaactacgcaagtaatctgaagcagaagcagaagaagctcctcctaaagctagtgatgaatgcgatattgaagccattttttgcgttgagttcttcaattacttgaatggatccactccaaacagatctttattctataacactgacagaaaccaaaaccaacacaaattagatcaaaagcaatcgtcgatcactgaatccacgagagattaaataaaattgaagaagaacacaaattggtcagatttgttccactgcccatttcgtgtctcagaaataaaacaagcaaatctctgaaacccatcaacaacaaaacaaaacccagctcaaagaattaaactttacctcaaatcacaaagacaaattcgaagatccaagacgaagaagaagagcagagtcagaaggaaatgaaggaggaaggaagagaaagcatcgaagagatcgtcgttttttgaaattgagagaagaaggaacaagtgttatgcgagtgagtgagcgtgagagagcgcgtggattttgtgtggaagtgtttcgatatttcttatgcagattgggaaacaaccagcttcgaatccttccttgccaattgccagaactttccggttggtcgttaaaccataaagtttagacctttgctctctcgcacgtgcccacgtgactcctcctacgtgtgagattaacacctatcacttatttggatatgttccggtggatttggtggggttaggttatatgtgacggtgtcgtttaatggattaatcggacggccgacaaaaaaaaagaaaaactattaaaaaaactccgttgccgggactcgaacccgggtctctcgggtgagagccgagtatcctaaccagctagactacaacggatttgtgttatcgtagagttatttaactatttaacttattacacattcatggctacatttctgagtcttcttccttgcttcttcaagtcaaaattcgaattcctcccttatctccgtcccctgcaatg

SEQ ID NO: 14067 - DNA, 3000 bp, Unknown
  misc_feature (1)..( 3000): cDNA_ID_3021523_gDNA_ID_2214695_Annot_ID_189515 3000 nt of promoter + ATG
gagagcgcgtggattttgtgtggaagtgtttcgatatttcttatgcagattgggaaacaaccagcttcgaatccttccttgccaattgccagaactttccggttggtcgttaaaccataaagtttagacctttgctctctcgcacgtgcccacgtgactcctcctacgtgtgagattaacacctatcacttatttggatatgttccggtggatttggtggggttaggttatatgtgacggtgtcgtttaatggattaatcggacggccgacaaaaaaaaagaaaaactattaaaaaaactccgttgccgggactcgaacccgggtctctcgggtgagagccgagtatcctaaccagctagactacaacggatttgtgttatcgtagagttatttaactatttaacttattacacattcatggctacatttctgagtcttcttccttgcttcttcaagtcaaaattcgaattcctcccttatctccgtcccctgcaatggagctcaaatcttcttccaacagtaagtacttcattgctctgcacccttattgctttgttctcgtttaatttctaacactatcattcattaatatcgcagataacattctagagcagctgagaaatggcttcgctagattcgagcttgtttcttctcctactgcttctgtgtcagattcaatatcttccacttcactccctgcttcattcataagcacaacgaagggaaatagttatgtgttcttcgccagaatcaattcctcgatgtgtgttttctcgtttattgaattcaacaatcgagtctctgataaaaccctttacgctaatctgcgaattgattcttatattcatctctaggaatcggtctcctgcagcgaaaaaggttgagaagtatgctgtggatagagttaaaggggatgggagatgtctgtttcgagcattggtaatgtagtttctgttatttttatgtgttcttgttggggtttcctgaataaaagatgtgatttttcaatgtaaattaggtgaaaggaatggcctttaataagggtattactcttaacccccaacgagagagagatgatgcaggtaactatatatttgatcatatagccttgttttgatttttgttgtgtgtttttgaaatctaagagattgaactgtgttaagcttgctgagattggggaatcaaaactggattttgtttcattctgttagcctttttggtggaaaaatgttttgtggtttctctggtctatacatttgaatgtttatctcttgttcatcatgtttttgtgtggcaaaacttgcctttgtttcacagatgagttacgaatggctgtgaaagaggttatatgcaatgaccccaaggaaagggagaagtacaaagaagctttagtggctatcactgtggatgagtctctgaaacggtgagtcataactcataagaattcattcacactcattaccacttttcagctaaatggcattgtttttccttatcacgttaagcatttttcttcagcttttgccagcggattggaagacacgatttctggggaggagagtccgagctgctagtgagtttcctgcatttaaaactgccatcatagagaaatgatctaatgtcagtgttttgcttcaacaggttctctccaagctatgtaaacagcctatcatcgtctacatacctgagcacgaggtaaacgccctttgaatttgagtcttatgtaagcaagactaggtgtttcttttgttctagtaactgtattcagaacttgagttatttggtattgtttatctagcatggaagaggaggagggtatgggccgggttttataccgattcaagagtatggaagtgaatttcgaggaggctggggaaaggggaagacaaacaagaatgttgttaggcttctttacagtggtagaaaccactatgatttgcttcgttgaccaaattttttttttttgcctctgccgttgacatttattgatatggtcagagaaattgaaattttttacccattagtgtatgtgtatcacataaggagtgctttgggagacaaagttactgaaagttctgtcaatgaccttaaactctaagatggatttattaacattgttggacagctatgaaggttttaccttaactttaaggttttggccaaatcaaaaggcaaagttcggtatttatatggttaatccgacaatgtgtaataattgtttgttctcaacacaatgtgtattatcttcttcgaatttttgtttgtttcattatgaaatttgattttttttgaaacatccacacattatttttttgaaaaaaataacccatagtttaaaaaaaaataattatacatgtatcattaaaataattgttccaaattaatgtaaaatccataaaatatggtatttatcaaaaagaataaaaaagtatattttctgaaaaaggtaattaatttgaagaaaataggatcgtggcttgcttgatgtttcgtcttcgctccgatctccaaactccttcgtccggtcgataaattcgtaccttgctcgattctcctctttgaccaaacgtaagttttcttattgatcgatgtttatcaaatattactcctttaacgacgttctcaaaatcgattaaagtaatgagattgatgaactttgattgctccagtttcattgtagagcctttacctagattagtcttcatataaattgtgtagttatagattgggaattgaaaaaattcagcttagtttcgagtttgatcgcagctaacgtaatttctagggtcaaatttgcgatttttagatgattttttaagtgtgattttgtgtccatcagcttaaaagagttctcttttagcaattcattgctactttctagccatggatgatgttttgggggcttattactcctttagatatgtgtttctttgttttcataaccaaatcaatgatcctggctcttttgattattctgcaggtcctgacgaaataagatg

SEQ ID NO: 14068 - DNA, 3000 bp, Unknown
  misc_feature (1)..( 3000): cDNA_ID_2705957_gDNA_ID_2214695_Annot_ID_136800 3000 nt of promoter + ATG
cttgattgttttctatcctctccagtttccacagagaaatcatggggttctggacactaatggaaggattgctactatttgcaaacgcactggctatcttaaacgaagaccgttttctagctcccaaaggatggacgctcgcagaactccaccaaacgggcaaaagaaactctctcaaaggccaaatcattggtctcatccacgcctgtcattacatgaggcttcctctcatgctctttaacttaattgtcattgtctttaagcttttctctggttaaaatgatcaaaccccgtttttgaataaactcaatccaaacatttctgcaacttctttagcaattcattttatagtatttaacttcaaaagctcagatttgtatacattattgttatgcttcttacaactacaaacacagtgaaacaaaataaaaacaagttctttgaaaccaaaagcaggaaactttgaatcaaattcattcaacaggaatcatgacctcattggtcctaaacggtggtaacgtccatggaggattatacctagcaagaacgaaatctccggtgatcttaaacccatctttctcaagatgactactcagcttcttcaccttctcactcaccacactctccgacgctataccactaaacttaatcacaccatacttcctccctccttcctccttaatcacaaccctctcatccgttggacgtggtgcctcctccgccttcttatacatcgacggcaacaaaaactgcatcgtcaccaacttcttccttccttctccaccaccttccttagttacaaccggagaagtcatctcaatcttctcactctccttagtaatcaccggagcagtcatcgcaatcttctcaccttccttagtgatcaccggtgcagtcatagcaattttctccggtttctcattctccggtttgccaaacacacctatgtacttagccaaaagctgaaagcctccgtctttatcacctttgaactccgacgcatcgtatgtaacctccgccgcaaccgctggtggatattcacggatctcataaccgtcaccggatttagtcaccgtgtatttaggagtctctacagcgattttaccaaaaaccattcccattatgtaagttttaccaaaaactattctcataggagaagtagtatttatcagtttggttctttcggttactaaacgcaaacgtgtggttagcatttgacaacgtatgtgtataaaaatatttcaatttatttatagaagaagatatgataaactcaaatcgaatttttggctttttttgtttgaaaaatcagagacgcgtcatggttaattatttgctttatgactaaatttacagaagcagtttgacacgtttctggtttttgtggttcagagcattctttcgttacgtggaggttcaggttacacgacaaagatgagagactattctcggtggtctaaaaaacgactttgttttagacaaaacggtgcgtagttgtttttagaaaacggcaggtagtttgcgtctcaaaggatatatctgttaccaaacagaagagtagggttttgtcttcggcggcttatataaataattttctcgagccattgaatcttagaatctgttcgtcgatttgtctgattaagctagggttttgatagattttcttattcgatcttgttttcttttggtttatgttttgataagagagcatcggtgatgaatccatgaaaaaattgttatccttgcactttgattgctagtgaagaaacaaatggggttttcgatgtctgagatgctcattactttttttgtcttctttgctcgattttgcttcgtgttagactgttaggattggatcgatgattgattagttaaaatactgcgttatctttctgcaaatctcctataaggatttgaagacaaatcatgaaaaacctgagatccaatgtttttcaatcaattatccaatgtttttcaatcagttgttttaaatctggattggttgatggatagaatcagatcgatgatgtcatattaaactgcgttatctatcttaaaatctccgaaataggagttgcagacactaaacagaaaacgctgagatctgatattagcctaatttcaattgatagtgtttatgacaatggcttgttgttttgttcttaatgttagtttttggattcttaattaacgagtagtgtccgaaaaaaaataaaaaaaaataaaaaaaattaacgagtagtgttatactgaacatattcataagagtaatgcattaatatgattggcgtgttcgaaagaagaaaaaaaactgcaacagagctcggctgatgcaaattgtgaacttgtatatgattgaaccaaacctgactcaaattaagccctttagttaggcttttgattgccacaagcacacaaggcacaaaagcgcaagccaaaaaaaacaaaagaaagccttgttgaagaaaacaaaaatcaaaaattttgcaaggaatgatcgaacccatgaactggttttcttactctcagcaccttaaccagtagaactaactgcagtttcagaaactgtagtgtaagaatgatttatcaaaccagacagtacaaagtagttaaacccaaattacataaatttctaccaaagttatcaagataaaaaaaaaccatagtttaaattgaaccgaaattttgactaaagttatccagataaagaaaccaacgaaccagccgaaaccagacggtccaaaatagctaatcgcaaaaatcttaaaatcgaacggttccataacaatatatggttttccaattttgtcccttacaaaaaatttggcatcacccgccacaagaaatctcccgggaaaatcgaaataaaccgttccaattccaaagcttctaaaatctcccgctagtcctttaccttcttcttcttcttcttctaatcaacttctctctccctctcctccgcttcttcacattccgatcattagtgttttcggagaaatg

SEQ ID NO: 14069 - DNA, 3000 bp, Unknown; identical to SEQ ID NO: 14058
  misc_feature (1)..( 3000): cDNA_ID_2705961_gDNA_ID_2214695_Annot_ID_136802 3000 nt of promoter + ATG

SEQ ID NO: 14070 - DNA, 3000 bp, Unknown; identical to SEQ ID NO: 14057
  misc_feature (1)..( 3000): cDNA_ID_2705965_gDNA_ID_2214695_Annot_ID_136803 3000 nt of promoter + ATG

SEQ ID NO: 14071 - DNA, 3000 bp, Unknown; identical to SEQ ID NO: 14056
  misc_feature (1)..( 3000): cDNA_ID_2705969_gDNA_ID_2214695_Annot_ID_136804 3000 nt of promoter + ATG

SEQ ID NO: 14072 - DNA, 3000 bp, Unknown; identical to SEQ ID NO: 14055
  misc_feature (1)..( 3000): cDNA_ID_2705971_gDNA_ID_2214695_Annot_ID_136805 3000 nt of promoter + ATG

SEQ ID NO: 14073 - DNA, 3000 bp, Unknown; identical to SEQ ID NO: 14067
  misc_feature (1)..( 3000): cDNA_ID_2705975_gDNA_ID_2214695_Annot_ID_136806 3000 nt of promoter + ATG

SEQ ID NO: 14074 - DNA, 3000 bp, Unknown; identical to SEQ ID NO: 14065
  misc_feature (1)..( 3000): cDNA_ID_2705979_gDNA_ID_2214695_Annot_ID_136807 3000 nt of promoter + ATG

SEQ ID NO: 14075 - DNA, 3000 bp, Unknown; identical to SEQ ID NO: 14064
  misc_feature (1)..( 3000): cDNA_ID_1807244_gDNA_ID_2214695_Annot_ID_136808 3000 nt of promoter + ATG

SEQ ID NO: 14076 - DNA, 3000 bp, Unknown
  misc_feature (1)..( 3000): cDNA_ID_3021559_gDNA_ID_2214695_Annot_ID_189496 3000 nt of promoter + ATG
gatgttctagtatggctctaaaacattcatccaaactacatcattggtattatgttattgccatggtatattcagatggatgataataattgtcacatatatagcgttattgtgaaataggataccaaaccaacttcatacaagaactacaaattatatacataaataatcaacaaataatatatagactactaaaattcaaaatgcttcagaaaactaagaattttcacataaaataaattctaggaattttccaaacgagaaccattctaaaagatgtgaaacaccgaagctcagcaacctcctccgcctccgcctcctcctcctcctcctccgcctccacctccatccccaccgccaccaccaccaccaccaaaacctccaccacctccatcaccgccaaagccacccccatttgctccatcacctatttccacatcttcacctccgccatcctctcctcctccaccatcacctccttctccgcctcctcctcctcctccgccgtcaccaccacccccacctttgcccccggctccagtcaaggccgcaagaaatatcaaaacaccaacaaaagaagcaatagcaatgataattactatccaagtatccatcttatgcaaaatcgttacgtttagctaccttcgattgtgtatatatagtttgttgccgagggttggctgcagacaaataacgtgtgtcaagcttgtattgacttaagacttttattattcatatgtttctatattcaaacttcaaaggttttcattacgggccggtaaaacttcatctattaattaaaatgtttctatattcaaagttttcattacggccggataatacattccgtatgatgcttgctttctttgataatgccaactatgacaaatcttatactaataaatatagatagctatatctttgtcgttgataaaataaaaaaaaagctatatcaatgtttgtctaagaatatatcgattgactcggtcagttgaagttgaattccaattggtttaaccgttcaatctatgtgacatatttcacacggtcttgaccagaatcaaacatgagaaagaagtgcatgcacatatgatcatatcagttttggataatttagccttgttttgaagactttgataattatgtggaagtatttatagtctggtatatatataattatgaaatgtctacaaatttattggatatatacgccacagtgacatgtttgaaaattcagtatatatgttgtcttcattgtttagaaaatcggacagtgaaatcttttttttttttttttttggtttatgtgaattactttgacgaaagttcaacagattatatgaacagtgaaatatttttggtttaagctgaaattttgcaagtgttatgattcgtatatttatggcttgcatgccaaacacataattcgaggaaccttaatatttaaactaacatcaataatcatttgacaaggacgatcagacaagtcacatttttaactcgacgaggtatccgaataagcccaatcgaattcttttccaacccgaatacccggtgatgtaatatactctaataattatacttttctgttcataaaaattgaatattctagtttttgttgtttgttctacaaaacttgattttctagcgttttcattttatttttattgatatataataataaatcttaaacttgtaatgactgaaaatattaatcattaacttatttttggttaaagtaggtcaagacgcaagtggtttctaatgcaggtggacttccattgatgattctagcattgaatgcagcgttgcgtatccagactagcgtttggctcatgtttgttacttagtatttccttatgttttgcttgcgctttgctttttagttaagtttgcttgtgttagaaaaccaaaatcaaactcttgtgttagcttagattaaatgaaattgtgtattcttgatgatcctaagtactagattgataaaaatattagtctgttattagttagaatttaacttactaaaacgcttgtaaaacgcaagatcacccatcatcgatgatgacaagcgttatcattaccgatgatgtagacactattcagaccatccgccaaatcaatgcagaggtcttcatcctcgggatcactgccggaaatgaccacaagttagcgtgtctagccgccggagcgacacagtgcgtcacaaacttcatagatgtcaaaaagattaaggatatcctcgaaagtctccccgacgtcccggtcccagccccccaccgtttaaatccacatcatcaacctcgatacattcattagtatatatatatatatataaacagaagttaattatatgattattttaacattatgttacattcattatatatacattattaaaataacacaaaaaaaaacgttaaaaatttgtcttaacaaaaattcattacatgctattaattttcatagatagtggatacatacgctatagtgacactgacatcttaaacaaaaatcaaatgtattaatttgtcttaactgtgttaagaaaattggacattgaaatattattcggtttgagttgaaattggcatttgacggatccgtggtttgcatggtgtaccaagcaagaatcgttggttaaaagaaaagaacacacattaattatcatgtttatgcgtaattgatatgtaagttaagtagattatatgcttctcaaaactaggtatttagacaatgagattagttagtcttaattattaaattaatatcccgatcttatcatataagccaaattatacgaagattcttaagaataatcattttaatttcactaacctctctctatctctctcttcattatccgaattaagccaatcgaatccttttcaacccgacgggtcgtgaaattccccaaaagattcctctttctcagctcaatttccaaaagctccgacctttacgatcctctagattctcggcgccggtttctcggagtaaata

SEQ ID NO: 14077 - DNA, 3000 bp, Unknown; identical to SEQ ID NO: 14063
  misc_feature (1)..( 3000): cDNA_ID_2705983_gDNA_ID_2214695_Annot_ID_136809 3000 nt of promoter + ATG

SEQ ID NO: 14078 - DNA, 3000 bp, Unknown
  misc_feature (1)..( 3000): cDNA_ID_2710890_gDNA_ID_2214696_Annot_ID_136813 3000 nt of promoter + ATG
ctccatccacttcaacatctgtatatacacaatattggcaaaaccaaaatctgaaacttccataaaaaggttaaactctcagtttaattaagcgagaatttccaaacctctagagcgagatcgtaacgattagaacaaatgagacgcttggagatcaatcagagctccaataacgagatgtcgtgaccaagttgatccgtttctgaagcagagaggtaacgttgcctcgtggacagttctttctaaattgtagcgcctcggtttcgaaaatatggtaatgcatgtagagaggtttaaaagaatttagtgttttgttaaagctaaatttggatgcttgctaagttaaatttcttattcatttggctttggattcattttggcctattgggaagttgaacacacatattttcatcaattgggtaatatatatatcccttttcaaaattttaaatcacaatatatgcaaaacaaaaaaaattatgattatttttttaatttgagatattatgtgatgtttcaaaacatttaaaaaatgtttaataataggagaattgtaattttaaatcttaagcaaatcttctaaatatttatatttttatatatggtataaccgcttcacaatttataattttgtatatatcttacccgatccaaagaaaaatatggatatccgatgtgagattttgaagtacattcgatattaagtcgggtaccaaatttgttgtatcacaatttaacccatccaatgacaaatgtacttcgaaaatactataattaactataaagattatgtctctctcttatttctctcgaattctttagagagagaaccaccccttgattccgattgaattcctttagagagagaaaggtcccttgattccgtcttgatctgaaagtgaattcgtcctttggcctattttcttctgcttttactccaaaatgcctccttatatccattcttgtcccaatccatagcatacctgaaaagactcaaaaacatatacctaaaacatagctaaaaacagtgaaaatagggttatatcaactcccctaaacttagtttattctttgccttcaagcaaaacacaaaagccgaactcgtggaagaagaacaaaggaactcccaacattctctagtctattgccatgatcattctaactaaatccatttgcctagcaagtctaatcaaatcctaaccaacatgtaattcttcgtaagcttacacaacattctagattccacacctaagttccacaactatatccaccaggctttcattcttgggtctcatcaagcaatctaatattcaagaactttctagactcattcttgtactataccatgataactcgactattctctttctttctttttttaattatttttatcctccaaacttgttcttttcagagataggataaaggagtactcgcttcatcggatagatatcctccgtatatttttcaacatttgcaattgatcattccttagaatgtaagataaaaggatcaaaggaaaaattcctaaccctttacactacaagaaatcatctcaatcacactttttttttatattacataggggaagataacttattctatatcatctcatatattaccaggtataaagaaggagtaaagttctatgaatactaaccgttttgatgaggtaaaaggaagaggaatgagattagctccaaccttaatggattgtgttggaaaccaagatatcctcaagtctctcggtttgccatatggattatccaatagttggattgagtcgaactttcagcaataatcaaccaggcaataatctaaagaaatacatatcataattcctaactagactatacaaaaacgttttttttttctttttgttttcttacctttttgttagaaaaaaagaaaagggaaattagcaaaactaaccaacaaaaactttatatttgaaaaactaacacctcaaactatatgtgatgtaatttatataataattccaaacataacatgtgcgtggtttacacgctctctttcttcttcattctgcttctttcatctcgaacttatattgttgccgctgtgaaaattcaaattgagggtgaattgcagagaatttacaatacccaaaataaagcgtggatacataaaacgagcaacttgggaaagtttcgaagagtgatatagatcgacaccgttagagtggcgatgcaagggtatccggtttttcgatttgggggtttcgcataacggcgacagggctggtgacggtgaagtcgagtaagcaacttccgggtgtgcaatttgtggcggggactatataatcgtcgaatttgagttgcgactagggtttgtgcattttgcatttgggggtttctaattagttagagattaactctgtttgggttgatagaagtgagaacagttggttctatttgtgacggcacctatacgaacatcgaatttcaggaaacattggtggattcgaagtgctccatcgacaaacgtgattgtcttatcaaagtttagaaagtcggaggtatgagttgaaatatttagtctttgtcacaaatcattgatgaactgtattcaataatttcctaattgatttgtgtgtttaattatgtggttttttcgctttagcatttgctgtcatttgttgttaaggtcggattgtagtgttaagttaagcgtgtatgtaatcctgaaactaatggaaagatggctacatattgcatgtgtggtttaaccacctatatggtgagttattgaacatttagtgccagtttagattacatgatttgtatacatctgttttgggtatctcgtaagcgaaaagaagtgataatggtacctttgaatttcagggtatctgttaaatgggggatgatgagttgacaaagcgtttctttcggctttgttctgaacccgaaggtcgaaagaggataaacaattactttacacttaggtggattgagattataaaggctgcactagatg

SEQ ID NO: 14079 - DNA, 3000 bp, Unknown
  misc_feature (1)..( 3000): cDNA_ID_2710886_gDNA_ID_2214696_Annot_ID_136816 3000 nt of promoter + ATG
gatactgagcagagactaatcggtcgcagatccgtcattctatctggatttggcttcttaggcaataagcatatttgagtaaagttccattcaacaggaaaggatcgtgaaacaaataacttcttaacttcctcacaaacctgctgtccaactacattccaataggattaaaaaaataatcccgtcatcccatctgctccaggtgcactgctactcctaatagagaacactgcttgtttaatttcttcgttagtgacctctttagtcaaagcaatattcatggtaggtgtaacccgaggtgccataccatcaagtaaatccgcagcattgcaaggttgtgatgaggtaaagagccgttgaaaataatttactacaatatcacctttagatccatctgcaaattgctccacgctattgtcatcgattaatgaaaaaactttattttgcgctcttcttccttgaacacttccatggaagtacttagtattcttgtcaccatcatgcagccaattttcctgagttttttgcttctaataaccttcttcctctctataagctacaaccaactctcctctccatttatgtaagagaaagtaattaggaaattgtttgctgccttctgtttctaaaaactctctcagcttcttgatctctgtcttagaatttgattgtgaggctcttttccatctggataatgatcttcggcacgctgcgagtctgtcaaataagcttgtgtgctcatccataccgtcactattccatccttgtctaacaatatccacggtttcaggtttagaggtccaccttttgtcaaacataaatcgaccaataaatgattggttttcattgacaaaccgagttatcaacggcctatggtctgaaccaattctctccaagtattcagactgcacacgcgggaaaatatgaaaccattcagcattcccaagagctttatccaatcggatttggatccacatgtcattgcgtttacccgcccacgagaatttattaccagaaaaaggtatgtcacggagacgacaatcttgtaccatgttgcgaaatggaataaaggaagattcttcacgaccaggcccaccaaacttttcagagttatcccatatctcattcaggtcgcctacaacaaaccatggatcattccttgctaaaccaatagttgttaaattgtcccatacatcttgtcttaaatgccaagctggatctccataaacaaatgaagcaaaaaaccataaggacccaagcttaacttttgtatcaatgattctcttgtccgagcggagcacttcaacttcatatgatgctttccaaaacaatgcccttcaggatccacgatatgaacattatcgtagcctaaccattgcttaactttcagtatgtaatcactggagttcttcgtctccatgaggaacagaatatccggaaaatgagtacgtctcatttcctttaaacttatgttagagaaaaattatttgatttttggcttgaaagttataaaactaataatttattctttaattcctgggaaattattttgctgagaaattctattgttatggtaactatatgaatatactgataaatgatacattattagaaaaataattaattataaaagggcattgcaaaaatgttaagagattttttttattataaaactatatttagacaaagtgaatataaaaatagtgtattaaatttgagaggaatgacacatgtgcaatgaatagagcgccatttgttagcttcttagagcatctccaagagatactctatcccctcaaatataaagttttaggttctccaagagatactccattacttcataatttagagtattgaatagtgacactctatatttggagtatcactattcaatactctaaatttgaagtttcaccttttttatttgcatttaagtccctaaaattcaatatttcatatacaaattactatgtttatcattttagtccttaaatttttatatattcaaagtatttcgacaatttttggcttgtaatctacagattataaataaaatgattcatctatgtcttcgtaatgcattgattgatcatatatgagagcattacggaaaaaaatttgttgagtaatttgtaatttataagttaatttatgtatttttaatttttatttatatgtattttatttataaatttattgttttgttaattaagattatgtgtaatattttaatgtatgttttagagttatttataaaagttatatggttttaaaattattatgaacaatataaggactataatgcaaaacacacattttagaaactttatatttgaagtataccgtgggagaagaaactactcatactttatatttgaagtttacatactctatatataaagtatctcttggagatgctcttagaatatcacttcgaggagatcttactttattatatagataaagatacatacttcttgttgcatcatcttttcttaactatttatagatgaccaataaaatttgtaaaactttttcattcggtaagttcggattatttgatattattatcaaaagatttaaatacatacttcttgttggatcataacgaatgccggttttctatttgtagaaataaacctaaatctattttctccctattttaaattgaaaaaaacaacaacataaattatggaaagcaaaagaaaaggcataaaaacagttcaaaacacacacatatgcattgtcaaaacacctcagtttaaggtctgccacaaactacaaaaccgcatgcaagccacttgtgtaaagtgtatatataccacttctttgtcttcacaccacatcacaaaactaaagaaataatcacagttatttttaccttttactcttcttgttctttaagacaattcaaaagagaataaggagagttttaattttctgtctaaagaagccgagcttcgtgaaaattgttgtttctcatcattgtgattcatcatg

SEQ ID NO: 14080 - DNA, 3000 bp, Unknown; identical to SEQ ID NO: 14079
  misc_feature (1)..( 3000): cDNA_ID_2710886_gDNA_ID_2214696_Annot_ID_189539 3000 nt of promoter + ATG

SEQ ID NO: 14081 - DNA, 3000 bp, Unknown
  misc_feature (1)..( 3000): cDNA_ID_3021584_gDNA_ID_2214696_Annot_ID_189543 3000 nt of promoter + ATG
gtgagatattaatttaaacaccacatctacgaccgacacaactttccgaacatcctcctcgtcctcatcagattcaccagctactttcttcatcttcttcttcttcttcctcgtcttcttttgtgcatatcctccaccagattaaacaccctcattgtgatagattttctacttctttgcgggagattcagacttagcggctgctttatcttttacgtttttcttcttcttctcattcctcttcacatccctatagcctttaacattccccatgtatgtcttcaatcaagtgatcaagtgatgggtcttctacttcatctagccacatatgaaatagctcgcttacatcatccgtcataaccattttacgcacacgcatatataacataagagattataaaacccatcagtatgtttacagtcagtcatcaataagtataacgcagacattgctcaactatgattccaccatcactaaaccacaaccaagtcattactaaagtataactcaaccatcaataaacaataacacatccatcacaaaacataactcagccatcacaaaacataactcagtaagtaactatcataacagagccaaaaccttacctcaccaccatgcgctgtaatatcttcagcaatggtcgattccattgttgcacgggtacggttgacaccccatctaagtaatagaatctcatcctctttgattacgttcccatatcgctctccaatggtgttgattgacttatacgcccgagcctgtaacacgaaagcaacaccactgatggtgtacgacttgccaataggcctcttcaactttatagaatcaacaagggcttcaaatgctaaccgactccataaataagtcttcatggcttcgtcatcaaaaattcttttggcactctcaaatagtatcctagagttatgatgcaagccaaaaagtccattggctagacgagtcaataaccccaaccatctacgcttttcaggaggccatgctctccacactactaagcctcgcctaagtatctaacttaggaccttcaccacaatgcacattcaattccctgaagaacgttttgtagtccacttcaggttcaaactactctataggcagtggatctgtgtttaaccccgtgatatgaccaaattaattcaagtcaaacctgataggttaaccagccacgagacaccaaatctccttcttcagtattcttaactgtctacagagtagtgaatgtacagtattatcagaccaaacaaaatgactatcaactagcttagcaattactttaagaggtgtctttttcatttgattccatgcatcttctctaattgattctctaatcagagggacatctcccatctcgatgttgtgattaatggctttattctctagattagattccccttctggataaagtcttggagggtaatcccttgcttggtcttcagacatctgataaaccataaatcagccataagcatacattaattcagtcacaacataaaacaaactcaaccacagatgcattaaaaatataactcaaccaaaacataaaaaaaaaactcagcaacaacatcacagaaactcaatcacagatgaaaggttaagccataactcagccaaacataaaataaactcagccacaatatcacagaaactcagccacagatgtaaggttaaaccataactcaatcgtaacataaaacaaactttgccacatacgcattggtaaaccataactcaaacacaccatataacaaattcagacacagatgcattgataaacataaatcagtcgtgaaacaaacagtaactcggccatcaaatcgaatagatctaacaaatcagccatcgtatgtaaatcagtgacggcgaaaatcaaccgtaataattgtcgataaaaaccctcaatatcacagttttcgtaaaacggtttcagtcacgggaatcacttgctgttgaacttagatgtcgaaaaaatctaattaaagttagtttagacacttaccggaacaagttcaaatgcgacttgatagggatgtgactttactcgacttaaaattcgacactatcgaaggattttggccgaaagagatgagataaatagaaaacattgacaaaattagggttccaattaaggaatcaagtcgacggaacaagagaagagagagccagagaatagttctttttttttttttttttttttttgcacgcggattaaccgtgtagagggaaaaaggaaaactaaaaggtttaacgaaattttcgggtaatgacgtggattaggataatgacgtggataatgattgtttttaaattaaaaaaaaaatattatttagataaactaatcaaaggtgttaattgtaattatacaaatgctcaaaacatatgagtaattttttaaaactctatgatattctagtaataaacatacttttctatgatatctgagtaattaattcacccatttttaatataaaaataccaaaaaattagttttagattataattcataaaacctaataagtttttagtttaaaactaatatatcatagtcacaactcatgactaatatgaactactgaggaacaatgggagattagatcgcatagagttcaattcccgttctcaacccatgaccaatatgaactcaaagtttccttcaaaaccctcgttgctccgttcgatgcctaatttaatagggaacctcaaagcggctctatttcattctattccatacatatcccaattccattcatttaatatcattttggtgtcattgacataagagatgtaatttctagtctatctctttatatttatatatatgaaaagttgcaaaatcatcatataataatctagaaattgaaatagaaaagaaaaaagagaggtttgtgatggaatttcaatcttttatagtaggtaatctagtatccttatgcatgaagataataaatttggtcgttgtggtcggactctattgtggattt

SEQ ID NO: 14082 - DNA, 3000 bp, Unknown
  misc_feature (1)..( 3000): cDNA_ID_3021580_gDNA_ID_2214696_Annot_ID_189544 3000 nt of promoter + ATG
tgtcgcttctagcggaattgcttttttgttgttacaaggtgggagaactgctcattctaggtttggtatacctattaatcctgatgatttcacaacctgtcatatagtacctaattcagaccttgctaatatgctaaaggaagcatctctcatcatatgggatgaagctcctatgatgagtcgttactgttttgaatcattggatagaagtctaaatgatgttattggaaatgttgatggaaagccatttggtgggaaggttgttgttttcggaggggatttcagacaagtacttcatgtgatacatggtgctggtagggcagagatcgttttagctgctttaaattcatcttatctttgggaacattgcaatgtcctcactttgacaaagaatatgagtcttatgtctaatgatttggataaagataagggagagaaaatataagaattctctaactggctccttgccgttggtgatggaagagtttcagagccaaaatgatggtgaagttctcatcgatattcctgaagagttacttattaaagatgccaatgatcctattgaagctattaccaaagcattttggatacctcgatttgtcgcagcctaataatgatcctaaatttttccaagagagagctatattgtcatcatgctcgagaaacttaatggtaagctaagtttaaaattgccgtggactaagactattttgttgtaagaattctaacaattgttttcaaacacgtgaatcaattacttatttaagtgcggatagtattgatcctcaagatccagcgtcattgaacaatcccgtcttcacaccttatttcctcaatagtataaagctttctggtttgtcaaatcacaatctcactctgaagattggtacaccggttatgttactaaagaatattgatccaaaaggtgggctatgtaatggtactagattgcaggtaacgcagatgggtaatcatatactagaagctagagttattactggagatagagtcagagacaaagtgataatcataaaagcacagatatcaccttcagatacaaaattgcctttccggatgaggagaaggcagtttccaatagctgtggcttttgctatgagaataaagaaaagccaaggacaatcactcaaagaagttgaaatttatcttcctaggccagtattttctcatggccagctatatgttgccttatcaagagtcacttccaaaaaaggattgaaagtgctcattgtggataaagaaggaaacacgcagagtcaaacaatgaatgttgttttcaaagagatctttcagaacctaaggggttaggaattcgtttcattgctttggttattcatatgatgttttgtattgttgtttcaaacaacaatgtttttatttctagacaatcgtaaaacagatttcatttctagacagcataaatcatctatttccattaacgctaaaaacaagaaagctttattcaattataccttcagtcaaccaaatctaccaacgaaaaacatggtgtataaacttgattgaaagctgatgtgtaactaaccttatatatatgagtattgatttggttgtcgacgatttgtacacttaaacgccactgagatgtatgaacacctatgaacaacaaatctcaggtacctatgatataatatataaaccaattcatcatgtcaattgccttataccattcctatatggaatcattaaaaagagttgcaaataagacatgactttataagattgtttgtattaatgacagctgctaaattaaaaatatgtgaatcaattcattggtttagctctctcctataagggtagaaacaaataagaaacatgcatgttcccgagtcaattgaaatgtgtttgttcgcatttaaaggtgccgtatcacagcttatttctgcacataaatcgtgaaaaacaattaactagcaatgttataagacaattaactggctaaagtctatctctttcttagctactctaaacgagataaagcagtacaaagaggaaaccaaactacgagctttgcaacatataaatttcgaaattagtgctaagggtaataaccaactcaatcaaactaaaatctaagaagtcatgtgtattgtcaatcttgatgaacggattggaaaactcataaactattacaataccaaaaccataaccaaatatatattttccagaagattgaaaaatacctgaactttgatactataagagaaatttcggatggttttgtagtaatcagcaaaatacgagtaacctcagcactaattttaatcaaaaaatgaataaagtcaagctctttcatatattcacataactatttggttagactaatgagacaaaaccaaactaggagctttgcaagtataaatttcttagttttagtaaagggtattcaccgattcaatcaaactaatatctagaataccgtcaagatttttgtcaattgaagtaactgattggaaaacacataaaccattgccataccaaaaccataacctaagaaatttgtgaagaagattcaaaattacctgaactttgataatgttagagaaagtgtcgattgttttgtagtaatcagcaatcaattcaaccagagatgtctgtattctctcaaatgctctgattctatcggcttcaacattgtcatgcacccattgtagctcaagagatttttgtaaaaaaatcattggaagttgaacagagatttgtaatgtgggcaatcgctggtgacttacatttttggaagacacgaatgctggtatacgccaaaccaattgcaaaaatcggtggtggaagatcaatctgacgataatggattgaatgatttagctaaagtgagcattgctcttccgtcgtcagctacggatgtggtgaagaaggtggtgtttgtgaggaggaagagaaggaggagaggcgttggagcctccattgattagagaacacgacagtcacgtagagaggaggaggatg

SEQ ID NO: 14083 - DNA, 3000 bp, Unknown
  misc_feature (1)..( 3000): cDNA_ID_3021594_gDNA_ID_2214696_Annot_ID_189540 3000 nt of promoter + ATG
cagctcttgcctcttttgggtcacccaacatgttaacaatggaagtatcaatcgcatcttggttctctactcttgaagccctagctgaaagtagtatcacatagtccttgtctacgtctttggagaatacctaaagaacaaagaaatccacaagacatgaagcttctaacgtaaccaatttaaaaacaaattatgatgatgaagagatttgtcttgaaacctcaatcaagttcttgtcaactgtaagtttgttgagagttagagttccagttttatcgctgcaaagaacatccataccagccatttcttcgatggcggtcattcgttttgtgatggcaccttgttgagacaacctatgtgatccaatagccattgtgacagacaacacagtgggcatagcgattgggattcctccaatgagaaggacaagaagattgtcgattccatctctatactttcgatgttggatcggatacattataattatctcaatcaacattcctattccgattgaacagatacagaagttaccaatggcggttaagacctgcaacatttatcaagaccatattagagttatatcataagattgcttgcatcgcaaggaaatataattcagaggtcagtcatatataccttttggaaatggccaacattgttagtactatcaacaagatgagctgccttgccaaagaaggtatgcactccggttgcaatgacaacagcctcgatctcaccttgtttacaagtggagccagaaaaaacctcgtctccctggtgtttagtagctgggagagattcaccggtaagagcagattggtcgatcttcagaggatcaccttctaggagacgagcatccgcgggaacaatgtcacctaacttgatgctgattaagtcacctggaactagaatcgcagcttcttgctctccccatctcccatcccttaatacctttgtttttggtgcaagattggccatgagagctgcagctgcattaccggcattgttctcctcgatgaaactgattgtcgagttaatgatgagcaaacatgtgattccaacaaagtcttgccaatccggtggcctcccaccgccatttgccaacacaatggccatgattgcggcagcttccatcacccatgaaagagggttccacataaaccctaagaactttagaaatttgttctctaccttctcttctagtttgtttgccccaaatatttgtagtctgtttcttccttcctctgaagacaaaccttcccgggaacatttcagctgttggaacacttcgtccaccggaattttctcctgtaatacatacattcatggtttcgtacgttttatcaacaattcatgttaaaactattataaggtaaaatgtgtgttttagcaacaacaaattacttacaagatcaacattctccttctttatttcatcccatgagatatcagcagccatgatgaatcacaatgatgagaaacaacaattttcacgaagctcggcttctttagacagaaaattaaaactctccttattctcttttgaattgtcttaaagaacaagaagagtaaaaggtaaaaataactgtgattatttctttagttttgtgatgtggtgtgaagacaaagaagtggtatatatacactttacacaagtggcttgcatgcggttttgtagtttgtggcagaccttaaactgaggtgttttgacaatgcatatgtgtgtgttttgaactgtttttatgccttttcttttgctttccataatttatgttgttgtttttttcaatttaaaatagggagaaaatagatttaggtttatttctacaaatagaaaaccggcattcgttatgatccaacaagaagtatgtatttaaatcttttgataataatatcaaataatccgaacttaccgaatgaaaaagttttacaaattttattggtcatctataaatagttaagaaaagatgatgcaacaagaagtatgtatctttatctatataataaagtaagatctcctcgaagtgatattctaagagcatctccaagagatactttatatatagagtatgtaaacttcaaatataaagtatgagtagtttcttctcccacggtatacttcaaatataaagtttctaaaatgtgtgttttgcattatagtccttatattgttcataataattttaaaaccatataacttttataaataactctaaaacatacattaaaatattacacataatcttaattaacaaaacaataaatttataaataaaatacatataaataaaaattaaaaatacataaattaacttataaattacaaattactcaacaaatttttttccgtaatgctctcatatatgatcaatcaatgcattacgaagacatagatgaatcattttatttataatctgtagattacaagccaaaaattgtcgaaatactttgaatatataaaaatttaaggactaaaatgataaacatagtaatttgtatatgaaatattgaattttagggacttaaatgcaaataaaaaaggtgaaacttcaaatttagagtattgaatagtgatactccaaatatagagtgtcactattcaatactctaaattatgaagtaatggagtatctcttggagaacctaaaactttatatttgaggggatagagtatctcttggagatgctctaagaagctaacaaatggcgctctattcattgcacatgtgtcattcctctcaaatttaatacactatttttatattcactttgtctaaatatagttttataataaaaaaaatctcttaacatttttgcaatgcccttttataattaattatttttctaataatgtatcatttatcagtatattcatatagttaccataacaatagaatttctcagcaaaataatttcccaggaattaaagaataaattattagttttataactttcaagccaaaaatcaaataatttttctctaacataagtttaaaggaa

SEQ ID NO: 14084 - DNA, 3000 bp, Unknown; identical to SEQ ID NO: 14078
  misc_feature (1)..( 3000): cDNA_ID_3021617_gDNA_ID_2214696_Annot_ID_189532 3000 nt of promoter + ATG

SEQ ID NO: 14085 - DNA, 3000 bp, Unknown
  misc_feature (1)..( 3000): cDNA_ID_2706002_gDNA_ID_2214696_Annot_ID_136817 3000 nt of promoter + ATG
cttgactcaatcaagattgtgaagataaaacaggagatggttgaaaagaataatgaagctaaagtcgttggtgagaagctcaatttctgaatgggaagcagaagagggagtacgcagatgaagttaatggagttaatgtgaagccgatggagtaaacataaaagtagtattcatgttgcatttgcttctgctttgttgttttagttttaataagtggtttttctttactgtttccacatttgtttctgttttttaaatgataattggttttccatttggtttttaatcttcttagttcctcaaaatcattgaatactaaactcttatcacctttcattatctaaacaaatgaagatgtgtcgttctgttctaaaacaacaatctctctcagaagaggaatcaattgtctctgttgcaattttagtaattggcagcatgaccctttgagttaacaaagtttgatgttattggcaaagtttatagaaaatgcgttataaatctaaatttgcatacggtatagagttgttgttaatagctctagattctctacagcaactaataaagattggatgaagatgaggaactaacctttataatcgttcctcagtcgtcagattgcaatcttgattagattgtagactaagcattaacctgaaattaaaaaaacaacaacatcattattagatgcagagaatataatagatacttaacaataatattctgatttggcaatcaatataacaataatatataattgcaatcatattaattagatatcttaacaaaagattatataatcttcaagtcatcgctaagttttattttaaactctattagttagaaaattatagttctatcgttatacaaacaatagcttaatgaagttaagaagtgccttggttgataaaggtgaaaaccacaccactccatttgctaagaggaagtgttcatcgagcaaaaacagtttctatagtcaccacaaagctaaatcatctggaaatgggtttgttattccactgaaatcaatatttgctcggttaattacggacataacaaaatccaagcctatggttttagaagagtctctttgtcctacatgaaaaattccagcacaatcttatacatgtatatcattatattctacagtatgctaattgatttatccatgtagttaagacttcactactttgttatatgtacaaaatggcttatatgttttttttccaaatgttcagttgatgagaacacctatctaacacctgtttgtgttagacaatcattgtcttcgcaagaacaatactctttatgcccgcggtccatatcaaacataacaaaatctacttctgtggttttagaagggtctctttctcctttagctaaaaatctatcagtgactgatataggtaaatcattctctctcgaagaggctaaaatatagttctatataatattgactttcgatattttcatcaatgttgtttgtggcttctcttaattttttcaggctcaattgatgagaactcatatctaacacctgtttgtgttagacaatcattgtcttctcaagaaccatattctttatgctctgtgccaattacgccatctaatgtctctcaatgccaggaatatataaattcttctggtatgttgatcgacatactatttttacaatgttttattggttaaaacataacttatgctcaaaacgatccttataaatgtatgtagaacctcttgaatgtttaacaactgatggatcaatattatctgatataccaattaaacagtcaacttcaatacttggcagcaacgattttctaacttcaatcagatcagaaacaatcaaatgtgagcattatttgtctacacccaatttttgtatatgagttttgtttagatactattgtttttcattctaacataattacttatattctgttttcagcatacagtgcaacagaaaatcatccaaatataaagactgtcagaataagccaatcttattctgaacttggttcacaaaccttcttatccgacataagaagagaatctactaaacgtgagtttctgtttgctatagtttctgactttgagcttttattcatcttaattctaatatgtaattacactctaaatctatgttctttttttgttagattccattaatcaggtttctaaacttgatacactgaaattgaattcaaatactaatagaactaagaaaagggttctaggagacatatcaaaccaacctgatagaagacgacgaggtgagccacttaaaagcagaattcagtattctacacaaaacaaagaaaatgtcacaccaaaccgtgagtatacaattatccaccatcacgaaaataataatgattgtattctatcaatattcatatgattgcagacctaagttattcattttcctgaacgttcaacagtcaaaaattcacaacagccggataaacaaagaaaaactaaaaagactaaagatttggatgactgtcgtgtaaatctgtttgagtcaatccctttagatggtaataatcgtgatttatagatttgttctttgaaatatgaattcgattttgactaataacatattgttgtcaaacagaagaagatatttctgatctcgaacaggaatatgatgttagtagtcaagaagatttggcttctgatagcagttctggatatgaaactgaaacctctgttgaaacacatgaaacaatgcatccacagaatcaaagggcaccgtgtattaaaggtagaaaagatataagtcctaagcgaagtagatatactagaggagcacctatccacaggaaaaggaaaacaggtttgtatgatcgtttaattatttttagttttagaacgaacatatgaataacatttttaaaatcgaatttgatttgtttttttttttttgcagatcctctcattgacattccttatttagatcacggtgatccaaaatggaaatgtcaatactgtggtgctatg

SEQ ID NO: 14086 - DNA, 3000 bp, Unknown
  misc_feature (1)..( 3000): cDNA_ID_3021692_gDNA_ID_2214697_Annot_ID_189549 3000 nt of promoter + ATG
gaatgagctcggctgcttctcctccacactgatttttctccgtgcctgctccgcatgcgcttcgcgcgccattggcgctttgctctcctcttattcttcattggacggttcggttcggatggacttcgccgttctttcccaactaaaaaagaaaaggctgtatcacatcgagatgtcgattcgttttccgcccccaatgagatggggaatttgtaaccccctatttctactttggggcccttcatctttctgaatctaggcccgtcccggctcgtgtcgttccaacaaccggcggggagcatctcagtatacgatcgcgcgcagtaactgggagtcctattacacctaaggcgaacttcaattcaccaaaccaaggttcatctcgtgtagtgattgtggactctactaaggatattgagtagacggttgatgtatcagactcgaccctatctttcgtagcatgcattcccatcggtgtcgcaactgattcggtaagctacgtgtccggtgcacggagaactgccttcggtcctccaaacttacttattcgtggcaaccttccggccgcccaacgacctataacgctagtcactactcccactggggctagaaagtaagccccacaacccaaagcggcgaagaacaaatagaatttgctacaaaagccggctaacgggggtattcctgcgtatgagaacatagtaatggagaaggtaatagccgaaataggattcgttttggctagagcgcccaaatccgctatatatttgacacgggtttgccgtaatgctgaaactatggcgaatgcatccatcgtcattaatgcataaataaagataccaattagtagtgattgaattccttctatggttccacatgagaaaccagtacgaatataacctacatgtccaattgaactatgagctagaggtcttttgactttcgtttgggccatggcggccagtgctcctaagatcatagaagcaatgctgcagaaaaagaagatttgttgcaatgtagctccataggaaccataaatagaaacacgtaaaatattagcagaaatagagattttaggcgcaatagaaaggaatgctgtaaccggggtgggtgaaccctcatagatatctggtgcccacatatatagagtcaaagggaatatggagtccgagggggagggggttttcttcggggctcgagagattgaatagacccacaagtttgaaattcgccactggggaattcacacgaaagggaacgaggaattctcaacgaaaaaagtgctctctgaaccgaacgtgaaagtttttttccatcagacggctgttcctgtaactccactctcgacttggattatatatccaaaaaggtccgctctcggccattccacacgctgcctagccgaggtgtggtttctgaagtggattctctcttttctagtagatgccgaacctgctgccccattgactaagaagaggggcgggcgcagcagctacatggaccccttcctttctgttgttgccagcgctttcccgggccgagccggaatttttgattattattctaatgggcaggcaaaggccgcaggctgctatcccaataggccagcgggcggaacgaggagaggctccggcaatcatagcaccgcggtcgaaaaagcgtgctcccttcagataacacgcaccgtaggctatcctcggccttcttcgttttcgatgcaaaagaaaggaaatctctcgatctccgaaagccttttccttaccccgccgcatctccctcccttcgtcgagcctttccggggttgttccttccttatcaaaacttggcgggcattctttccagccgggggatgggttttgtttgaacataggctcaaacataattttaaggtcctagctacgccatgcgttcaataccaaatctggaaagctgcagaaatgacaaaaagagggcgctttcctatgttgcactgaaaaaagaaggacctaagagcgtcttctcttaggttttttcctcccgcgcccgccgccgcctggcccccgttagaggggaaggggaagattagcaaagcgaaaaaagacagagggagggggagcagcatcttattctcttcgcgagaacttccggattgaagaagcattcggaacgggctccgcgttcatttcattggcgggaaacgatccaatccattcggggcttcggccaaaaacgaattcgacttgattcatagatagaatcaatgataaataaacaaaagatagatgaacgagatatcttttctttctataaaaaaagaggaatagaatagacatccctttctttagatgtctatctatccttccgattttatatcgttatatctgctctctcaatttttttttagagagagcagatagatcctatcccctatatcgaacactaattcctatctattgataggaagatcttcgtctaatagcggactttgcctttttttaggaatttctcatatccaaggcagcttaccacaagaaccccaccccatacaactagttgggggggctgttcgccttttgaatcaaacaaagtaagttgtaggtaggggcttcatagctactttcattctaaaggaaagcgaagaaccaatctttagtcaataggagccctacttccctcgacctcatcacttcaattgttgcgcaaacctctttcttagtcaccgggcggagcgcacctttgtcacagtagggcgagctgtttgatagtgacttcttgcgtttggtagggcgacgaaagggctacttccttcaatctaggaaacagccggaaactcgagaaggtcgcctttggaagcgttcgccagtaaccaaagcctcactccttccttttgattatgtcgtgacgctgactgaatccaatctataaaaaaacccggaaactcaacaaagtgcgttccctttcgtcaagtaggtaaagtaggcatacgaaccacttttgctttgcggaataaaacaatgaatg

SEQ ID NO: 14087 - DNA, 3000 bp, Unknown
  misc_feature (1)..( 3000): cDNA_ID_3021672_gDNA_ID_2214697_Annot_ID_189562 3000 nt of promoter + ATG
tatgttagtatctagattgagtatcataccattttccaaagaaagatagtatgctaaaatattatgctaatatggtcatttggtatgctcttatagggatagagcactatgtaagaggtctcgacgagcctccaccatactaagctaaggtctactagctatagtagctagatgggaatgtagcctagcagctagtagctctcttcttatagctcggtagttggatctttcataattcctttatggttagagcacactgggatagaagaatagatgagtttgtatctttcttcctactttttttttatcggaaaacagagctagaacaaggaacaagcaacactagcacttaaaataaggtaggcggctaaaacaattgggcatttccttgatgtccggaaatggtatatctgaaaacagaagaaagactttcttttgaaccaaaactaaagatgatccgatccgtgcaccgcttttcttctctaccctttagaatccaaggaaaaggcaaagagaaagaggttgcagagggcacctaaccttccaaagacacagcagctctagcctaacttcggattcgaaaccatacttccctgacttcctctcaacaagaagttaaggctgaaagtcctaatcttcttatcccgatgcctggagtagcgggtcttagttcggattagtaccttttgagcaaggtaagttaagtttcggcagtgaaagaaagtaaccaggatccgcttaaccagttatggatgaaggtaggtctactccaatccctcagccaataaacaataaagtaggcacatttccctcggcaaagaaagtagtccctcgctaaagagtagacttgagtatcttcgaagtcaaagccgaggaataagactcagttcgggtagagcaaccatttatattttcattattcttacccgtttacataaatgaaaaataaaagtgaattaccacggaaaatatccacctaaaaaaatttctggggttacttggcatagtcctctaaagaccctatttagatactctttcttccgagttcgagataaggaggaagaatggggcgacagataaaattaaataaagagcaaaaatgcttgactttcattttattaaatataatggtaggtagggcttcttttaggtcataaagggaatagtacttttagctcgttcatctaattctgctggtctataggagtggctcccagggctatgtgatagcacccaaaatacgacggcctgatcaagagagccagaagctgggtccgcccgccggagcttctttcaatttccggggggcttagcttgaaccactcccaagtgccaagaaccggcgaatgaaggctccgtggcggcatcggagctgccaataagctaatccgttcccagtgagctattacgcgctctttcaagggtggctgcttctaggcaaacctccttggctgtctctgcacccctacctcctttataactgagcggccatttgggggccttagctggtgatccgggctgtttccctctcctagagaaagaagttctctagtcactaaagtgcgtttcactctcgttcctctcgtttcactcgggttgctaaagcacctctcctctgccaagctctctgtcttggttaatggttatccaaaaggatatttctcatgttaggcggtgtgagacagggggataaaggatcccccgttgttattttgtattgcggaagatgtcttatcacggggtcttaccgggcttaatcacctgggcattctttcttcaattaccgagacctgtacatacaaagatctaggcagctcatcttcttctaacgaagtcagatctttttccataccataacatatatagaatcgattttcttttctgatcgctagcctgccgggccgcccccgcgatcaaactatcaatctcataagagaagaaatctctatgcctcctttttcttggttttctcccatgcttttgttggtcaacaaccaaccacaactttctatagttcttcactactcctagagacttgacggagtgaagctgtctggagggaatcattttgttgaaatcaattaatctaatcatgcctcaactggataaattcacttatttttcacaattcttctggttatgccttttcttctttactttctatattttcatatgcaatgatggagatggagtacttgggatcagcagaattctaaaactacggaaccaactgctttcacaccgggggaagaccatccggagcaaggaccccaacagtttggaagatctcttgagaaagggttttagcactggtgtatcctatatgtacgctagtttattcgaagtatcccaatggtgtaaggccgtcgacttattgggaaaaaggaggaaaatcactttgatctcttgtttcggagaaataagtggctcacgaggaatggaaagaaacatattatataatatatcgaagtcctctccttcaaatactggaaggtggatcacttgtaggaattgtaggaatgacataatgctaatccatgttgtacatggccaaggaagcataaaatgattctttcattctatagatacctctggtaggtaaagcactcgactgtgctttattgaaagttcccatcgcgggggcgaggatacttgccttcgcggttcgactttcttttcaggcttgactcattcgctagcttctcctcccctttagagctctttatgatgcccactgagtaagattcggggacttccggcgcagaagctcattctgaaccgcgggaaccttcgtctcaatcttcataatcaatttatgccatcttaaaaaaattggaatcttgttaggtacccgtacgacagctctaataatgagctaacgtactcatctttagagtggtttgtgcgcaggctcgagaagttgctgcccgcttcagaagaccttagggtgccttcgattcctggacgactttgttcgtcgtgtacaggggacgggaagag

SEQ ID NO: 14088 - DNA, 3000 bp, Unknown
  misc_feature (1)..( 3000): cDNA_ID_3021657_gDNA_ID_2214697_Annot_ID_189568 3000 nt of promoter + ATG
ttataaaaaaaatataatccggagaaaaaccttcaaatagaatccgaatagaaagaagcattaggggtgagaatgacgccaagtgccccgagtagctatggtatccatagttaactttctttcctgcatatgtagggtaagtactttgtgctttcttcgtctagctcacacaaggtgcagagtggcgtgttgactcgagttctttgaacaagctctccccacatcaattgtgaattgacgatgcaatgctactattctgcagaagaccgaaagtgccaagaagaaaaattagtgaaagagttttctcgctagacgattctgtagaaaatagagatcatagatctggtgcgtcttagcatgtaacggactttccccaatcgagaagaagaatttaatacaatcgaagcactcattgctgacgtttaccgctttctaggcccaacgcataaactttactagagtccgagaagatcaagaaaaatgcatccggtggtggtgatcagagctgaatctcattctttttctttctagaagcatacgtcaagtgtactgactcaatcaacctatcggcctacaaaggctctccattctatacccctagccctacattaccactcttaccattatcttaaagataagataaggaccaatggcaagcatattcaagtcagtcggtcataaaagtatttaacaaagacaattgtaaggtctgcaagcctccctattacttcaaactgaaacagaatcaagggagatatgaaagaaatgaaaagaagatgtcagtccctctcacttgaacaagattactaataagaaagagaagagaaggaccaacggccagtaagttcatcctatccaccactttaaaatgaacacgggaaagggaataagaaagaataaactgctgacgcagctgaaatgcactaaaaaggagaatgtactctcgctttttcgttccgaggaatgagagaaggtatccaagtagttagcgagacttcaagaccagcagccgataagaaggtcagagtcacaatcgctttctcaattgacactgcgccagaatctaccaccccattcattgactatctcacctcacctcccatgggtctgggcgcttagcagcccctactttcacatttcttcctatgaaactacttggtctacttccatttagactgagagatggcgtctctttcgacggattgatccggacttccccacttcaacactcgcaggaaagaaagaaaagaccagaatcctactgaagctgctaacagagactgagcagatatagacctatgagatttgtacacttcggcttggcaccttcttttggttcgtgctcgcacgggccgtttctctgccaatctcgaattagaatctttgcttacccgtgggccttccaggatcactttttgagctcgcaacgttgagtttgattcctcccacccagtggatccttactaatccataatatgaagttaggttagctacttccctcagtggggataaggacagaatagaaaacccgaatgaaatgggatttttcctattatctaaaatagggctttgaaccagcctgagagaccatttttctttaaagaaagtcccgttttaatgatttacagaaatttcagttttttttgttcaattcttcaaaaaaaatacttcctgccaaagcgagcaagtcgcctatttcagggaagctaaaagcatgtcgtcccgcctatagtcgtagccagttcccttgcaggccttgattagcaaggaatagagagagcattgaaagtacgtaactctcgaacttgtttctcgagaggttgtgaacacaaactcgactgataaaggagaggtccggaggtattaactagttgatgaggtctcgacgagcgactaaaaggagaggtactgacgtgactcgagtgaaactatattgaggagagggaaggggacttatgtaactatattccgaatccttctccccgtcaaaatctgcctcccttgcccataaggagagagtctccctagtgaggaatcctttagaactgatgacgtcctagctgtgagctgacccaagagctacactgattaggaagcagattccgcacagaagaccaagcaaatctcctcttctagtcttacccccaggctgtggtgctacgagatggcaatttatcgtatagaagaatagatccgtgggcctattgattgaccatagatcatagaaccgatcgactgctatctaagagaagataagtagttcttctatcgttcaagggcaagggggagaacatgtagcggcttgcctagatctcgtatttcccacgtagtccgtaggtcaaaccaaggattctcttcacagtcttaaaggatgtatctctcctttgcgctgacttatgctctgcgagctaggagcgcatcataggggcagggcgaaaacgaacataggatcatcatcatggcccttttcttctttcttttgctgctgatctcacatcgagagcagctccttcttgttcagggtcatcagatgagagatcttcttccgactccgagaaatcggtcaaacgggaggctaccctctccttttagtcgagtaatcaatccctcgactcatctctctatccataaaaaagcccttcccagaggagagcggaagctccaggatgagtatgccctggattcccggattcattctcgtcctgatccactctggaattttcggaatctacaaaaacattctaggaaagggctcgtaatgatcttctcaaagatcacaaggtgctgaagtggcaggataggagggggatccgtaggtttttgtgaaagggatgctcttacttatcatgtctgaaaagaaaaaccgaattcctcgatttcattcgattcatccacatttccatttcttgtagaggaaggctaactgtgcttgctggctgggagctgtatgagcggtaacgtccacgtacggttccgtgagaagggcggtggacagaaatg

SEQ ID NO: 14089 - DNA, 3000 bp, Unknown
  misc_feature (1)..( 3000): cDNA_ID_3021669_gDNA_ID_2214697_Annot_ID_189563 3000 nt of promoter + ATG
agataagaaaaggcgaagcgttctcttggtttcccaacctgttgcttctagaggctgccctctctcggctggatgttggtccagcctactacgaggatcccgtatccaacaacccaacctataaaaaggacataaaaaccccttgtataggttggagctaagaagctttccttattatcagagaaaggggaaagggcttttttcagctggtgcgcaggagcgcacttccgttttccctttactagtagggtgggggtcccgtggttcctatgccgccgcgtttcccggtgcttttcttttagtgcttcgacccgaagcgatagcttctagctagttcagtggataagatggctgcgctccagctcactcaagaatgggacgacagtggtccgccggcaagctcgttctgatcttggacgcagtacattggaatcctgaagcaccaccacgaacgctaccgcgcgttcgcctgcagtgcggtaaggcaccaccctgttgtgccagcagccaactccggcgtgtcagcttagttatcctcatcaagccacttacttgatgtctagcttcccaactggtagacggttccttttcccccagatcaatgaagaaggtagaagtaagttgattcttccgaagaaccggaagcgaagcgctatgccggggtgggggggacgggaaaagaaacggctccgaagaaataaattggggttcccaatgcttctctacgcccaatgagatgcgccaaccccgggatgctttactcctaacccacaaggttccgagacggagcttaacctgagtcttggttaagaacggcgatgatctacgtttcacacgacgcacgattccatggatagtttcattcgacatcgtgatggaggacatagcttacgatcatcggctttgatcatgccgctaggcatttgattaagacattgcacaatgatccgaagactttgtcgcatctcttcgatacggatacagtaacgatcatagcgatctcctctggtacctactggtacgtcaagatccgattggtcatgaacatcgtaaggtgctgctcttcgcgaatcccagcatacccctggttgggatgggtaggcccaccacttcactttaacttaggcccgggccgagtcagtgggggaccctgtcgggctcctgccccccccaaaaaaaacaaactgtacgtgagagtttcccttcatacggctcgaatcattctcagatgcctccccgggcatcctttccttctttgttgagttggttcacgcgcgcgcaaacgagcaccagccgcaacagcaggaaactatgaccaatagagtcagacacttagctacatccgcacgcaaaaggaatgtggttctggttgagactttctttccggggcgcgggacgttcgcggagtccgttccttccgtaccaccacaagactggttgttcttgggcttaacagccccctaatcataagggataggggaaaggtagccaggcctatcatatcaaaagggttgtagaaagagaacccggccccctatttcattcgacgttccggggcaggaaaaaaaccattcgaccaactttagttttgggtaacaagaaagaaggcgagttgatctgctttgatcaaggaaaaagcccagtcagccaccaactcggtgcaggtcacgtgacctacagctcggccttcgctttttgaggcttcctctacccgcatctctaagtgctcgcagcacttccatatggagaaagataggcttaccatgttccatcaatagcacctaatctatgccggttttggcggaccgtgctccaccccggtgaactcacgcggttccgacgtgcccagaggccagaggcgaaatccgttcacggtccgtaggaccaacaccattcaaaggtgggtggctccccccgcttagaacagtcatctttgactgggcttacacacattcgctcacttacgctgtccccccccagctcaccctagccccgggccttttgctcttctaacgtaagctccaaggcttcacaccaagtcttcacttacataatatgcatgcttaagtagagtcaggcggaaccattgttgcctgatgggaacttcccccatattgctatcaatgtcttcatgtcgcacgacctcttaacattacaccactgaatccccaatcctttgcttgctgtgcagtgacagtaccaatatccactaatcgttgtttccagatacggttgccggttgacatctcttctaattcatcgatacgagaagcaaattgttgtgtgaaggaatcaatatctcgacataagccaagaggcagatcttgtgccactccacctggtcgtatgaaactggcatgcatcctggctcccgagactctttcatagaattccaacaatttctcccgctcctcaaaagcccacaggaacggagttaatgctcccacatccatagcatgagtagttaaagcaagtgaatgatttgaaattcgagttatttcacggaataacactcgtatatattgagctcgtaatggtacctcgcaattcaaaagtttctctacagctgaagaatgagcgtgttcttgggccatcatagaaacatagatagggtcgaaaacggaacgaaaaacgaaactttacgacagctttttcgtacacgttcacttgcatcacatacacaagtgctctctgaaccgtgcaataaggtcacccataacacggctctcccacttgagttactttagccccaggccatgctattcaataatattggaaaaatggcagcgtaacgtaagaactagtactgaaagctagtcttcttttgagggagggaaagcctttcaataggagccctacttccctcgaccttatcactttaattgttgcgcaaacctctttcttagtcaccgggcggagcgcgcttttgttactttgcttatagctttttaggttatgcaatagaagggaggcaacgctctgggcttgcagaaatgaatg

SEQ ID NO: 14090 - DNA, 3000 bp, Unknown
  misc_feature (1)..( 3000): cDNA_ID_3021682_gDNA_ID_2214697_Annot_ID_189556 3000 nt of promoter + ATG
agaacttgcttcgctaggaaaggaaaagggagagttggtttcaccttccctataagaactaaggtttaccaaactccctagccatctatgaaactatgatactttatacttccaaacctgaaaaggaaaaggaagactaaagcatgggactaaagctgaggaggagctagtggaactgtctacccaagaattagaacaaaagctgctcacagtacacctttgtttaactgtacgagcgagaataccagctaatcatgtaactgccaagaataaggattctaaaggaaagagttaggtgtgccagagatcctgggattacctttggagaggaaagctcctactattactattaaggagcactcaaagcttgcttcgctaggacaggacagcacagaagagtagatagcttgcttcgctaggagtgtgctaacttattctcataggcgtacccgcgtagaagaagctaccttcctcaaactcctctgcgcaacccagccataccagagagtgctatcacaaggaaattgtctggtctcagaagatgagagcttcttttttagcagaggtactgatgtcaggagagtgtcgacgcgctcttccccagtcgtgttgaagaagtttgagggaaagatggattctgaaggaaatcggctgacctatcggatgaagcagactgctgcgaaagtggtgccacgagtcgagaactcttagaattgtgctcgttcaggctctttagtgcacctaagtgcgaagctggtgctgcaagggaggatgtgggcgggagagcggtcagtcctctacctctcgctatcgatcccttttgcgtcctttctagctatcgactctatccctttttctttctagctatctcttcttccgtaaggacctttttgttcccccccacgctgatcaacaaccattgagataggatagagccaatgcaggaggtgaccgaagtagctcaataaaagaatgaagaaattgggaatggtaattcgagcaatgaaaagaaagaaagagttcgcccaatcgtatagctttttccttcaaatgcttctatctcacttgtttgctagcttgcaactgctgggcactgaaactcagtcggccgacatcgataagggagattttcttccaaccccttggaagagaggaagagaaaggagtggtgatggcttaaagaaccacgttgcataagccggaagcacagaatgttactcggaaacaagcctgagaacgactcttcaccgttagccattatgtttacctggtcaaatgccgtcgtttatgataggtcggtctagtgagagcaaatgatcaagcaagaacgtgcctacatccgttgatgcacttcgttgactagtgaagggtttttccttggggcccacgttgccactggggtcgctcatcttactctagggtagcactctctatggaaagaagagtggttgtgcttcactactagccaagtccatgcagatggggataagggggttcactgctgtctgatatcatcatatctattttgacctaaaagcttacttgggatatctaagagctaattaaatcttttctcttaaaaaaacgggtaataagaaaacacttattatctttttatttgcaagcaacatctgctcaaaaagaaaaggaagttgacttcacctccggtgaccggcttcgcgggatcgccttacgtataaggacctgatccactctaggcgaagcttttttgggcgaaagctacttactatgttatcttccaattgagttgagagagttttcaatcgaattccaatttttcgttatataagctatttataattgaatgatttaaagattgagtttcaaaaagaaaataccggagaaaaggtgatgcaaacaggaaacctgcttcgcccgttgatggtccaagcccaagtattcattccttaaggagctggacgtattgttcagcttcctatgaagctaggctggcacttaggaagattggacgagtacaagatcgaaaagaaccctataggcaggctaaaagcgctgtccgtcttcatggcctcaataatactcagtattgtactggccgaatccgtttcgcagcacggagtatacctcaatctccgttagttccgtttcggctttttccccaatttcccactccttctgtgaggcaaaacctcaccacactacacttcgacacaagagaagaggaccgggcgcttgtatcttcgggataggagttatcggtcttctttaagaaaactcaaatcaaatactccttatctcatggatcaacttattgctgatttcgtttctaggatgggtttggctctgcctgtacttttattcttgtagccgttaggtctggccaaatgatccatcaaataaatagtattaatatggaaataatcctgactgatgtagcgcgagatgcgcttcaagaaaaaatcgtgtcccaactctcaattctgttgagagtatatagggatactaatactagtgagagtgtgaccttacctttatccggagtaaatctccaagaagtcgccgctcgtagtttttttaacaacgagagcattccatggttttttcatctatttagaccttgtcaatcagggcacgaaaaaaaaccactttgcccacaagctctggagttagtgctttcgttcagttcataaggtagactttttttttctaaagcggtattcctccttgcctctaatcctcaaatctaatatgattactcggctgttcgcccaactggtatcgttatcaattgtaacttattggaatgacgctattgttgcgacaaacttttcctggctcttcataactttctttgttatgactttcacctttcgtaccttctcgcgctacttcaaaaaaccgatcatttggactttctatttttttttatgtttaatagcctttctccttctttgggcagcccgaatccatataaatatccttttctcatttgcttttggagatgtttatagcttcttc

SEQ ID NO: 14091 - DNA, 3000 bp, Unknown
  misc_feature (1)..( 3000): cDNA_ID_3021726_gDNA_ID_2214698_Annot_ID_189587 3000 nt of promoter + ATG
aaagcaagaatagatagagttgaaagaaaggcgctcgtatagagccctcgactatgtatcggacatatggcaggttgggaaagcgcgcttggaaaagaaagactatcctcgaggtaaatgtaaatcaatctatctcgcattgcccaatctgaatgctaaaggctcgtaaccccctaaaaggaaactcaccaccaaaagaaaaaggtaggttaactaacgaaactcaaaactacattttaattcttgctcaccgataatcctttataaaaaatattatacagctgtatacaggattattggtatagctgtccactagccgaaaatcggacaccaaattattgtagactgacgacctgtccttaatagaaccgatctgactctctgaacaatcggaatttcgtacttctgtcggatcctccctatctcctgatcgagcttgtgtaggtagatgttgcctggtagggccgatagtagtacactgtgtgggacggagtaagggcccctctcaactcctacgagtcgtccggcggaaaagactttctgaatggagtaaaagaacttgggatcgtcgatctcttccttcaaaatttggatgagtcgatgtcggtcgatggtgtgaaaacacttcctgatgtcgaattctaaaaaccagcgagagattccccactcttctttgatccgtcttaggaccgagtggcagccttgacccgagcggaaatgcgatgtgtctggaaactcgggatcgtaaatggattcgagtaccattctgatcgcctctttcatgatcttttctataggtagaactactgtgagcggtctaaacttcaacccttctttctttcttcatattgtaaaggggggaaaagctcgttttttgctccccttttttataatcaaaggccccctcctgccgtcgtttcagtgactcatagggcttccctcagttcagtctttttggttcttgaaaatggtcgccacctctcctcttctttcagtcgatggggttcctctccttttagtcgagtaatcaatacctctcccaggaccggaatgattatccctgcccgatgggtctacatccatccctgaatgtcgtcgggtactgttcacttccccgccattcttgtaaccgtcacctgtaatccgcgcgggtgtgtccgcacccccctgagtggacgagaaagaaaggatttctcggagcaaccccccaggttccagacccaggagtcaactttcccgtatgagcattcggtacatgtatcagtccgtgggaagaggtgaaagggtcaccactactgaggatctccccccccccctaatcttagataggtcgtctgagggttcgccgcggttcattgctgtgcttacacacaaggctacccttctccgaaagctacgcgggaccacctaccactagtcttcggccggaggggtttattgcacaaaaacggccgggacgcaggctcccgaagagggaagcccaacgaatgtcagatgcaaagttccgcacctcattaagatcatattggcatactctcccaaaaaaaaaagagcagaccccattgaagacgagagtaaggtacaacaaggccatttctgtccaccgcccttctcacggaaccgtacgtggacgttaccgctcatacagctcccagccagcaagcacagttagccttcctctacaagaaatggaaatgtggatgaatcgaatgaaatcgaggaattcggtttttcttttcagacatgataagtaagagcatccctttcacaaaaacctacggatccccctcctatcctgccacttcagcaccttgtgatctttgagaagatcattacgagccctttcctagaatgtttttgtagattccgaaaattccagagtggatcaggacgagaatgaatccgggaatccagggcatactcatcctggagcttccgctctcctctgggaagggcttttttatggatagagagatgagtcgagggattgattactcgactaaaaggagagggtagcctcccgtttgaccgatttctcggagtcggaagaagatctctcatctgatgaccctgaacaagaaggagctgctctcgatgtgagatcagcagcaaaagaaagaagaaaagggccatgatgatgatcctatgttcgttttcgccctgcccctatgatgcgctcctagctcgcagagcataagtcagcgcaaaggagagatacatcctttaagactgtgaagagaatccttggtttgacctacggactacgtgggaaatacgagatctaggcaagccgctacatgttctcccccttgcccttgaacgatagaagaactacttatcttctcttagatagcagtcgatcggttctatgatctatggtcaatcaataggcccacggatctattcttctatacgataaattgccatctcgtagcaccacagcctgggggtaagactagaagaggagatttgcttggtcttctgtgcggaatctgcttcctaatcagtgtagctcttgggtcagctcacagctaggacgtcatcagttctaaaggattcctcactagggagactctctccttatgggcaagggaggcagattttgatggggagaaggattcggaatatagttacataagtccccttccctctcctcaatatagtttcactcgagtcacgtcagtacctctccttttagtcgctcgtcgagacctcatcaactagttaatacctccggacctctcctttatcagtcgagtttgtgttcacaacctctcgagaaacaagttcgagagttacgtactttcaatgctctctctattccttgctaatcaaggcctgcaagggaactggctacgactataggcgggacgacatgcttttagcttccctgaaataggcgacttgctcgctttggcaggaagtattttttttgaagaattgaacaaaaaaaactgaaatttctgtaaatcattaaaacgggactttctttaaagaaaa

SEQ ID NO: 14092 - DNA, 3000 bp, Unknown
  misc_feature (1)..( 3000): cDNA_ID_2123774_gDNA_ID_2214698_Annot_ID_189589 3000 nt of promoter + ATG
agtaaggtaagccaggtaagccatgtcagttggtaagaaagtaatcccttccagagttgtaaggttagtaagcttttcccgtttataggaatgggtttctaagcctaggaagtcaaggaagttgtgttggtctttccctggttccttgttcccctgttgcctttctcttcatttcattgacgggttggagaaatgttcacgacgtaagtcagtggaagcaaacgggcaatcggctgcctaaaggaccccatttgtggttgaaggctaagttcattcttcgatatatatcactccgctatgctagaagactgagcagcttcagtttattaccaacctcgagttcaacaactattgggtaaagcctaaaccttactcctttccttctatcggaactggcaacagatctctagatccgatgcaactagaagtcagtcgattccgtctgaaaatggtttcagtccaaaccttttttgtcgagtgaaactccgcttcttaagagcttctttggacagactcactcccttactcgctgggttggcgtatccaaggtagcgccagcagcaagcgtaggggttactacgtaagtgcgttcgttagcgcgttacgttttctcgcttgctagacacgacaactaaggatagacgcgctgggatagcaagcaagtttgttgaaagaggggcagtagattctagatctgctgaaaaccaggttatagggctatatctttattccatggtagggctaggggcagggtggtttaaaataactccttttactttccctcctacaattacaatgggaagggacgagacaaagccttcttttaaactaaataaagtaggattccgctttcactgttctcaaggtatctcctgactcgaagattagggcttcttcccagccggaggcatccgaaactggagaatcatcaaccctcgcataaagaaacaactaaactatacgcggcaggttggtcaaaaagggaaagaaaaaggtgacatacattctattcggggacataatagtgattcctatcgagcacactctgttatatcgatcccaatcaatagtttttgggggaagtcgatggtcccccccatgctttatgacatcttttctcttctccgtagtgatcagtgtatgcacgtagcatcacagtcaatcttttatgcttggttccggtcgcgctcttcttctaactgcaggagcccgacagggctgtcttactctttttgttgctaatgaataacctttttcttggtgattcatttccaagggaataaaagaaagacctgtgactcattgtctcaatcataacttcaaacagaacctcactgtagagagggagacccccgaaagcgtaagaacgacgatttttgagcctgagggtgaggttctccatcgacgagtgagaaaagggcctggtctcggaagagatgcagctaacgtgagtaatagctgaacagttgcctaatgcatgtggtcagcatcagacaaggttataaaatacatctttacatcccggtcaaagtaacgaaaaaagacgagttttagcaactttttcatacagttttgccctcttttatataaaaaactaacttacgcaaatagtaaatgagaggaccttagcacttttcgttatggagtgattcatctaaaattcccggggttttgtgaatgaattcaactagaaaatctcaattgcacgggattcgcgattcggtgtaagttcaaaatttatcgtgctggacgaccacggttgagttttgttgtggatccaactccaagcgtttgcgggattttggatagatggaatactcttgcaacggagcttgtctgtcaaatctggtctggtatggtagcggttcataatggcagctcattttcctggaatccgggtgaaagatcttttctttccaaggtctttgctttctattcgacttagcgatggagtcgggtcggaaataaatactaagtaaaggcagacttacaataatacgcaaacaagggtcccgcgatgtcttgtacattctaagtactttgcctgctaagacgtgacaaacaatcgctgattctttactaacgagcccagtagccactaaggcgatccgaatgaggaaacgccggagtgaccgagtgtcttcaaaaacactgcgccaagagaccaagcggagcctctcggtgaatgtggtaaacaaattgaaagccatatcaatcggtataaaatgacaaaccttttggtatgtaccacaaaacactaagaaagaccccgccggttctactctccttgacccgtggacaaacgccacgtgatggacggcgcccggctctgacgaagaaccagtaagattaggtattgcctaatccgtaaggttgtcatacccttatcagctttctgaccaaacctctgtgttgccactttggtaaggaaagtccaccaaccgggcatagtacctcgttagcaggaccactattgctccttttaaagctttgtgctcaagtgatctgggagggtgtcaaacctcccccagccccttattcaggggatggtgccagggagtttgaactgttaacaaaagattttctcgatacaaagaaaagccccactcctagaatagttagccactcagtccacagattcggcttagtgaaaatagccctagaaagatcaaggtgcggaaggataatttcctccgttaatgatagctataccatagagttttccatcaaggaaagacaatgccttctcttctccatcctccaggtaccagggaagaactctatattccgggtccaaggatgatggttgcaacgccccgcgcttccaccaataagaggtgcgggggatggtgatatcccttgaaagacataactaacttacaagacttaaaatgaaaagtaaactaacggaacaaggcgccggaggaacccccttctaaaagtctaagagctagaaggcggggtacagcggttgcttcctgtaagatttgaatagtcatg

SEQ ID NO: 14093 - DNA, 3000 bp, Unknown
  misc_feature (1)..( 3000): cDNA_ID_3046155_gDNA_ID_2214698_Annot_ID_189597 3000 nt of promoter + ATG
gaatgaaagcttctttacaggacctcttctatttccctccattcttcttcctagtgacctaggagttgggttcgtgacattttttctttctgcttattcaagtagcccggtctggtaagtaaggactttgctctcaatagaagtcaaaaagccttcaacaagaccacatccgctattgaatcagctgctatagacttagctaaagaatgtcttgcacgagattcaatgttatgtgcttgattgcgatcacatttttctcgtagttgatgagctgccaacctccggaattgagggttgtaggtagagtttcctgcgttcaacttggagttggaagagttggatttggagtttataaaagctgttattagttccgactccccggtctaggcctggtacttgttagttctaaggtatcagtgtcgctactttctgtaaaaaatttcctgcgaagggaagcgggaaagacaaggtttcgaatcttggtctaagaacttacactacactacggaggcacgggccaagagatcataacagtcaaatcctcaacctcacaagcagacaagctggtggatcatctgatcttgaaataggtcatcccagctatcccgatcttttctctctttatttcgtcaggtatctgaatcatacgattcctcggatgtagcttttcacattggaccaaaacaaggcccggaaaccccgctagctttgttgatagaaagttagcttcccgtgcttgactagtagggctaatgaacgacccttaactatggaatgttacgcctttcctcggttactcacaacgtaatcaactccattggttattttccccgggggaacacctatagccccaatagactgatttagtaggtatgatgtattactaggagtctctaagttcctgctttggttgtccctgtccaggctaagcggagtttagctttggccgttaataagagcttccctccattccttcagtccagtcacgcttttcttttcggcttttgcttcagtctcttcttttcgtcctttcaggtggcatttcgcttagtcttgtcattccttccgtcatgctactgtcatgtgctataaattgatcctcccgtctagtgtttcctctctcatgttatacagaccgctcctttaatccaatgaataggcggcgagggtgacaaaggcttagaagcaggggcgggcagaagcagcattaattctttcgcccgcgcgtacatattctattgagcgtatacgatcattgagctgatcaccggtggcttcctcacttgtgatgtgaagctgctttccatttctcatttttgaggatatcgatattctcttaagagaaagggtagccttttgtcacgagctggactcgaaccagcgcgtctggcaaaaagaccatccagatttcaaccttagactgatcgtgactttggttactcggttccccacgcgaaccccacacgccatgggtacgtccgaggtagattaactacgaacttttttcaaaaaaagtgtgatatattttcctcacttactagcaaagaactggaccaggattcgtccttggctgcctacgtacccctttgggaatcaagtaaatcgtagttctcttacttattgtcttctttctaagtcttgctttcttctctctttactattgcttctttttcttttctttctataaaatgttcctcaatagcactgattcttcatatatttttgtcaaagcaattgggttcacaaagcattattttctcggtccattttccacctctttcttttgtcgaaccatgctaagcaaagatgcacggttccagtcttctttccctccccgtgtccactagcgctcctatcctctccttttcagtcgagtcactagggttcctctccttttagtcgagtcattagggttcctctccttttagtcgagtcattagggttcctctccttttagtcgagtcattagggttcctctcctttttttagttgagagttacgtcagtaccttttagtcgagtggcttctcgctcctgcccagaacgaagagaaggcgaaaaagcgccgccgaagcagcatgagcgggcttctattgctacgtaacaatagagcaggatagcattttgcgcccacatgtttgaattttagggtaaaaagctcgcttgttatacgggatccgacgcatccagcagagcgaagcagcgttccattcttttcggcggcatccttccgcattggcggcgagtggagtgccacaatcccattcatcatttttgatctacataagccaaagccctccgcactggcgacgtccccggcataaatgcaaggaggatgtatagctgatataggatcttgtggaacaggatttgattctgcaagcggttcggtacaaacaaagaaatttcgaacaaaaggatcggaactcgctgataggaaaggagagaaaaacaaagcaatgccaagagctccgtcaattcgctgttcatcgatagacgaagctctctctttatcatctcgtgccagatgcaacaaaggatgagtcctttttccttctcgcgaaccacgggagcgccaagcgtccagaggatttttaattttcctttcaggataaagcggcgcataaaaaagggctggtccgtcaaaagtccggttccttcgcgaacgaagttcagaatcaacaagggttcgtagaacgaagggagtgtacaactggtttttcaaaccactttcttgttcgtaacgagggagagataaaattgagttcttcacgaagttcgagacaaaaaaaaaaaaaagactttccctatggcctccttgttttaagacattatggctctggggtcgaccccggtaacaaagaaaaaatccataaaaatttgggatccgacaccataataaaatactaccctcatgattagaccatgttcctgagatttgataaaagaaaggtgcattagcggttaatacgttgtaattggataagttattaggaatatg

SEQ ID NO: 14094 - DNA, 3000 bp, Unknown
  misc_feature (1)..( 3000): cDNA_ID_2161890_gDNA_ID_2214699_Annot_ID_136827 3000 nt of promoter + ATG
tagtatatgtttttttatgttctttttttctttgtcattctcttgtccttcgtgacactatgtaatgattaaaagcaaataattgatgcatgagttcaaatgttctttgaaggatccatcttattagctttgtaattgttgtgatatcttaatcttattggttacgtatttcaagtgctttagaaaaaatgggcctaagagattttggggagcttttttggcttgttattttcctcacatatacaacttgcagcttattatttattgaaaatcttttcttatctagattcaaaaagatttccacaaattttaattaacgacccctgattacaaagaaacctacccaaagtcaaattttgtccataatttctatcgtgtaggacactaaaaagtaaaaactcatacctaattggtttctagtagaaacggtcagtgcactatctttctttcaggttatcgaaggaaaaaagatcagtagagtagcatcgttaatagtagagttaagaaaagcatgtaacatgtggtctactttttatttcacagaaaaataccataccatgtgataatgtcgcataaaatctttacttttccggtgttatcgatgtgtgttaatgctaaatacccgaaacaatttcaagactcaattttgaactatcgaatagaattcttctaaaatggatgaggaaaaagtcgctggtttaagtcgtgcgaccctcaaaataaagttaggaatataatcacaagctgcatactttcattaatcaatttaaaaagaaacgactaactttattctttctttgccaaactccataattagttaagtctatgaatgaatgtgaagagagagttttacatttaaaattgtaaagggcaaattatagaaaattctgtgtccaccaattaggcttggctctttaactcactgttctcaatctttaataatccccatcttcttttctcctatatgattatctctctttccttcgtgcgtgttatctctctgagccacatgccgacacttacataactgttgaccaagtctctcttccttctttatcaaatcatgcaaccttcaagaacaagagtttcattttttgaaacaggagagaccatgaagcaaagaaagaagagttatctctcaatcttcgtgatcttcttctctcttttcttcttcgggatcttcatgtacaatgacaacctcaaatcctccattgctgacttcacatcttcgaacccattctctagttcatttgtggagttgccgccggatgagtgtgatctgttcaccggtcaatgggttttcgacaacaagacatatccattgtataaagaagaagagtgtgagttcttgacggagcaagtgacttgtttaagaaacggaaggaaagattctttgtttcagaattggagatggcaacctagagactgttctttaccaaagtaaagctaatgtttcaagatgccctgtttttatccggtttgatcgaattggtatttaacaattgtctgttttatgattggtttgatgaagattcaatgcaagagtgttgttagagaagctgaggaacaagagattgatgtttgtcggtgactcgttaaaccggaaccaatgggaatcaatggtttgtttggttcaatcagtgattcctcccggtagaaaaagcttaaaccagaccggttcactcactgttttcaaaatccaggtaataaacattaatccacttgtgtgacactgacactaatgacattatttttatagtttcttactttcttgggatatgcaaaactgaaatttaaaataggactataacgcgacggtggagttttattgggcgccatttttggtggaatcaaattcagacgatccggaaaagcacagtataatcgaccgtataataatgccagagtccatcgagaagcatggagtcaactggataggcgttgactttcttgtcttcaatagttacatctggtggatgaatactgtctccatcaaagtcctgtaagtagtaatgttatagtatacacactcacacatacttatgtattgaatatcctaggattgaagatttgtgatgatggaaacagacgtggatcgttcgatgatggggacacagagtatgatgagatcaaacggccaatagcgtacgagagggtgttgaggacattgggagattgggtggaccataacattgatcctctaagtacaactgttttcttcatgagcatgtctcctcttcacatcaagtaataaatttctcccatccataacattttttttttgtatctaatgtttatatttgattgttgttctgtttttgttttaggagctcagattgggctaatcctgagggtataaggtgtgctttagagacaacaccgatcttgaacatgtctttcaacgtggcttacgggcagttttccgcggtggggacggattacaggctgtttccggtggcggaaaacgttacacagtctctaaaagttcctattcatttcctcaacattactgcattgtctgagtatcgtaaagatgcacatacttcggtttacacgatcaagcaaggcaagttgctgacgcgggagcagcaaaacgatccagccaattttgctgattgcatacactggtgcttaccaggccttcctgatacatggaatgagtttctctatacacatattatttctcgaagatgagattctttcatcctcttttttggtttaaaaaaattcttgtgatgtatataggacagagattcaagggatttgaagttagccaagtaaggctaaaaatttgttgaataaagtgtacaattcacagggaaacacagatactataatttcagtaaatgacaagattagtaggtgtgtattatcagctacatgattgtaaaagatgttgaagtagttgaagttaaaacgttttgatagaccaactacgacccaacattcattaatgtcaaaaccaattttctcatatcgccagaaaccgaacacaacgag

SEQ ID NO: 14095 - DNA, 3000 bp, Unknown; identical to SEQ ID NO: 6149
  misc_feature (1)..( 3000): cDNA_ID_3079672_gDNA_ID_2214699_Annot_ID_189611 3000 nt of promoter + ATG

SEQ ID NO: 14096 - DNA, 772 bp, Unknown
  misc_feature (1)..( 772): cDNA_ID_2706651_gDNA_ID_2214700_Annot_ID_136835 3000 nt of promoter + ATG
catactattctcaaaactcaaacaaacaaaaaaatcaattttgaaatataattatttctaattttcatatttttgtaaattgaatacacaagcgttcgtcgtatacgaccattgttttcagcgtgtaagtttagcaaaaaaaaaatcttaaaacttgtggttcatttggaaaagtaagaaaatatacacgaacgtaataaacacaaacaaacaattgaaacatgaatgtacaggtttagtgttattatctgaccacattgtgcgcgagtgtggaccatgtggacgttataagtttcatcaaaccaagcatacatatatatgtgcgtcaacgtagaccctcaagttttcttgattttcactcgaatcaataccgtatactcatgttttatcgtaacatagaaaaaaaaaaaatcatggactttctcaagaatcaccaaaaaaagcatgcagcttcataatcgaagaataagattctttaaattgattgatgagcgtctgcactatgaaatgtttcgatttcaatcttctcctccaattttcttcttcattagtcctttttcgctcccaatatccttcatgaaatttctctataaatagagacataaagcattaacatgcaatgcaacaaaacttaagaatattagagtcaaataaattttaaaagaaagttgacagtaaaaaaaagccttaaagaaaaagaattagaattagaccttataaaaaaaaaaaaaaaagaattagaaagattgttctggtgagtgagtgagggatg

SEQ ID NO: 14097 - DNA, 3000 bp, Unknown
  misc_feature (1)..( 3000): cDNA_ID_1985614_gDNA_ID_2214700_Annot_ID_136836 3000 nt of promoter + ATG
tggaaactggatcgtagattcatatacaattgagaatttaagatcatgccaaaggcgattgctgatatcatatttatgtagcttttgtactttttaatagaagtggacacaatactgatatcattagtgaataatcttttcatatctttcagtctaagtatacacaaatatatcgtatatgcataaaacgaatgtctctcattttcgtaggaaagaaaacacaattaaaaagaaatatttttaaaaagcaatgtgaaaagaagttggtaacttgaggttcacgagatccaaatgtggatgaacgttggaacagctaaatccacgtaataaaagaggacgaagcttatgattaaatttggtcagttaagattctcatcctatgcaactacctaatacaatacaattaatttgtctccctcccaaattcattcaaaatttttttttgcttggttataatctatttattttgaatctggtggctataatttttcaaaaatctatgtcaagtaacgtatcttacgaaaaaaaacactgtgattaaattcatcggaattactagtctcatactaaattctacaaatagatatcattttctcttgtaaattacacaacaataacaaaataacaacaaaaatcattattttcttctcgttgcttttattcttacgaactggatactatctttcttatatgtaaaaacaacacgtaatatctaataagtaaagtagggaaagtagacttacttatgttacatagggtcccccttattaggctacatatgtataagcaggaagtagacttggcatttgaaatagacggttgatatctccctgtcactatttatccatccttatgacctttcggcgggaaattcgaaatgacatttgcagattttcttgttttttccttttctttttttgtttgtccactccacttatatctttttttcttttggggtttttaatcgcatcctacaacatatcactcggatagggtaaattgccccaaccaaccattcattattaattaataaacctgacgaggaaaatgaatatattttggtttcaaatgttttgtggaatgaaggcagagagaaagacagcttctgtaaaagcatttgctggcagacacaaccctaaacccaccttcacttgcctcacctcaccactctctcttcctcgcgcgtgtctatcacttccataaactctcattgcccataattgcttgttttctttctatatgccaagcctgataaatctcgtagtaaattacgggaaaaaattggattccacctcacacaataaagcattttacaaaaccagctttatcattgggttttttaacagattatagtattgtgggtgctcttaatatctggtacacaatagtataaggtctatcgacaatacagagtagactccgggagacaagagaagccaactaggggcacattttttgggcgtaactagacattatatattaatttaaaacttttgagtttcttcgttgaaaaacaattatagaatatagttttgtcttcaatataaaatgagaaagaagagaagaagatctgttcccgctcttttgacttaacggtgctgtcgttttcagcaggttaacctcgaccccaccctccatttttcacttccttctttttaaattattttctctatcactaaaaatatcaaaaaggcgggaaaatcacctattatccaattcagtttataaaccggtttcggttccgtcgttaacggctgattcttctgaccaatgaaaactcgtgaagtctgacggagaagaagacggaactgttaaaatccgttacgtcagacggagaggagggagagggacggatgactgaataaatctgccgaatcctgctgaattgccacgtcagctttattcaaaattctctgagtggtcacgagatttctatggactcttttttttttgttaattaaaagtttaaaaccctacaaaataggggtcttcaatggggttaccagaaaaaaccgaacagtcgccgattccttggtttaatctttgaaccgacagtgtgaccttttaattttctaacctttgctatattattatgaaaatcagatgtaattatttagtgccattcattaacgtgattcttacttataattcctctcatgaatactaaatggagtgtatataattatatttagcagtaaaaatgtattgtattgattgttggaaagggaggaaaaaatgatgagaaggatttgcatgaggaaaagagagagaaggcgtaattatcaagtgttcgatacttttgattagcccacacatttataatattttagtgtagtagtgagatttttatttagggttttaattagaacatagtataagacattggagctgtaaatgacaacttgtttgggatttagtgggttccacctgtatttctcatgcccttacacatttccacattaatatctatcttatcttataaaaaaaagttccaaagaaaagagtgagatatacatatattagcaatatgagtttaatgtgccattcaaaataaataaataacattttgaagaatattaagagtctcaattaaaaaatatttaacttgttctttagtgagttacatccatatcttaagagacatgtgaagagttgaatccaaatgataacacaccaaaattgatggtttttaaaaaatgtgaatactattactgtttttttctttggatttccaaggcaaaatagttaagaaaagaccaaaggaaaatagttttgattttcgtccatcacgcattaattacggataattattatattaagaaggaaaaaaaaaaacaaaaaaaagcagaagtgatattaaagtgcttttgagctgtctcgtagaaaccatgaaaccttaataaaagcaaccttgtcttcaacattctccatcttcctcctcacttaatccccaagttcacacttcaaatccactctttctatttctctccttcttcttct

SEQ ID NO: 14098 - DNA, 3000 bp, Unknown
  misc_feature (1)..( 3000): cDNA_ID_2710916_gDNA_ID_2214700_Annot_ID_136838 3000 nt of promoter + ATG
tagcagctcaagataaatttgaggacaacatcattagttccattccatggttgactaaatttatttgcaaacatggatacgcatatcgtacatacgaaatgcatatctctacctactattcgttcgtacaatcatttttctccccatttttatgaagttataaaattaattaaaaaatttataaaagaaggaaaagcacaaaacacctaactgaattaaaatagaaaaacaaacagaatcatgggctcagcttaaaaagcccagtatggactatgggataggaatataaagactgtggagatgggtggctcctaaatgtgaacaacccgtggatatgtagacagatactcgtcttgagagtgctcctcatttactgccagatgcaattaagagtgctcaagtggcctctacatcaatcatatgtcttgagcttgaacatatggttgcgagggagggtcaaacactatttcaacccaatgaaactggcagagaagcggtaaaagaatgttttgaatggactttcaaggactcaatcatacctcacttgcacaacccaaatttttcgaacccaatattttcagatcccataatgacctattacccattcatcctcatgcacatcttgattcaaaactttcttgtgtgcaatttttttattacgttttattacaatgtttgagatgaaaatgattggcatctacatatcatatcaatcaataattgtactcataaaacttttgttagtcaaatttttaccaaattatattcctaccaaaataaagatggtccaaaagatgttttctcctttctctttcttttcggtgttaaaagtaattcaaagtttgcttatagaatattctagactttgttgttgtgaagtgaccttgaaactaattgcgtccacagcagtaagactcctttatggtccattattaaggcacttcacagcatctagggtataaacgagatatacttattcctaagtaatttctcaactatcatatagaaaggaacgtttgttttatgcatgttaatattactaccaagtaccaacatctaaagcggtaactcaactgcacgagtgtatgatcaatacaatatcagtaatattagccaaatcacaatttttgccttaaatgatacaggcttttgtaaccatgtaaaacttttttttggaacttaactcaatctaaaattgtcatgaatatgttcttttttcttcaaaaacaatattcatctagaaccccacttggaacaaaaactactgttaaagaaaaggaaacttcactatagtcgacaactcgatatccacatctaaatacttatttataattattttattgattggtaatctatttgtattatattctctgcaaagaattttgttttgtgtcatggtcagtgagtggcatatgatttcagtaaacacaagtcacttattatgcaatcatgtacagattgattcaaaacatatccgttaattaatttgaacagttggagatgtataaagtctgagttggtacttccaaatggtttaagatttataggaagttgtgtcctttctggcttctgccattaacctcagccaatagactgtaacttgcatggctccgcctccaatcaacttgctctctagaatatgttgtactattaaattaaacaatatatcgataaattcgatgaaaatcccaactgtaattttttctcatagtatcaattttaaactttactgtattttctaaaggcaaaagaactttctattatagataaaaaaaaaatattaaaattgtgtaaaagagaatgtattgaagttttaaatgatcgagagtcaaagacattatcatttgactagagactaaagatgcacattctgtaagatgttaacttaggtataaactttttttttaagtgtgatgtagaagttttccacgcatatcgatcagcttaaccttttatttaaactataaaacaaatcactatcaatagttttacttaacgtgtttccttctccatatcaaacttatataaataatctaagaaaaaccataaaagccaagtacaaacgtatataaatcgggtatttctcaacctagatatattttggtaaagtattaagaaaacaaaactgtatccaaaattggtagcttgagaataacatataactaaattaatatcgtaaagattgagaagatcatcacttacaaacattcaacaaggtagcttcgacaacaacacaaatctaatgtgtttagatggttccatatttttaaataaaaaatcagtttgcaaaacaaacaattagtactaaaatagtttgtttttttctcacttaaaatccatatttccctagttcacgtacattttcatttattattcgtcagcaaaattattatatcttcttgaaatgatgaattcaaataaaataagcaaaacttggcaaagactcaaaatagcacaactagacaaaaataccagctaacagaaagtaataagaaaaaactcaaataaatggaaagacattaataaggcagatatatgtttttttatattataaattgtttttttttatagtataaaaataaaaatatcggcattcttataggatcgatctctcatgcaaaacaacaaattcagacaagaaacctcaacggctcagacccaccaataccaattttttaaagagatttctgtcacaagtaagaaagaagcactaattacaaaaaaaaagaaaaagaatcaatcttttgttcttcgattcgatttctaatcaattagattgtttttgttttgtttaacatcagttgcgaatcgagctggattcttgggctcgctttttctttcaatcaaaagtttcgatattagtgaaggataaaattcgctaaaaaaagagaattttttttgttaaaaaaattataaaagctggctttctcaaaatttctccatgtggtcgacgaagaagacgaagaagacgaagaagaaagagaaagtctcttagcaaac

SEQ ID NO: 14099 - DNA, 3000 bp, Unknown
  misc_feature (1)..( 3000): cDNA_ID_1808783_gDNA_ID_2214700_Annot_ID_136839 3000 nt of promoter + ATG
gttccaattgttgttttgtttttcaatctggtttcgataagaatgtgtttgcttagatgtgtcgaaaaaagttttgttttttttaaatgtacggagattgtttccccaatttcaatttctttaatgctttttttgattaaaatatgaaaatggtatcaccaggaagaagaagtagaatctgactacttcaaaatgttgactttgatgattttaacgatgacccttttgaaaaaatgttttctttaatgatcctggaaccataagattgggaaattttcttgctttgccaaaactctgctttctataaactgagatcatgttttgggaagcttatactatgttttgtggaatgtgcagattcatggtttcaggtggcgttcgttttgaccaccggtataaacagcgcgtatgtgttgggatattcaggaacaattatggttcctttaggttggattggtggtgtggttggtcttcttattgctactgcaatctctctttatgcaaacactctaatagctaagcttcatgagtttggtggcagaagacacattcgctatagagaccttgctggattcatttacggtaaataaaagaccaaaccagctctcttaatctcttctctgttgttaccttcattggaatgatctctctttttatcaggtaggaaggcttatcatcttacatggggattgcaatatgttaatcttttcatgattaattgtggattcattatcctagctggttccgccttaaaggtagtaaaacattttcttctcttgattcttgatttcgttagacgagttagttaattttggttgtgtgttctgtttctgcaggctgtttatgtgcttttcagggatgatcataccatgaaactacctcattttatagccattgctggtttgatttgtgcgattttcgctattgggattcctcatttatcggctcttggggtctggcttggagtttcgaccttcctcagtctcatctatattgttgtggcaatcgtgctatcggttagagatggtataactaatcaaatgatcatcaagattcaacattactaatgagtttaactactgcaaaaatctaattcttgctttgttttgtttgtttctaggagtaaaaacaccttcaagagattacgagatacaaggatcatcattgagcaaactttttaccatcacaggagcagccgcaaatctggttttcgcattcaacaccgggatgcttccagaaattcaggtgacttttccctagacttcaaagttcaattgtttgtttgtgtttgcttttatgtattagtgtaccttttgttcaagtaaaacctgcatcttaaacaaagtttgtttgttaatcatattgacactataatttccacaatgttaggcaacagtgaggcaaccagttgttaaaaacatgatgaaggctctatactttcaattcacagcgggtgttttaccgatgtacgcagttacattcatcggatattgggcttatggatcctcaacctcgacctatctactaaacagtgttaatggcccactctgggtcaaagcccttgctaacgtctctgctatccttcaatctgttatctctttgcacgtaagtttcttagcgccaagtctacgcttttttaacaaagactgtcgtctctaactatatgtctgactcaattctttgttgtagatatttgcgagtccaacatatgagtacatggacacaaagtatgggatcaaaggaaacccatttgcgataaagaacctgctgtttaggatcatggcgagaggcgggtacatagcggtaagcacgcttatctcagcgctgttgccgttcctcggtgacttcatgagcctaactggtgcagtgagcacattccctctcacattcattctagccaaccacatgtactataaggcaaagaacaataagctgaatgctatgcaaaagctatggcattggcttaacgttgtcttctttagtttgatgtctgttgctgcagccattgcagctgtcagactcatcgccgttgattccaaaaatttccatgtttttgcagatttgtaattcattatattatatagtcaattgtgtatcctttattcttaggcaggtttatttctcctgtaagcttgtattctctctctatttgtcttaccattagagcctaaataaataaatcaagttctaaaatctaaaaagcatataaaagaccactttcatcataatcattctgaaaatttaccaacaaagaatactaagttgcatgattaaagtctctattagaaatgtaaatcatagtattagagaagaacataaaaacacctaacttaaaaaaaccttaatttagtgagatagagaagagaagaaacagaattgttgttggtttaacaaaaacctaatctttcaatgattagctgtttaatttgaaattataacaataatttagacaggccaaagtggaaccccactgtctccaccaaagctctagataaaaaaaaaaaaacgaaagcgttagatattttttatcaatcgtgctccgtaatcattacctttcttcttcatcttcatcttcacgcagcgacttctttgattctctctttttattctcagctccaatttcaacctgcatttctctcttctcaattttgggtttctttttttgatatctcatttgatcagatcgacgaagaggtaaccattttgccgtttgttagttcttaacgattttattctgttaaaaatcagatttttttttgcaatgcttgtagaaaaagattcgatttttgtgtactgattgaatcaaaatatgtggttatggatccatggattgatttgtttgaactgatgcaaatggctaatgtgaaaagtcaagaatgtgttaatgtagttttttttgttaaacctctttgtgttgttgggttttgaaatgttgttgttacagaggaagaaggtttgagctgagagatctttggaggtagaaagaagatctcaaaaacg

SEQ ID NO: 14100 - DNA, 3000 bp, Unknown
  misc_feature (1)..( 3000): cDNA_ID_2706056_gDNA_ID_2214700_Annot_ID_136842 3000 nt of promoter + ATG
atgtgatagtgacaacatgagacattgaactattacaaaatgtctctactttatctttggaacatataaaactatattttacagaaaactcttgaaaacctatacacatcaaacttcatgatctcatctttcattgtaatccaaaacatcatcataggtaaggcttggaagtttgaacagacgcttgctttgccaattccactggcctcttaacacatccatatgattaccaatgactccaattacgcggtgacctctttctaactcttccttttgtcttgtatcttccctgctataagataatataacctctggctttatgctactttgatgtgaataaaattagtagttgtaaaagcttattgcaaacctcataatcaaatgtgaccagtcgctgtatcctctagattttaactgctcgattgtggcgttccgctctgtttcgggtcttcttgataatagaaccattgaatagccttgtgatctaagcttagaatatagtgcaagtattagtatgcttttctgatgctttgcttcttcaatatacttcatgtagtaactatcttgttctaatctacataaagagaagaacaagaacgttaacagtttaaaaacttacaaaatgttaaatgaaaaacaaaacacttacagattggtgtcatcaatatcgatcacaacaacatcgcagttatcattcatcggtttgatggtttggaaataagtgagagccatttgaatagtgaagtttaactctctcaagtaaattccttgtttgattctgtgtaaagcaacatctctacataacagtggtaattcactttcttcatccaagctattgagctgagagtgtaaagacaagattttacagtaaccgaaactctcatcgagtctttgagcctcgacgattgcaatattccggttctcacagctttgtaacatggttgataaagcaataagaagtgttatcatcaaaactccaaatgttactagagaagctatgaagatggaagctgctaaagatgtcatgtaacatccagattctatcgaataccgactccccaattctgcaagataaacaagaagatttatcaaattcaagaaaatcattgcaataaatcaaactaaacacagatggtagaagataatgaatatattagtacataccggaattgcctcggctggatagaccggagagctccctctccatcggatgcgtataagccgacattttcaccttcttgtctaatcaaacacttacgatgatcataaaaacatcatctatagttttagaagacaaaagagtgactactaagaaagaaaaaaaaaagttccaaaatattgaagatattatggatattgttttgatattttccataccttgtagaagcttcaaaaccaaaacgaatctttattttgatcaagatccgaaaaaaaatccaaaggttcaaaatctgcctctttggtcacaagaaaacagagaacatataatacatttacacgtgactttttttttttgtgtgtcatcagatccaaagttgatatgcctcagcttatcttctttactcgatcaaataaacttctcttctcttcaatttttttttaaaaaatcttacactagtttattttattttccaaatttggcggagacataagaaaaaggaatcagaccaaacttttctttatttagctgctgatagatcgtttcatcattcctttactcgattatacaattatcaaatatatattgattagtcaacacaaaagtgaattattgaattttatgttgttggacaaagtaattttaacattctagttacaagtaaacttgcaagatggatctatatatagatggaaagatttgtgatgtgaaaaacatctactcgtatcgtatgttataacaactcatacggttgaaaatcgtgtacagtaaaacctctataaattaaaaatgttgggactgctaaattttattagtttagaaagatattaatttatgtattatacttttagtatattgaaccataatttgtacgtatttgactcttatgcatttacgacaacaattttttaaaccctatatatgttaacaagtaaataagtcattatcattaggggtttaaatatctgaacttgaagaatttgtaaaacggttctccgcgtcatcagtatgtataatatggctggccactccttagaccgaagagctcgttgtataatatgttttattttagattttctcaaatctcgcggagacatggaaaatgaaatttattaaatggatggagcaatttggtaatttaatcagtatgtctgtatgtgttttgtaatgttatagtttaagatatgtatcacaatcatctatatgtgacgtatacgacaagaatttaactgtacgtacgatacccttataattattattcacttagatttttgtttgtactttagaagaatctgaagaagggtcccggcgtcaccatgcatgtatggtcactccttaaaccagagattcgtaaataattatattgtagtttccattgttattgtcgatttatttatggtccccaatgttctcttggagtcgagggaccatacatttagcttcaaaaatcttacgattaggaaacgtgtgacaataacatttgttttgttagctacaattcctaatttcctatgatttgtacaataatttaaagattaacacagcttgtgggatgcacatggaatttgtctaatagaatttagttccatcatatttgcatacaaacaattgtcacctattaatactttcattattactttcgatgaaacattgttattgggtatataaattaaggcccggccctaaagcccatttattagccacgtgcagtaacttattatttttttcacttatcaatagtaaaaaaaaaagatcaaaatgatcactcttttgagtgtgagtgaacacacttcgtcgtctctctttcactacttttgagaagctctcttcttcgagcttcc

SEQ ID NO: 14101 - DNA, 3000 bp, Unknown
  misc_feature (1)..( 3000): cDNA_ID_2706036_gDNA_ID_2214700_Annot_ID_136843 3000 nt of promoter + ATG
tgttctgtaaacagttctgcatgtttatctggtagattcttttgatgtagtttgaattaagggtaacttgcaagcatttaaaagctcttggacttgatccaacttctggttttcagcatctagtgtttatttgttagtgcttttgattttgatattagagtgtttttccgactgatttcttgacgttttatctcctattggtcaggggtaacctgagccttatggtcttgccaacatctgacttgagactctcatttattggagacaatggtcattcagaacaactctttacctataccagcaaatctcagtgctctgcggtgtcaattgaggagataactgtggacagctctggtagatcttttgttataaggatcgcaaatggcaatgctttttactattggtgctcagagaagtcaaaacttctgggaactgaattgcgtaggaaggtttgtgaaatagtgttgttttaaaatccttgtctgtgcatctaaattttctcatcatctgttgttatcctgtgtagatgaaagacttgatcaagaagaagccatcaatctcagaattaactggaattgaagaatcacgtcttggctctgttgcttctcatctccgtttgtatctcatgggttcagtggtgcctaacatcaaaggttgtcaggtcccatctcctgattcatcatcatcttctggcttttctgaaacagctgattcctcctcgagtgcatcatcaaaatctcttagagcacgccactgtgggactcaacagacaaagacccaaggaagcctcagccctagagcaagctccttcaaagaaaacacactgagaaatgcttctctacgtatctcctctagagataaatcaaagggacacagtgaaggccatttctcaatctttgataattcatccattacctctatccccaccaatgtagagggttttatccagtcagaaggagaagttgaagaagctactgagaattataatggaatcagacaaattattgcttttgaagaagcagagtcaacaccaagtacaatgaccggacctcccccatttcctttgaagatgggtccaccagtcttttctccttattattgctggtgccctccaaccacttcatcgcttcacgcaccatctgcctcttatcagttccctccactatccattgagctaccttcccttccgccactttcctccttattaccagcatcgggatcagatggattcttgatcccgtcatcaccgctcgatctctctgacatccctccattaccattagtccaccacatacccattccaggctcatcatcatcatcatcccagcaacagatgatgattcctataatgtgcgaccctattgttcatattccagttatcgatatcttctcttcaggtcaaagctatctggtaagcgctggacccaccgggataatatccacgggcatccctccgctcccagtggagaatgattcgctggtcgagaaaggtgcaagagaaacactacgattgctcataagcggagccaatgcaacaacatctacacctttgaaccatcatggaagcagaggtctatacagtgtgagccgggatgtgagtggtgtgagcttgtttgcacctattgggttgcaacaaccgagttcagttgagggaggagatggtggtggtgagagtgtgagctcaagcgaagcagtgcctgcgcctcccagagagacttctggttaatttttttggttctttgtaagtgtggtccgagttaagtgtatagaaaactcatctctcgcctagtttttggttttgttcagcccaagtcttttggtttcaggtgtaattagtcgggttttttgtagcttgcttatattacctttgttatttccgagtttcaaatgaagctaagaaatacgatcataataaaaaagttcttttgcagtattcattttctttcatggttccctccttattcatagtcattgttgttctttctaatacttttcctgagctttttttttctattggaaaaacttttgtcactgaaagaaatttcaatgtgattggttcttttcgcaactgtaataagcactaaaagttaataatttgctgctttttaagtcttgttgctgaatgatttaatcccaaagacgttaaaaaaaagacatgtaaatagtctttgttccaaaagtaccattttgagcgctttctttcgacaattgatgttgaacttgtaccaaataaaccttgaaaatcatacatcattaaatgtagttttttgttatatacttatattcatatggtccataatatatagttaaccatattatggaccatataaattcatgcagtcaacaactttttttttcctcattaaaagctactaatactgtagaaaatttttatcttacaaaagaaaggagaattattgtatttttattttaatcacatataaagcaaccaaagataacatatactagtatttagtatttttaaattttttgcttaggattcaggttattaatactctataaagaaataattaaatctatccatcgaataaatcacacagcttattggatcagttaaatattctaataatattgtcgtgtagctgagatctgaccactgcaaaaatgaaaagaaaaacatagaagtagagagaagatcgcatctcgaccgtcaacttcagtgtatgaaataatgatcgtcccacttgatcctcaaaaatattattaaccaaacaaaatttgattccatcgtcccactttcttcttcttcctcccaatccgcctcttcttcctacgcgtgtcttcttctccctcactctctcaatctctagtcttctccgattcaccggatctttcctttcttacttctttcttctcactctggtggttatgtgtggatctgcgacctcgatttcaattcgaagtcgtcggtttcttctctaaatcgaatctttccaggattcgtttgtttttttcttttgtttttttttcgatccgatg

SEQ ID NO: 14102 - DNA, 3000 bp, Unknown
  misc_feature (1)..( 3000): cDNA_ID_2706032_gDNA_ID_2214700_Annot_ID_136844 3000 nt of promoter + ATG
gagaacagggattttttgattggatgcatcgcattatatccttttttctcgaattcaattgatactttctgctttctgcttgactctcatttggttggtttccagtggctaagatgaaatttaagaaaattgagattagagaacttgtaatgtggctcgaattctttgtgcttagttagcattagattttggaaaaccttcttgtatctaaagtatgactatagaagctgatcgatatatgtcttgtatttggataattctgaagaagatgtttggtccttgactatatgacacgtatgtagtgttgaatgcggtgttgcagctgattctgtacactaaggagaagaatgcgattttgttcacctatcctcctgaggtttggtctctgactatttagaaaagttatttcattgagaagtttcgtggtttgggctacattcttgttttgtctatgatgctacaattgtattgtatttctgtgatttaggtgcataatgtaccttttttccttgttcacttacttttaactggagctatagtttgaattctggtgtcaaacttttgcattccttttgttttgtattttgtttctgcttgcctgacatgttatgtaaagtttgcaactttgcatatcttaaggcatctttttttttttttttttttttcatttgagctctaggcaaaactacatttccctttcaatgtattgttcaattagttttagtcttcaaactttagattttgaaaaatagttgaacaaaagtttttgatgtttgcaatcgtttctgtcttgtttctcgaaacataattgttcaactaagtggaggattctggactgtaacttgggtggtttatttctcattcttaccagcttgaagaaattactcctctcatttagttagtatccgagacgatgagatttttttttccaaacatttcattctgtactcgtttagttagctctaggaaacataacaaaaagagctcagacattttgtctttctgaagccatgttaaattgatgcaataatttggttagtgggattgcttcattttgttatgtcaagactcaagatcctaaagctctctggttgatatatatttgctcactctcatttgttttgctactgttcaaacatgtatgtttagctcatcatttggtgctcctctttggaaaaatcttaaaatctgatggttgatacgcagggatcattcaccagcactggtttggtggtatcttcaaagttgcccagattctctgatcagtacactctcaccatcgacagtgctgatccaaaatcaatctcagctgggaagtcagttcagctcaccaaaagtgtcacccaatggtctctctctcggcatctttcttacaattgctcgctctgttttccttacatgagtctcattagatggtttctctgtgtgtttttcaggttcacgaaagatggagttcttgttgagggtttattctggaaagacgtagaagcactaatcaagaactatgcagaagaagaaccaaagaagaagaaatgatcatcttccagagaaatatatgcttttgaaactccatatgttggcgttttagaatactaaatcgatggtgactttgtttagagatgaaactaatatttggatttttccttatagccaactttttgaattaatccgagattttatgatcactatttagaaaagaataaaaagctttacctaagttagtaagccaatggctcacatcaagtatatgcttgtcgtttagttatttgtactagatcatacataaaaaaaaggtcaaatgcttcacgaattgtggatgatttgattcgtaatattttgtatgattgatgataaaacacctacatatgatatgagtggcttggatgactctagtctctttttagacagccttttctttctcgtatggcttgggaaagttcatttggtgattgtagttggttggagtcgcctttttttagcactttttgattagaaaattttccattttccgttataaaaaattccacagcttaacaagagatgggtctctatgattttgcaaaagtattgaataactttcttgatgtaagatgacaatccaaatttggatatacaattttaaacatataaaactccaaataaaataatgtaaagaattgtgttttaaaagataccataatttttgtttttcctgcttttcatagttctaaattctaatcatagcagcggtcaaaaaaaaaaaaaattaatataaaaatttataataaaataaatctctaaaaatatggaagctattaaaccaattttcgtttgaaaaaactttctcctcgtattaacataacgtagtggaattttaaaatattccaaatcacatgctataatccatacattttttatccattcattggccacaaaatacaacctgtccatcgccgaagatcaatttcaacgaaagaaaaatataggtttgcaataaaaaaaaacacaggcccatcctttgctagggcccattaaaagctgacgtggcaccagctcgaagtcaggttttgcaaggaacccactcctaaatttgtaggacccaccataggattcaatcaaaacgagccccggatctcaaatgttttgaataaaataaattaaataaaatcgtttcgaatccgccagaacatctaacctatataaacgtaaacgttgtgctgttttggttttcttatctttccatcttccgcgaagggcatccaaaaaaaggcacttgtttcaattaaagatatttttattctctctctctcgaaacaacatcaatcaaaaaaaaaaaaaaaaatttaattagaacaaaccctacctcttctctcaatttggatttgattctttgaaatttgaaagcactaatcaatctttaggtttttttattttgaaactcgacgaactttttttattttgtcaatttctggatcgagtttttggtttctctgacaagttaccgatacgatatttgatatg

SEQ ID NO: 14103 - DNA, 3000 bp, Unknown
  misc_feature (1)..( 3000): cDNA_ID_2710910_gDNA_ID_2214700_Annot_ID_136845 3000 nt of promoter + ATG
taattctggatctcttcctccttggcattagaatcagcgattttcgatttctcttgtttttgctcataattttgttggtgttggaatatagaaatcatgtcggacgctttgatcaatggattggctggagctggtggtgggatcattgctcagcttctcacttatcctcttcaaactgtacacgattctttcgtcacctaattcttctggataatcttcaatcgtctcgtttaaacgcgattgtgtctgtttgttaatcgttgaattaggtaaatacgcgccaacagacggagcgggatctgaagagggagaagaggaaacttggaactatcgaacacatgtgtcaggtttttttttttgttttccactctcaatctcatgatcagagattcaatacatgagtgttgctatagtatatgagccttgatttgctctgatttggttctagttttagaaagaacgtgtaatggattcttttgttgtcttacatttgtatgacctgttattaaatagctttgatttgtgttgaaggttgtcaaacaagaaggatgggagaggttatatggtggattggcgccgtctcttgctggaacggctgcatcacaggtatgttctctcattggtgtgaatatttggagaatctgtaattttagccatttttttggtatgaagtttagaatataggcttgaaagtggatgttaattttggatgagacagggtgtgtactactacttctaccaagtgtttcggaatcgagctgaagccacagctcttgcacggaagaagaaaggtttgggtgacggatcagttgggatgtttgcttcacttttagtggctgcctttgccgggtacaatagaatttcgttatgtaaatttgttttatatgctagtttttggtctgttacaatacggattagagattaccattagttaggaatgctatacagaatttcaaaatagctcttaggtgcttcagtttttctcataaacttcacattggctgtgggtgaaggctcgccacggtcacatttctaatgctatcatctatgctattatactgttacttgtctagtggagcttctaggtggatggtcttaacttttcctgtcaggtcctactgtcatagctgttttcttctttgattgtaaactttggtcgcatgtatagttcattattgtaatttgttttttttccattgtttccgttggctcatgtgaattttgataacactctcactgtgcagatcggttaatgttcttatgacgaatccgatttgggtgattgttacgcgtatgcaggtataaatggcttcatatacactagtaccgtaaagtgcttcttacgctgtccagtcaatttcaattacattttctttggtccgtggtagttttagttttgcgtttgagcatgaatctatggattttctctcctcacttttatttctcctcttgattttttgaatacttgtatgcagacccacagaaaaatgacaaaagatcaaacagcggcccccgagtcaccttcttctaatgcagaagctctggttgctgttgagccgcgtccatatgggacctttaatacggtatgaggcagcttcccgtatttaaaaactagaagaagctggctagggtcatatactcatatcaattattatgagtcaaatcaaactctataaacctctcaattaagacagtttctgtgatatttgttgaacaatgtctcagattcgagaggtttacgatgaagctggaataactggcttctggaaaggtgtaattccaacattgatcatggtacgtgagcttatgattttgaagcttctcttgtattgtttgtctaggtgcattttattaataattagatgtgtgtgtgtgtttttaacccacaggtaagtaatccgtcaatgcaatttatgttgtacgagacaatgctaaccaagctgaagaaaaagcgtgccttgaagggtagcaacaacgttaccgctttggaggttcagactctagcattttgctttcgttttttttgaataagatgtttacttgctttccaacttcccatgattgtgctttctattttccacagacatttcttctcggagctgtggcgaaactcggagctacagtcacaacttaccctctcttggttgtaaagtcgcgacttcaagccaaacaggtcacaacaggggacaaaagacaacaatacaaaggttttccctcttatcatgaaatggccaaaataactcatttgtcagttaaagctaagagttgctgtgttggttttgaattacaggaacattggacgcgattctgaaaatgattcgatatgaagggctttacgggttttataaagggatgagcacaaagattgtgcagagcgttttagctgctgcggttctgttcatgatcaaggaagagcttgtcaagggagctaagctgttgctctcaaacgctacctctagctaagtcaagtccaagccttcttgaatgaacgctagtagttagaaataaataaaaatagattaaatttccaatagttttcttgattaattattacactattgggattgttgttcatttcctgatgattgcaattgattattgtaatttctgcaagattctttagtaatgaaatctgaataaagtttggcagatttcctttgttctttcttcaatagaaagaaatcttcagcatttaagtttataatagtcaaataagggtttaattagttgacaaaaaaggtttagatgtgtcattagttgacttgactacattaagcccagcaaggcccaataaatttcatccatcaaaacgacatcataataaacgagttttgactgaaacgtcttctagctccatccaatatatcgtcttcttcctcctcgaaccaaaaacatcagtctctcctagtctcagcgctcgtgaaaatctgaaactctgcgttcgaattttcgaagaacattagagatctggtattatctggatccgatctgttcaccatg

SEQ ID NO: 14104 - DNA, 3000 bp, Unknown
  misc_feature (1)..( 3000): cDNA_ID_2710906_gDNA_ID_2214700_Annot_ID_136846 3000 nt of promoter + ATG
gaacctcgctgtggaatttcattaacaccttcgcggaggtttctagaggtgctaagaatgtgacacgtcagcctgattttacgcgggagtctgtgctaatctcaccggctgtgctcaaagtccctcaaggtggtccaaaggtgacatttgacgaaaacgcgccgttacgtgaacggatattcagtttcagtagagaatcgattcaagagcttaaagctgtggtgaacaagaagaaatggttgacggttgataacggcgaaatagacggtgttgagttgttagggaaacaaagcaacgataaacttaacggaaaagaaaacggtattttaacggaaatgttggagagtttgtttgggagaaacgacgccgtttcgaaacccgtcgcggttgagatctcgtcgtttcaatctctatgcgcgttgctttggcgtgcgatcacacgtgcgaggaagcttccgagttcgaaaacgactacgtttcgtatggctgtgaattgtcgtcaccgtttgagtcctaaactgaatccggagtatttcggaaacgcgattcaaagcgttcctacgtttgcgactgcggcagaggttttgtcacgtgatcttaaatggtgcgctgatcagcttaaccagagtgttgcggctcatcaagacgggaggattcgtagcgttgtggcggattgggaagcgaatcccaggtgttttcctcttggaaatgccgacggagcttcggttactatgggaagctctccgaggtttccgatgtatgataatgatttcgggtggggaaggccggtggcggttagaagtggacggtcgaataagtttgatgggaagatttcggcgtttccggggagggaaggaaacgggactgttgatttggaggtggttttatcgccggagactatggctgggattgaatctgacggtgagtttatgcgatacgtgactaataagtaacggagtttatgaataataacgttaacggtttttctctgtttttcttttcttgttaattaagaacttaacgatgtaagattattgtaatgtgactttgtaagttgacccttgaaaagaatgttatacatttgctatattagattgcgactagaatccaaaagtaacattagatagatcatcaatttgccttaaccagtctcgaggccaagataaacttcaagataaccaacagttacgatatttccactggtgtccaagttctgaagtttgatcttacggtacacattagcgtttgttttcatgggcaatgctgtatttgccctcccaatgaaaaatgcgtcagtgtcagctgaatttacactgaacaactccaaattgagaaaagatgaagccatgttttgaggaagatgcaaaacctcacggaactcaggatctgcgtttgttgtcacaatctttgtttggcgtggatcatcttcgttagtccaagctctcaacttgtagttgtatttttgttcaccaccgtcgccaattcctgatgctcctactaccattacgaataagtccattttttgttgttgtttctttgattttctctacacgtaagacatatataagggtgttagaatttatagtgggagagctaaaaaaagctaaattactttcataatagtattgaaaatataagctctacttagttttttttaaaacctccaattattgatgatgtgattagtttgctactgtattttgagtattacttaaccaaaacttatcataacatctatttataataagatttaacaatattttataatttgtgaaaataatttattgacaattatgattaatattaattattgttaattttcacacctgtatcaaaataaatgatggggaagtatgcacttaaatctttttaaaatggaaatatgtgtaagcacgctattagattaaaaactataaaatgccacacgcccaacctctatattaaagatacatctactcatattaatcgtgagattaaatttttcatgtacatttggtattatatccatcctgcactccaacttcattcaaatcattaacaatttatttacttctgaagttgtttattaacaattgatacctcaactgccaaagaaatgtttctctcttgttggattcttctgtccaaaagttagagatgggctttgggcctgtacaaagagctttaggcctaacctgaaaagtttaaaagaagctcaattaaagctagtaagcccatacgatggtgagagatagatagctttcgatccccaacagtcttactataaaatcaaagaagataattcgaagcaaatgaattgtaatttagttttacaaaacgagttatttaagaaaatgaggaaaatatttcagtcttaaaacatattttagtttgtctaacaatatgcataatgtagataaaactaaatcatgatttatctatgatactagtataaagcaaatatgtaaaccgagtcataccatattcagccaaacgtttaaaagttaaacaaaccacggaggcaaactaattatggaatgatatccatctttatatgctaagctgaatcaaataagaccgaacacgcagttcaagaaaaagagtcttatccagctaaaccaaactagtagtacatggaaggttaggcttccgtaatatcactcaattataagggcatatcagtcaattacatacctcctacactcctcattcctcaacgtcaacttgcgtgtctttctttcttcgaatgaacttctgaagcgaaaaaaagagagaattaaagtcattcattatttggggaatggagaagaagctcctttcctacagacgccatcattaacaacatcctcttaagcttctgcgattctctccgtttgtcggaagatttcacgacgattcttcaatccttatccgaaccggaggtaattctggatctcttcctccttggcattagaatcagcgattttcgatttctcttgtttttgctcataattttgttggtgttggaatatagaaatcatg

SEQ ID NO: 14105 - DNA, 3000 bp, Unknown
  misc_feature (1)..( 3000): cDNA_ID_1808500_gDNA_ID_2214700_Annot_ID_136848 3000 nt of promoter + ATG
ttgtagggaaacatcaaacatgtattaaaatctctagtgttgcgaatttaagtttatgctttcttgagtttctttaattgcccgtcattacgctactaaaatttcacaattttgtccgttttatacataaatatacataaacaaatacgtgatttttctctctttttctattcaattcattatagaaaataaatgacgtttttcatatttgcaactaaaacattgttttctttcagttttatgtggtacatgacacctgttatgttttacgattgttgatatatattcaaaacaccatgtgcatgattagttgaacttgtagctgtagatcgacaactatcaaaattattatatatttgcttcgatcaaaaactatctacagcttgtaaatattgctcataagtgacaacccataacgcatgactgactttcaaaaatgtatttgcagaaaattttatattcttatcgatcaacccctaaatgttatactacatcgcatatatcatcaaataaaacatttctatatatgtattaacatgttatgaacatgactgtgtgttttaactttaacttttattaaaagataatatcttaccaaaaacgagaaaatattcgatatttccttagaaatcagattactgaacattcgactaatcatcaggcatttacctttcatagaaaacagttcaaaaagcaatataaagccaaaaaacgaaaaaaagattatcctgaaattaatccacagtactggttttttttttttttaaaaaggagaccgcgtttctacgctgactttcaaatcagtcgcgtcggtattattccacacgccttttttctcgtccccatcctctatccacatttctctctatatatactctcctcgtatcctaaactcatcctcaaattcaaaatttaacacacaaacacaaacacacacaccaaaaaaaacacagaccttaaaaaaataaaaatggttgatatggattggaagaggaagatggtatcatcagatttaccaaactcacctaagctttcttcaaagcttcacgtaactattccatcaccgttcaaaatcgtccctgtttcatctccgatctcatgttcagcacctgctctttgctctgcttacgagctttaccttcgtctccctgagctaagaaagctctggtcatctcgtgattttcctcaatggacatcagagccgattctcaaaccagctcttcaagctttggagatcagtttcagattagttttcgccgtttgttctgatactagaccgtacatcaaccaccgtgaatggaaccggaggctagattctctcatcacgaagcagatccagcttgtagcagcgatctgcgaagatgaagaagaagaaggtatatcagcggaggctccggtcggcggtggacggagttcgttgagtttgttaccgcagctagctacgtggaggagatcagaggctttggggaagaagatcttatatacgatcgataacgagatgagtcggtgtaagtacacgctcggactcggtgaacaaaacatcgccggaaaaccaaatctccggtacgatgcgatttgccgaccaaacgagatctatagcctcaaggataatccatacgcagatcatatcgataatcacgagaatcaaactctctatatcattcaccagatcctcgaatcgtggatctacgcatctggaaatcttctgaatcgaatcgtctcaagtatcgaagaagagaaattcggaaaagcttcaaacgatgtttacttgctggagaagatctggaaaattttagcggagattgaagatcttcatatgttgatggatccggaagattttttgaaattgaagaaacagttacagatcaaatcgacgggtaaaaacgatgcgttttgtttcagatctaaaggattagtggagatgatgaagatgtcgaaagatctgagacagaaagtaccggcggtcttggcggttgaggtagatccaaccggaggaccaagattacaagaggcggcgatgaagctttacgcgaggaagacagagtgcgataagattcatttgcttcaggggatgcaagcggtggaagcggcggcgaagagtttcttctttgggtataggcagttagtggcggctatgatgggaagtgcggagatgaacgcgacggcgagtcaagagtcgtgtgactcactgagtcagatatttatggagccgacgtatttcccgagccttgacgcggcaaagacgtttctgggagagttttggagtcatttgggatgattaaattttaatttctgctggtataattatttaatataaatttaaattggtggtttggtttaatttagtttgtaagatagtgaaatttttggaacatttgacgatccatatttgaatacaaattcatttttatatgatttatgagattttttaacaaacgataacatttacgaatatcgtaatccatactttgaattatccacaagtcgtaattcaaatatgggtggtctactaacgagtaacgactaatctatatgctctgactaatcgtcaacaaatcaccacctatccttcgtagatgttagtgtatgagaaaaacacaatttcacacctatcctttgtagatgttaaattatgagaaaaacacaatttcactttcacagtgtataatattcaaaattcaatgataaacacacacacaaaaacgttataaaaaacccaaaccgacgatgagtaaccaaaccgatgtataaaacgacattgcctttctctgttttttgtgttcaacaaatttcattaagagaaagaagggaagtgtttgaatgagtattcattcattagtccaagaaaaacatttaatgggcctgtttgtaggcccactggcacataacctatcttctgtatcattgatgccttctcctaccttcctctgacgctcacatcggaaaccctaaatctccactctctcgcgccttttaccccttctcagaatcttaaccatg

SEQ ID NO: 14106 - DNA, 3000 bp, Unknown
  misc_feature (1)..( 3000): cDNA_ID_3021804_gDNA_ID_2214700_Annot_ID_189638 3000 nt of promoter + ATG
tggctgaagtacaagccaaccaattgcctgagaatcacaatgaagagatggctgaggaagaacaacccaatcaattggctgtggaaatacacgaagaagagaaggtgatttgtttttcttccttctcgttctctttctgtgcaggttcacaaatctgttgcttccattgttgggattcgttttgctggcattattagaaaccattgacagaattcttgaacttggtttacccaaatggtatgtaacttgcagcatgatccatcttttgtaatacaggagcaggagcaggacatgcatattgagtatggaagagaccaagctgatgagttatcaatcaatagcgaagcagtcaatgacccatcaccagcagctattcatttgggagaagcatcatcagattatgcacaaagttctgttcgaggtaataaaagcttttttactcatatccataccaatctcaacataagaaatgaaacattcttttactgcggtcaaaataattgattaggtgtggagaatcttcattgtggatggctaattgatgaggaggagacggatcctgaggaggaaacggatccagaggagaaggagaccgagccagaggatccaaaggagaaggagacggagccagaggaggatagtgatggtgatgatgatgagatcattcagcttactccagaacctctttgtgaagaacttcaagagcttctcagggaagtacgtggacagaagaggaggaagaaagagatgaggtgggacaagtaaaggagctatggagctcctgtaagtagcaaattgatatatatgttaggaagccaaatagtagtagtaagctatagtattgtggtgaaaaaaggtaaaacgacccatcttaacatctcttgagatattggtttttaataatttgtgatggagtagagaaagcagatagtctttatcagtagttgtatgagtcatacaatagtacccgaacccacttatccaaagatcaatgtcgaaagtggaaaccaaatccctctaaagtaaattgaatagccagtctaaaagttagaccaaatctgaaagtcggtttaattgcaattataccttctaaatgcaagaaccaatatcaaccggtacttcatattcttttgatttttgatttgtacatataaacttttttttgtacatataaacttaaatgcaagtatagcttgacttgtattttacacatcagcggaaaagtttgagagaggaagcatattgtatttcgtttggttacaacttttgctaacttttacaataaatggaatgaaatttttttccacttaattcctcctgaatagaaagaaattgatgcaattttgttccctttttaaatccatgagccaataagtgcatctccaattatattccaaatttcactctaaatactaatttagaaaaaatccttttaataccactatattctcaactctaaaagggagtgatgaatatggtatgatatcatctgtcacttcattttggagttaccctttactttttatttacaaaatattttcctaaatttatactcatgttcttcatttatgtgtaaacaaaattatataaatgaagaaaaagagttattgttaaccttctccatgttttcattataaattgatatgagcattggttaccgttctttcggataaaaacgaagtttatctcttgaaaacattgttcctttcatattcatatcgcatcaatatataattgaaaagttcatttatggtgatcgatcaaatatataacaaaataaaatgaaaaaatactttaacattttatatataatttttgaagacaaaagagctgtttttttgtctttaattgattggtcaactgtttacatattcatttttttggtatgaactatttacaaattcatgaatacaaaaaatatctcaaatttttttttacaagtcgatccacttagttcttaccgtttttttggtataaccattattttataaaacatcgttcccgctagatttttatcgcatcaaacatagcgtactacaaacggaaacggtcatctatggcgatcgatcaaatatacaacaccaaaatcgaatccaaaaaatagtttacttgaagtatttatatgttttgcttcactgctaattctatggttttgaaatcctttattcttctcaaaaaaaaaaaaagtttgtcaatggttgttgacatggtcttgcataatatgtggataaatatttgttttaatcattttcatcatcattgcatattcccaagtgttatcaattgtttgacaaataaagaaaaattaaaattgatacctttttattttagttaattaataacgaaactgaaaatatttctccctttgcatgcaatgtgggttttaaagacggaagctgaagagtgaagaagaacaaaagatttttgagagagaaaagtagagtcactccaaaattgttctctcgcaatcttctttctcggtttcctcttttaagaaaaagtccgccattttcactctcactcagatttcttccctcttctcacctgcaaaaacccttgtttcccgctgtttcgtttcttctccggttgaggaaccaaaacgggtcaaatacgcagctgaatcatcgaattcttaggtattttcgtcttacccaactcttatctttagatgtttttccgggaaaagagctcgatcatgactccgccgtgtttttttttgggggggggggggtttctccgaaatgggtttcaaatgtaggttactctaggtttgaaagttcggattttttggttcactgtgtgttactacagcttcgattttgtgtaaacgagtataaaaattgtatcttttacagatttgagaacttgttcttcaaagacttgatttttctttgtatcaagttagtgagctcaaatgtctttgtttctctgtttgtttacatctgataagagctaactcggtctcgctggtgtgtgattttcgctcgttagggttttttc

SEQ ID NO: 14107 - DNA, 3000 bp, Unknown
  misc_feature (1)..( 3000): cDNA_ID_2992340_gDNA_ID_2214700_Annot_ID_189637 3000 nt of promoter + ATG
ttcagaaaattcctcaacggagagaaattaaaaccagaaaggtagttttgatgaagaaacaaaatatccataaacgtaacaaagaaattctgaacgtgaaagttttaaaggtccataaaataaataggaaaggctggcaaaagataagacggtgtattttaaccgaacagatcaaatcccatgtccccatcagactcttctgcagcttcttcctcaacagctactgccaccactgctccaccagactctcctgaaaccggtgcagccactgcaactgcaaacttggttggatcctgatccataaatgtacagttaacaaacaatttcatgactactaatcccaatatctgaaacgcaaaatgaaagaggacaaacctttaggaactccttcacattctcagcctgagggaaagagtactcagtagctaaggcaacagcaagaacgttcttgtaagcattgaggaacatgtgaggcgcagctgctacggttgggtaagagattgcaagagaaagcgcagtgatcatcgagacaccagctgcaaacttctcaacaaggtcgtcttcagtgaggttaagcacttcagggttaaacactgacccattatcgtagactgactcaacaacgagaccatacgaaaagggcctgattccaagcttggcaagaagcgcagcctcggatgaaccgactttgtcgcctttcttgatgagctccacaggggttatgatctcaaccgtacctttgttgattttggttggaatgttaagcacctggaagaaggaggtctgtgaagggtcaagaccagtgttgcctggttgcacgaccacatcaattggagcgactaaacctacacgagcaggagctccaacctgtcaaaaaaaggacaatgaatttctcatcaattaacagtacaagactaagttgaaaaaatcaatcaatccaacaacatgaaaggacgctacaaaaatgtgagcctaggaaactagtagactctcaagtaagtttcttgaatgtggttgcgtttcaagacagaaaatagaggttttgagttccaatttaaaccaaaatgcaaactttatcacctatccaccttacaagttaataacctaaagccataggttaaaggatgatcataaactgactaaatcatcaagtaacagtagaagctaaaaataaaccaatcaatcaaaacacaaaacagaaactacaaatgtcgtctcctcaaacctcaatgaaccaaaataactagtactataatctaatcaaccctatttgcttggaaagtgaaagtttgcatttgtgtttaaaatcgaataatacaacaccttgcattcttgcttacttagagataatcagatacagcataaaactaaccaaactaagtaataaaccaatcaatgaaaatgtaatctcctcaaagctcaacgaatcataataatctcaattagaatgtggctgcattttaagcaagaacacatatgatttcatttcaaactcaaaaatacaaactttcactttccaagctatcaatccatatttgaactctactaaagcttaacaacaacaataacatcaattgagccaaagaaacaaaccttgtacttagcaacctcttcactgacttccttcaagtcacccttagtgaagatcaacccaacattcccctgttaaatagattctaacaccaaaccaaatcaaattctccacaaaaccaaaaaatcaatactttatatccaaatgaaaacaaactattcaagacaagagaaatgaaacctgaagaagaggaaggagactgaggaaagcttgattgccagttttatcagcatgaatcctcacagatctcttcatcattgtgttcttccccatcaaaacaactgaatcacctcgtaaacctttccttatgttctgaagctgagttgatccaacattgtcagctgcaacgacaagaatctgagagtactcattcaaaagctgacaaagctttgaatcgtaaacgatcttcttctccgcctttgttgctttcaccgccatttccacttaaaaatgataaagtgagactaaagaaactaaattttggggtagagaaaatggagggcctagacgaagcttggagctcgtacaaggtggacagcgcgaattggcgctgtctctttaacctctgtaactgtttttaacagaggaaggaagagagaaagaaaaaaagctgcgtaagaatttgcttaaggttgaagaagaagtttcttgggtttatatagttatcggaagacggaaggatgaacggtcagggtttgtgggatgacctaaatctaacggcttatattatttgtagtagtatcaatgggatgggccaatattgcccaacatgtttaacattatgaatctttttcctattgggctaaaagctctttcgacccacatctcaagcccaactgagatccattcattgtaattcatactttattattttttatagtaaccaataagaaaatggttgacttaacagagaaaatggttgacccaaacaaatactatattatttttttaattcgatttcattcaaagaagcatttttgggagacgaggaggcgatccacggcttattcttaagaaaccttccacagtcgccgccgattttatcttctccgccgtaagtactctctttccctatcgaatctgaacgaaacagctcagcacattgtcatctctgtagcaaaattaagttcgtgtttttgtgttttgttgtgattctgtttaggtttcatttgggtttgaattttagggtatttttggtttatctctagtgttactgattcgggatttttgggaaagagctcaacttttgttttgtttcatctttcgttgattttgttgttacataggtttgaaaaaagggatcacttgtttggttgcctttgtttgtttgtttgattataacccaaagacttatacttttggtcctccaatttcttctgaaactacagggaattgtgagggatcaacaa

SEQ ID NO: 14108 - DNA, 3000 bp, Unknown; identical to SEQ ID NO: 14105
  misc_feature (1)..( 3000): cDNA_ID_1808500_gDNA_ID_2214700_Annot_ID_189634 3000 nt of promoter + ATG

SEQ ID NO: 14109 - DNA, 3000 bp, Unknown; identical to SEQ ID NO: 14104
  misc_feature (1)..( 3000): cDNA_ID_3021816_gDNA_ID_2214700_Annot_ID_189632 3000 nt of promoter + ATG

SEQ ID NO: 14110 - DNA, 3000 bp, Unknown; identical to SEQ ID NO: 14101
  misc_feature (1)..( 3000): cDNA_ID_2706036_gDNA_ID_2214700_Annot_ID_189629 3000 nt of promoter + ATG

SEQ ID NO: 14111 - DNA, 3000 bp, Unknown; identical to SEQ ID NO: 14100
  misc_feature (1)..( 3000): cDNA_ID_2706056_gDNA_ID_2214700_Annot_ID_189628 3000 nt of promoter + ATG

SEQ ID NO: 14112 - DNA, 3000 bp, Unknown
  misc_feature (1)..( 3000): cDNA_ID_2992578_gDNA_ID_2214700_Annot_ID_189626 3000 nt of promoter + ATG
cctcaacctcgacctatctactaaacagtgttaatggcccactctgggtcaaagcccttgctaacgtctctgctatccttcaatctgttatctctttgcacgtaagtttcttagcgccaagtctacgcttttttaacaaagactgtcgtctctaactatatgtctgactcaattctttgttgtagatatttgcgagtccaacatatgagtacatggacacaaagtatgggatcaaaggaaacccatttgcgataaagaacctgctgtttaggatcatggcgagaggcgggtacatagcggtaagcacgcttatctcagcgctgttgccgttcctcggtgacttcatgagcctaactggtgcagtgagcacattccctctcacattcattctagccaaccacatgtactataaggcaaagaacaataagctgaatgctatgcaaaagctatggcattggcttaacgttgtcttctttagtttgatgtctgttgctgcagccattgcagctgtcagactcatcgccgttgattccaaaaatttccatgtttttgcagatttgtaattcattatattatatagtcaattgtgtatcctttattcttaggcaggtttatttctcctgtaagcttgtattctctctctatttgtcttaccattagagcctaaataaataaatcaagttctaaaatctaaaaagcatataaaagaccactttcatcataatcattctgaaaatttaccaacaaagaatactaagttgcatgattaaagtctctattagaaatgtaaatcatagtattagagaagaacataaaaacacctaacttaaaaaaaccttaatttagtgagatagagaagagaagaaacagaattgttgttggtttaacaaaaacctaatctttcaatgattagctgtttaatttgaaattataacaataatttagacaggccaaagtggaaccccactgtctccaccaaagctctagataaaaaaaaaaaaacgaaagcgttagatattttttatcaatcgtgctccgtaatcattacctttcttcttcatcttcatcttcacgcagcgacttctttgattctctctttttattctcagctccaatttcaacctgcatttctctcttctcaattttgggtttctttttttgatatctcatttgatcagatcgacgaagaggtaaccattttgccgtttgttagttcttaacgattttattctgttaaaaatcagatttttttttgcaatgcttgtagaaaaagattcgatttttgtgtactgattgaatcaaaatatgtggttatggatccatggattgatttgtttgaactgatgcaaatggctaatgtgaaaagtcaagaatgtgttaatgtagttttttttgttaaacctctttgtgttgttgggttttgaaatgttgttgttacagaggaagaaggtttgagctgagagatctttggaggtagaaagaagatctcaaaaacgatgtcgtttacaggaactcagcagaaatgcagggcgtgcgagaagacagtgtaccctgtggagcttctctcagctgatggaatctcttatcacaaggcttgcttcaaatgctctcactgcaaaagcagacttcaagtcagttttcctcttttgcctttcctaaatgtagttattagtgttttgagagtttcatttagatatttagctagagagatacttgatctgaattggtcttcgttaaagtgataaagttaaaacgtgttgatggtttctgaacagctgagcaattattcatcaatggaaggagtggtgtattgtaggcctcattttgagcagcttttcaaggagtctggtagtttcagcaagaactttcagtcacgtatgtaaaactcttttcttcaccttctggtccagcttttacatgtggtcactttaattttaatcttcaaactttttttttcctttcacagctgcaaagccattgactgataagccaaccccggagctggtaaacgcttcttaacaacgatgtttttatttagttacacgacttgagatacatgactctatttctcttcttggttgttctcagaataggacacctagtcgacttgctggtatgttctctggaacgcaagacaaatgcgctacttgcactaaaaccgtgtatcctatcgaaaaggttagtatacatttaagcttgtatatgtcattaccattgctttccaatacacttttgtgttctctctgtgattgttgtcaagaaaatcacagttaaacttatttggatcatttgcaatatgagttacatggatccgaatcacataaagttgagatctctttaatacagtcaattcttatatctcattgttctgttttctaaaaattgtaggtaactgtggaaagccagtgttaccataaatcttgcttcaagtgttctcatggaggctgtccgatatctccatcgaactatgcagctctagagggaatattgtactgcaagcaccatttcgctcagcttttcaaggagaaaggaagttacaatcatctcatcaaatctgcttccatcaaacgcgctactgctgctgctaccgcagctgctgcagctgtagcagccgttcccgaatcttgaattcaaattctctttatttttgtgtatgtgctgtgttgtttacatgtattcgatatgattcatgttctttgtcttccataattgaaccaggcataaaattctcccagttttctctgagtttcttgtttgtgatactactacatctataataaccgaggacttttggctttgatcttggtcttttgagctggaccgaaccggaatgttagaccggacaaatctctatcgttactcgtcgttagtcatctccggtccggttcttcactaaagttaaaaatccagttaaacagaaatcaattaagaaaacacaaaacccaaattgaattgtgtaaagatatgaactttacaaaagaaaattgtcaatttcgaaaa

SEQ ID NO: 14113 - DNA, 3000 bp, Unknown; identical to SEQ ID NO: 14099
  misc_feature (1)..( 3000): cDNA_ID_1808783_gDNA_ID_2214700_Annot_ID_189625 3000 nt of promoter + ATG

SEQ ID NO: 14114 - DNA, 3000 bp, Unknown; identical to SEQ ID NO: 14098
  misc_feature (1)..( 3000): cDNA_ID_2710916_gDNA_ID_2214700_Annot_ID_189624 3000 nt of promoter + ATG

SEQ ID NO: 14115 - DNA, 772 bp, Unknown; identical to SEQ ID NO: 14096
  misc_feature (1)..( 772): cDNA_ID_3021834_gDNA_ID_2214700_Annot_ID_189620 3000 nt of promoter + ATG

SEQ ID NO: 14116 - DNA, 3000 bp, Unknown
  misc_feature (1)..( 3000): cDNA_ID_2992340_gDNA_ID_2214700_Annot_ID_136851 3000 nt of promoter + ATG
ttctcagcctgagggaaagagtactcagtagctaaggcaacagcaagaacgttcttgtaagcattgaggaacatgtgaggcgcagctgctacggttgggtaagagattgcaagagaaagcgcagtgatcatcgagacaccagctgcaaacttctcaacaaggtcgtcttcagtgaggttaagcacttcagggttaaacactgacccattatcgtagactgactcaacaacgagaccatacgaaaagggcctgattccaagcttggcaagaagcgcagcctcggatgaaccgactttgtcgcctttcttgatgagctccacaggggttatgatctcaaccgtacctttgttgattttggttggaatgttaagcacctggaagaaggaggtctgtgaagggtcaagaccagtgttgcctggttgcacgaccacatcaattggagcgactaaacctacacgagcaggagctccaacctgtcaaaaaaaggacaatgaatttctcatcaattaacagtacaagactaagttgaaaaaatcaatcaatccaacaacatgaaaggacgctacaaaaatgtgagcctaggaaactagtagactctcaagtaagtttcttgaatgtggttgcgtttcaagacagaaaatagaggttttgagttccaatttaaaccaaaatgcaaactttatcacctatccaccttacaagttaataacctaaagccataggttaaaggatgatcataaactgactaaatcatcaagtaacagtagaagctaaaaataaaccaatcaatcaaaacacaaaacagaaactacaaatgtcgtctcctcaaacctcaatgaaccaaaataactagtactataatctaatcaaccctatttgcttggaaagtgaaagtttgcatttgtgtttaaaatcgaataatacaacaccttgcattcttgcttacttagagataatcagatacagcataaaactaaccaaactaagtaataaaccaatcaatgaaaatgtaatctcctcaaagctcaacgaatcataataatctcaattagaatgtggctgcattttaagcaagaacacatatgatttcatttcaaactcaaaaatacaaactttcactttccaagctatcaatccatatttgaactctactaaagcttaacaacaacaataacatcaattgagccaaagaaacaaaccttgtacttagcaacctcttcactgacttccttcaagtcacccttagtgaagatcaacccaacattcccctgttaaatagattctaacaccaaaccaaatcaaattctccacaaaaccaaaaaatcaatactttatatccaaatgaaaacaaactattcaagacaagagaaatgaaacctgaagaagaggaaggagactgaggaaagcttgattgccagttttatcagcatgaatcctcacagatctcttcatcattgtgttcttccccatcaaaacaactgaatcacctcgtaaacctttccttatgttctgaagctgagttgatccaacattgtcagctgcaacgacaagaatctgagagtactcattcaaaagctgacaaagctttgaatcgtaaacgatcttcttctccgcctttgttgctttcaccgccatttccacttaaaaatgataaagtgagactaaagaaactaaattttggggtagagaaaatggagggcctagacgaagcttggagctcgtacaaggtggacagcgcgaattggcgctgtctctttaacctctgtaactgtttttaacagaggaaggaagagagaaagaaaaaaagctgcgtaagaatttgcttaaggttgaagaagaagtttcttgggtttatatagttatcggaagacggaaggatgaacggtcagggtttgtgggatgacctaaatctaacggcttatattatttgtagtagtatcaatgggatgggccaatattgcccaacatgtttaacattatgaatctttttcctattgggctaaaagctctttcgacccacatctcaagcccaactgagatccattcattgtaattcatactttattattttttatagtaaccaataagaaaatggttgacttaacagagaaaatggttgacccaaacaaatactatattatttttttaattcgatttcattcaaagaagcatttttgggagacgaggaggcgatccacggcttattcttaagaaaccttccacagtcgccgccgattttatcttctccgccgtaagtactctctttccctatcgaatctgaacgaaacagctcagcacattgtcatctctgtagcaaaattaagttcgtgtttttgtgttttgttgtgattctgtttaggtttcatttgggtttgaattttagggtatttttggtttatctctagtgttactgattcgggatttttgggaaagagctcaacttttgttttgtttcatctttcgttgattttgttgttacataggtttgaaaaaagggatcacttgtttggttgcctttgtttgtttgtttgattataacccaaagacttatacttttggtcctccaatttcttctgaaactacagggaattgtgagggatcaacaaatggctcccagaggaagaagaaaggtataagctgtactgttttttttgttttgtttttccaaattaaaatgctggctaacaagtaaagatatgagcttttgaatcatatagtttttagagagtatagtggaaaactaagataaaagcatagacatagacattagagtagaatgactatatagatgaagtatttgaatgacatgattgttgaagttaacattttgtttctctctacgacttctgtgtactcaacgttgagaacactgatgagataagtttacaaatacttctttttatgatgggtgttcttgtttttttccttctatgattatctctcttttctatgcttttaaattgctacttttcttttgcttttttgcagaaggctggattg

SEQ ID NO: 14117 - DNA, 3000 bp, Unknown
  misc_feature (1)..( 3000): cDNA_ID_3021804_gDNA_ID_2214700_Annot_ID_136853 3000 nt of promoter + ATG
gtgtccatttgttctaccctcagtctcttagtgctaaggcagaggttatggagctcttctctgtggagaagcaactgcttagctcacatactggacagctgattttgcagatgggtagtgattctttactgtctttgagggtaatgctggagcgggtatttctggacaaggcaactgctcaacagttagctatgtatggctctctgtccctgccaccaccagcactaaggaagtccagtaaatctggcccagcttggacagttttccagattctacagcttgcctttccagaacgtctgagttgcaaaggagacagattcctggttgatggaagtgatttgctgaagtttgatttcggggttgacgcgatggggtccatcatcaatgaaattgtaacttcaatcttcctggagaagggtccaaaggagacacttggattctttgattcgctgcagcctctattgatggaaagtctgtttgctgagggatttagtctaagtttggaagacttatccatgtctagggcagacatggatgtaattcacaacctaataatccgagagatttcacctatggtgtctcgcttgagattatcatatagagatgaattgcagctagagaacagcatccacaaagtgaaggaagtggctgctaactttatgctgaagtcatattccattcggaacttgattgatatcaagagtaactcagcaatcaccaagctggtgcagcagacaggcttcttgggtcttcagctttctgacaagaagaagttttacacgaagactctggtagaggacatggctatcttttgtaagagaaagtatggcaggatttcttcatctggtgattttggaatagtgaagggctgcttctttcatgggctggatccgtatgaagagatggctcattcaattgcagctagggaggtaattgttcgctcttcaaggggattagctgagcctggaaccctctttaagaacctgatggctgttcttcgggatatcgtgattacaaacgatggaactgtaagaaacacctgtagtaactcagtcatccagttcaaatatggagttgattctgaacgtggacatcaaggtctgtttgaagctggagaacctgttggagtattggcagctactgccatgtcaaatcctgcatataaggcagtgcttgattcctctccaaatagtaattcatcatgggagctaatgaaggtatagcaatatcaaatctgccttctgaatacagctttgttcatctgtattgttgtgtaattgttttctgtatttgttcttttcccaggaagttctgctctgcaaagtcaatttccaaaacactactaatgatcggcgcgtaatcctttatttaaacgaatgccattgtggaaaaaggttttgccaggaaaatgctgcttgcacagtcaggaacaagctgaataaagttagtcttaaagatactgcagtggaattcctagtcgagtaagaattgggttttagtaacttcagtcgctctttttagtgtttgtgttattttttttttatggttttactaaacctctttgcaatctgctttctctttacttgcatgaagatatagaaagcaaccaactatatcagaaatttttggaattgattcatgcctacatggccatattcatcttaataaggtttgaatctggttcctttactgttgaatctttctggaagcctctacctgtcatagaaacactttcctattatccttttcttgctgtgtaattggtgtttttggtttactagacattgctgcaagattggaacatcagtatgcaggatatacatcaaaagtgtgaggatgtaattaactcactaggacaaaagaaaaagaagaaagctactgatgatttcaagagaacaagtttgtctgtcaggtttgtacaatgatttgcttttcctctggatgtcgtctctggttgaatgttatgcataatttgtccagaaagcaagtctgatgttgatttctagttttccagttatcttctttccatcatttttgttcttcatagcataatgtctagctttggtttctacctgattatgattgatttattctccaatgaacagtgagtgctgctctttccgagatccttgtgggagcaaaggttcggatatgccttgtttgacgttctcctacaatgccaccgatcccgatctagaacgaactcttgatgttctttgcaatacagtttacccagttctgctggaaatagtgatcaaaggtatttgaataaaacttttcatttttgtatatttcgcttgtttccctacacttcgatttcttctttgatgggggagcagtgtatctgatagagtcttcctttcaaaattttgtagttacatggcttacgaaattttgttttttgccagaagtttaatgaaccaaaatattttctcaactagtctgattgaattttcctccaagttgtgatcgatattctgtgctactataaaagaaagcctatgttttagtaagatttctagatacatgtttttgatgatactcctgtatctaaactgagcaggtgattcacggatttgctcagcaaatataatctggaatagttcagacatgacaacgtggatccggaatcgtcatgcatcccgccgaggggaatgggttttggatgtcactgttgaaaaatctgctgtcaagcaaagtggtgatgcatggagggttgtgatagactcatgtctttcagtgcttcatctaatagacacaaaacggtcaatcccttattctgtaaaacaagtgcaagaattgcttgggttatcctgtgcttttgagcaagcagtacaggtacttactaacttaaaacgtgatccgttcctggatcttacacttaagtcatgatacttcttacatatttcatgtttggtatcacatttgctcattgtttgtgtaaggattttaaacgtaagatgttgatttgatttgcagcgtctatcagcttcagtgaga

SEQ ID NO: 14118 - DNA, 3000 bp, Unknown
  misc_feature (1)..( 3000): cDNA_ID_2710950_gDNA_ID_2214701_Annot_ID_136865 3000 nt of promoter + ATG
gggcgataattataaatatagcagaaactctataaattaataatgataggaccacataattttattaatttatataataaattaataaatattaattaataagataaattaataaatattaatttaaagaatatttacgtaaaacacaatattatttttttttaaacaatatttttaatttagattttctcgtattttgttgtttgtatattcaattatgttatatattttattttatttttgacttttttaatttattttcttacaagatattgtgttcgtatatctacgacgttaacgtatagcttaatccaatttttctttacacaaatcttaacaatgatttttcatagaaaaaaatgttacaaaaccaaatatgatggatcaaatactcaaagagttgtgtgagtacaaaagagatcataccaactgtaatctaaaaagaattgcaattgtagttttaacaaaagtttcatataaaattagtcttaaaatatttgtttaagatctatgattattaatttatgatattattggaaccatatttttacatagaaatttcaaaaaaattattatcttattatcttatcgattttgcttaatttttacattggcccgacttgagactagcaaaattaattattttattgtatttattaatttatcgagtattaatttatagagtttccactgtatgtgttttgttgttaagtaagatttgtgacagtaatggtgatagtgtgacactatttaagcagagtgatatttgaattagtaatgatttggtttgcttggttaataaattcttaaaaatgaacaagtttttttttttgcttattttattatattcatcaaacattttctgaaatttttctaacaaaaagagacgtaaacagtcaaaataaatttgttgccttgcaacgttgcaaatttcaaaatctacttgaaatctagaaatatgatttctaccacatttcgtcttccgtcgtgccaaaatctatttaaaatccaatttgatcaaatccaaaaggcaaaatttcctacatacagtatttatatatcacacatgacacatgtgcactattagtatttataaaataaatgtcaatgtcagcattttttttttgtgcaaaatcaatgtcagcatattcctctgtcctcaaatctcaatttgcttcttcttctccttcttgattacttaattaatcacaattattagtaaggtaaacttcttgtccaataatttgtgatacagtcactgttttgaagttgtcattaatgatgtcgggtatcatcgacaaatctaattcgctaactgtgttattagtattataaaattacaacaagcagtgatattgtaaatattaatatgctcatggaccacttattttgtgcaagggggataattaacaacacattcaattcaaaaacatattaataagttaacataaaaatagtagaattatcattcattgaatcttctaaccaaatgatactcatttttgtatttatttctaataaagtaactccactatgaagaaaaacaaacatatatatttgtagatgaaaactatatcaagatatgtaatatttctatgctaatctcgcagttgtgttactatctaaatttaaatttgcatattgtattatcgaattttgtggtaactcgagctctttgttttccaagaattttctttcattctttgtaatgtaggttcgtctgagccgaatagaaaaggataatgagagaatcgaacattggtaacaatccttccataagaagatcggttgatcgactatcttcttatggagtatccgattatctacgagcagtataccctcaaaatagtttgaaagtgataaaaaataatgacaattttttttcaatgattattttataccttctgatccgcttgatacctctagataaaatatagtagtacaaaaaaatttgaaaatacatttttgatacggcttttttgattaataattattaaaacattaaactctatactgcattgataccaagttatttaatttactaatcaaaacttcttttctttttcgtatctcctcagctggtatggaaaattctttcaaacttcctcatttcttcttccactagttatgtttggttttgcttgattcttaattgcataattagaaaatgtcacacaaagcatttttcctaactatttagactcctattaacaacaccattggtttaggtcaagattgtgttacaccaataaatatccattggccattgcttccaaaagaatatgtttgacctaacctaacggatgagaaagaaaactctttttgtttataatattactaatcaacaacgacacactacataaaaagatttacaactgttacaagagatagattcaaaattttgagctccaagtagctgggatgattatgatattcccattgttttactattcgacaaaaagtaatacaagtatggtcattgtgttgagtggtatagttgacatattgaaccaatcgatttaatttaatttcaactacttcttaaaaaatttaaaagcaatttaagcctattcttcttcctttttattaaatgtacacattaattgaacctatcatatcatagtatcaatttaaaaaaatacaataaaatcccatcattagtgttatctaaaataaaaacactaattatgacgtgatcttaaattaatttttagataaacaaaaacgaaaacagaatcacacaaatgatgacgtggcaattccctacgtgtaacaccacacacagtaacgttcctctcctcactctaagcccaaaaatctctctttttttttttttttatctcgcgtttataagaatcctctctctctctctctcacattattttctgtttggaatcttggatctttctttctgagatcattcgtcttttgtactgattttgagagatttcatttttgtttgtttaccgatccgccgccgtggatttttgttttccgatg

SEQ ID NO: 14119 - DNA, 3000 bp, Unknown
  misc_feature (1)..( 3000): cDNA_ID_3021839_gDNA_ID_2214701_Annot_ID_136866 3000 nt of promoter + ATG
ccttgcacaaaataagtggtccatgagcatattaatatttacaatatcactgcttgttgtaattttataatactaataacacagttagcgaattagatttgtcgatgatacccgacatcattaatgacaacttcaaaacagtgactgtatcacaaattattggacaagaagtttaccttactaataattgtgattaattaagtaatcaagaaggagaagaagaagcaaattgagatttgaggacagaggaatatgctgacattgattttgcacaaaaaaaaaatgctgacattgacatttattttataaatactaatagtgcacatgtgtcatgtgtgatatataaatactgtatgtaggaaattttgccttttggatttgatcaaattggattttaaatagattttggcacgacggaagacgaaatgtggtagaaatcatatttctagatttcaagtagattttgaaatttgcaacgttgcaaggcaacaaatttattttgactgtttacgtctctttttgttagaaaaatttcagaaaatgtttgatgaatataataaaataagcaaaaaaaaaaacttgttcatttttaagaatttattaaccaagcaaaccaaatcattactaattcaaatatcactctgcttaaatagtgtcacactatcaccattactgtcacaaatcttacttaacaacaaaacacatacagtggaaactctataaattaatactcgataaattaataaatacaataaaataattaattttgctagtctcaagtcgggccaatgtaaaaattaagcaaaatcgataagataataagataataatttttttgaaatttctatgtaaaaatatggttccaataatatcataaattaataatcatagatcttaaacaaatattttaagactaattttatatgaaacttttgttaaaactacaattgcaattctttttagattacagttggtatgatctcttttgtactcacacaactctttgagtatttgatccatcatatttggttttgtaacatttttttctatgaaaaatcattgttaagatttgtgtaaagaaaaattggattaagctatacgttaacgtcgtagatatacgaacacaatatcttgtaagaaaataaattaaaaaagtcaaaaataaaataaaatatataacataattgaatatacaaacaacaaaatacgagaaaatctaaattaaaaatattgtttaaaaaaaaataatattgtgttttacgtaaatattctttaaattaatatttattaatttatcttattaattaatatttattaatttattatataaattaataaaattatgtggtcctatcattattaatttatagagtttctgctatatttataattatcgccccaaaataataaaaacagtacaggaaagtcattatgaacatcattacacaaagcccattacaaaattcgcccataagcccaatctaacaacggcagagattcagagtcagttccgacggcgctgaccaaagaaacgcgtctctctctctggagaaaatttcctcacagagaaagaagaaaaagacgagagacgtgaagaagaaatcagaattcagaattgagaagcaaacaatggcttcaacgatctacacttgcaaagaatgcggatcagatctgaatctaaaccctaacgatttatttccaccggatttctacttcgaagccggtaacaaaggaacactctcattcgccgccgtcgacgccgagaaattccgattcgagaaagaagataagatcatgcctttcttcgaaaccctaaattactggggaatccaacggaaacgaaccaagatcaagtgcactagctgcaaccacctcatcggttacatctacgacgatggtcctcctctcactggtggtattggccaatacggatttggtccgagtcaagtcattcctcgtgctcctcggtatcgattcaaaaccaaggcggttcaagtctcgtcccagacttagctaaagcagagggtttaatgcttttacatagatatgtataaacttgttaaaagggttaataggattgtagatgtttgttgcttaaaactcagatagtaaggtcgttagacttgccatcggtcttggcgcttgcttcagcgccaagacggatggcaatacggaggtttaaccgccttttggaactgatttttgttgcttgcttttgaagaaacatctacaatcatattctctcctttgtctcttgtctattgtagctagtatagttaagatatgtatgttaagtatgttgttggcttggattttgatcatatttgtagtgtttgtgtttgttgtgagtttgaatcacatggttgactgatttgttcaatgatttgggacgaatattttcgtagtttgttcaataatcatcggttgttttgtttggtgattcgagttttgtacgaggaactttagaagctgattgttttaagaacaaactctatcggcttaaagagaatgtgaagaacagaacaaaaaccaatagtgttagtttaatggaggacgtcatttgaaaatgacgttttggtgatattgattgtgatggccatttatgattcaacggctgtgattgaatgatgtaacattagttgcttcaagaccatatattttatattatccatacactacctaattgcttaaaatattgttgatgttgatgaagattggaagttacatctacttgtctacttgtcgtttcttgtatagttggagtttatagtttgtcttaacgtacaagataatttgaaaggtagacgtagacgttggatacttatttggtaggctcttaagaatcttaggtgtatctctttagtttgaaggttagattcagaatctctgtagattcattagtagctttttctgtgtgatctttgtgttgtatatatatagatcgaattgattttagctggtgaaaggtgaagttgtggtatgaatatgaagaaacagatt

SEQ ID NO: 14120 - DNA, 3000 bp, Unknown
  misc_feature (1)..( 3000): cDNA_ID_2686544_gDNA_ID_2214701_Annot_ID_136867 3000 nt of promoter + ATG
ccttgcaatcctctctacgcaacttcgctcaatgtcttttgaaccatgagcagcaaactctgcaagatcaatcgtcttgcatatatgtatatatttgttcgtgtgtgtctctgtacatgtcatgtgttattgcttctatattaatggatctggactttggtgtggttgttgatttgtaactgttgaataaaatctttctatggaacactaatttcttcttgttccatagatgataagtattcttgttctatattgtattttggtggctacagtctacaattctacgcattagaaagatttaatacatatcaggtgcataatgagtctccatttatcttatttgaattacagaattgttgctgaatttaatcctagcttatatactttagatagtagatttgagtgactaataaccagggtttgttatatattatccttcaaactaaatcatacttaacatgagtttctttttttcttcatttaaaattttgtcaattggtggttttgcattgaacttcttgctttaggtctgaagcttcatactgttttaatctgcataaattgcgacagatatttcaaattaggagtatgaaaatgtaaaaaaggtcttcaagatttttttttaccatagacttttttattttttcatgataacattaatatgaccttctttttttttaacatcaacataaatataccttgtcaccacaatattcttagtttcttttcaaaaataaaaatcgtaatttttctattattacatcatattttgttaattttttaaaaaacaccacatgcatattactgtagcttcacatattggagatttggttttgtatcacgacaatggttttgttgtttgagtatcagtttagataatgcatgtcaattggttcaccccacaaaaaggcagttgttcattatgtcattttcaagctacacaagtagatcatcagactctcaaccatcagcaaagcagagcaaccatgataattttaactcaatagtcacatttggattgcaagcatgggtggatgtatgttaggagtatgtgggacacgtgccccacattgattataatgttttgcgagtattagagtttacaatggctacttagcatctttggtcgtaatgtagtaaagtattaccattcccatgtttagatccctttgatgttgcaatgttttctttatgtgtttattagttatccaaataacattattctaatttcttttttggttggtctttcttataaaaatgtcaattctaagttttgttatcattattttgtattttactaatcaaaaaaatataatattgaaacaatatatatatatatatatatatatttgaaataaaacatatattttttttgtgccccatacaaaatacatgtttagatttgtcactgattctaagaacttattttgtagaaaagtaattttcttaatattctatgaatctttcgaatatgttatgcatttacgttggaactgttaggtttctcataaaacattgtaaaactaaaatataataaggggtgtgtggaattttggctcaaaaagattgtatactttgccagatttattgattttgagactatgttgtgcagcatgtgcacaaaatttgttgattttggtaatagtgacaatatagatccaaagatgatttttaaaaaaattaagtgaatatatagttcatttttatcgtaaataattggttaaattataaaattaaaatattgtataaagagaaattaaagcgattgtaccattgtagcaaccacaaccagcatatatgtttgctcaagatttttaagttgttttatacacgattcaagcatatgatcttaatatcaaaaaggatatattaagtttaatcggctttccattttagttggtagcaattgtaaaaatttaatattatatccttatttattaaatattattattacctaaccttttttgattaacaataatcataaaaaagctgaccatctcaatttgaagataaacaaatagatttaaagaagtgatcaaatcatgtattggtaatgtctaacatgttcttaccacatcttaattcacagataaacatatacatatacattgaatatgtttttatataacacatggttcaagggaacaaaggtgggataaatcctatcatattttctattcttgacttaccttcataagtatctaggttataagtttaaattttctttataaaaaataacaatataaaaagaaacagttaaatttgaaatttactactttttaacaaaaattattcatccatctgtcattcaagtatcaatatagaaaataaacaaattcatgttgtcagccatactgcatgaacatgaatttcttttatctttttactttttttcgtaaaccctcaaaataacatcagtaaaaatggatagcaacataacagataaataaaaaccaaaaacaaaaacaaatccagggtaagttaatatgaaacaaatgcattagatcaaaaacttatttattagtgtagcaacttaaacagaaataataagtctcaaagttaattttttttttaataccaaaaattatatcttttatattttgaatgaccacgaatatctttttcacttgatcgataaaattacatcatacagtacatcttttctaaattaaaacaaatctaaaacatggttaacaaaacaaacgggttaaatgtgaataaacaaaaagtatcgggtgcaaaacataaaaagacaaaaataaaagactgagtccaaaattccaaaaagtcaaagccaccttcctaacttgtctgcatagacgaagaagacaaagaagaagagattcgatcacacaagaaaaattacaattcttcttaatcctcattattatatatataaataaacttcaatctaagcttcttcgtaatttctctttcgttcaatgttattcttttagatctcgaacaaaacaaaatctccagaagaaaaaaccaaattcc

SEQ ID NO: 14121 - DNA, 3000 bp, Unknown
  misc_feature (1)..( 3000): cDNA_ID_3021876_gDNA_ID_2214701_Annot_ID_136871 3000 nt of promoter + ATG
gattttgaatatagtgttaagattatcaacaatttgtataaatatttctggtataatattatgagagttttgaatctaataagattagaaagcaaatatatagaactttatgttaaaagttataattataagagaactaagtaagaacctgaatcgtgtagtttttgaataaaggatgatcataaattggatgattattcatatgaacgcagtctattatatctccatctggactctgtataaagattatcgaatattcacgaattaatattttaatgaaaaaaattgttaggtgtaattatttttgtgtgaaccaacaaatttcattaaccttgatagatttaagagcaggtttgttgagtttctttaagattttttctacttttgcatcacgagtatcagaaaactcactaccagaaactatcgccgctacgattagaatgctgagcacaaaacgagcaatcatcattcgattgattattaagagtatccaaaatattttttttctttggctaagtagatgattaaggtgagtgccttatatatatatctacaatgaagaattttttttgcaaagcatatgttaacaaatggtaagaaaattatacttcaaaactttttattcattagagcaagactcttaatttaaagcaaattaaagtgtatttaatttgttccttgaaatagcttaatctatttttgactaaataaattgtatatggacatgtcaaaagtcaagtaagctatttcaaggaacaaattaaattttgatttaagttttattattttatcaaaaaatacaatttttaatgaagatgaaaataagtttttatatatagaaaaatacagatttaaatgattttaaagagaaaggttgggtttttacttttgaaaccttccattcaaatagaaggtttaagtattttcagatttagccagatttgatttagtcttagtttattttcctggttttgaatttgatttgttaatttctttttaaaatgtgtttttgttttaatgaaacgaaaactgttaaaaatttaatccaaaccggttttagattagtttttaatcttgttgtggtttaggattgaaaagattcatttcatgtggttctttaaaattgtcatatctctcgtttggagtttctatagtatttctgatatagttttagttttgatgtcaacttgattttcattttaccattatacatgtagatgaaatcatattttgtgaacataattcttttttttctgccaaagattagacaattaatatcctcttgaattttgaaaaaaataatgtataacacaattaaatttagagagcggtatgctatctatgtgttacacattgaaagtgtctgtattatgctatctattaaaactatgagacgcatgcatgtatttacctaacaattaatgtccatgttactctaaacttcaagtccaagaaagcatcaccaaagcttcattcaacttgttcattttgcatttatccatgatttttaagctcattgattgtaaattacgaattgtggcattgtatcgtaactttcttcagattcacatctttaacagtttatatcactcatgccaaacaaaaatcgcatcaatcatatttctataagttttatcagtctaccaaataaactctgttgatttaatataatctattagagcatccacaacacaagttattttttcatcaaaaaaaaaaagttttgggttatggatactctaataaacacaagctattgaagtgccatcaagcccaatactatgagacaaacaagcccatgtaattagggttctctagcaagtagaagtcatccaactctccttcttcatgtgatgaaacatcaaatctagaatcatttgcttttggtgaaaatttaaagtctttccttttgctttctatgcatcttaataaagctgcaattaatgagctatttattttcagttttagatttctcctttaataagctgaatgagcataaacctatctaggtttagaaatgtcaacacaatcttttgaagtattatgaatctcttcaaactcatgtacacgctctcgaaacaacaagacaaagtaaataaagcaagacacaaccataaattaatcgagcaatattgtactatcttggtgtaatgtatggaactaattaccgactacggagatcataacacatttattaatacataattacgttttaaaaaacgagaatgacgaaaagttggtccaacactccaactacatataactaatatcaagctttaaatacttgaatgacgtgttgacgaaacaaatatttatcaatacaattgcgtaaccataataataattcaataggacttttattaatcgtgtgattacaaattttacacacacgttgaatattcgacaaatatgacttgatgtggtcctacttcgatgacttctacgttgacttttgctgtttgaggtagagaaggaaaattacctgccatcttttttttactataattaaataaaataaaataaaaactttactttattatattttcgggaaaataaattgacttcaaagtttcatcatcatacaaaggagaaaactttgaagcttcttactttctttacttcacgatccttcttttgcctaatttctcggtttcatttccaaaattctcttttgattctttcttactctttcgctagagaagatttagactgggttttgagtatttctcggaaattttcgtgttttttttttctgggaaagtttccgagatctcggtggagtactttttttggcgacgaaccagtatggtttggtactcaagctgtagaattttgtttctgggtctgcttattttgttggcttcgagctgggttttggatagatgcgagggatttggtgaatttgggtttgaatttcatcatcgtttctccgatcaggttgttggggttttgcctggagatggtttacctaatcgagattcttctaagtattatagagtg

SEQ ID NO: 14122 - DNA, 3000 bp, Unknown
  misc_feature (1)..( 3000): cDNA_ID_2710928_gDNA_ID_2214701_Annot_ID_136873 3000 nt of promoter + ATG
tgtgaaagggtcagacttggttgcagcgcaagatccttcaagacatttaaaaacagtacaacacattggatgagactacgggtgacttaagccaggtttcttttattctcagctggaatataaatctcttgatcgtatattttaagatagcctagttagtccaacctggctttcttcttgtgaaggattgaaggaacattcattacagctagcaagctttaagcattgctggattacaccaggcatgggagctgtgggcatatggcgcagagacatagaaaccggtactctattcttgataactgtcttagagctcaagtacatgtctcatgaattggtacacgagaaaagtcctttatagttattgagctacagagtataaaaaaggttcatgtacaaaacatgctctcactggtacatacgtaactgagtttattttggtgaatggacaaaatatgcactcactaatttattttctcgacatttttatattatttgtatctaaaatatttgttggatatttgccaaccaacacgatccgataatgaagtttctaaaaaaaaaatctaaataaaaaatcaatagtatttcaagaatatattccaaattaaagggtatattatcatttgtatttctcttttaataatgtagagatagattttagaattaaaattttttccttttcttataaatatatgaacaaatttaaatttggcatgtctctcatttatgttaatgactaactttccaaaactaaaacttatataataaaattactaaatatataaatattaattaatataaaatgaatagaacaaatcattatatactatatttgtcttcacaaattataattgtattgttagagaaaaaaagaaaagaaacaacaatttatttttctatttttgtgaaaccctagatttgaacatcgctcatttcttcttcctacctctccatagatttatcatccttcaacaccaattttgttattattattcatcgcttctcctcatagatttatgatgagtaaaccgagatggtttcaagtattgacagaggaagacttagatggaaactaccaaaagcatacttgtggtttccgaaaaaacatcttcaggttcgagtcctgcgacgtagtgtgccccgagggcatagatcccaaccatattcaacctcatgttcaagtatgttctaatttttttctatatgccctaattatatatattactttatcataaattttgcatctttgaatcagtgcaggtgtgcaccatgcttgatcttaacgcctttgaactgaaccaaatctctgatctctttgattgttcccaaattcaagtaacaaaatagacaaattgttctcatccaccaatttctctaaaggtaatttatttaaacacatgattgatattttttttacagaatcatggttacgttggagggaagcagtttataatgttgaggccatggagagactgtgtaagaaatacagaaggttgcactaaacatgtccaagggattaattccaagttctgcactttcacctgcaagatcgaacatgttttggagcatgaaggtgatttgtccagcattactagactttggtcgtcggaggatgattcgagagaactgtcagaacacgttggtgatttagcaatccatccttgtggtgatccagagagaatctttccattaaagaagaggtctcgaagaagaagagagttttttgacagctactacgaagacatctatgcatcatactagtttccgagatatctcttagttctattagacattgttcacatgtttgttttgtggaaatacagtttagcatattatcaggagattgttattcttggtttaaaatctacatatagagaacccttctcttcctaacgatagctaagcaggaaacatcatacaacggtacaaactagcaagtgtgcttagtgatatgtctgaggcaaaccaaatgagacacgtgaaaaagaattagttgttttatcaaatgatggaagatagttatcacgaagggttaaataccgattagggatgaatttgagtttttggtacggtacaaagtttgttaattggttcgagggactaaacgtttaatttgtttgttataggtgcttgtgacaagattataaaggtaatgagataatgatataacgagttaactaagtgataaagaacgggaaatgaaaagtaacgtaataagaacaatgatgatgagtttgatttaccataagtggtgcaagctacgttgatggatgatgcttaacgatgatggctgcatgttttacactttttttcaaaataaatatttagctaaaaactcacgcgtaaagctaaacgcggtagaatggctaattcgtaatttgcaactcgtgcaagcagactccgacgtggcagtgaaaaaagaataatctacattcgataatacgaccaaaccatcaccgaaactctcgtgactcgtgtactctcacgatcacattagctactccactatcttcttattttcttcttctttttttggataatcactttgacctctcgttccaagactaataccttctccacaagtaccatctctgtaattcttgactttcttcaacctatgaggtgaagcatttcaacactatctcctctcttacaaaaatattctaaatttctatgattttccatgtttgttcactttgatttcactctccaagaaacatttttttctccgatgagtttacacttaaacagataaaattttcactttaagaaaaaaattcttaaaatgttctctgttttgaagatctttaacgtagtagagaattttattgtcgcagtcgaaccataatgtgattccttggtaacttcaaatctctttgttattcataatcagaatctgttcacacgaggtaaaagtctcaaactttcttatgttctgcttcgttttaggtctcaaaatttgagtttttgagctgtttttggttaggaagagaaatg

SEQ ID NO: 14123 - DNA, 3000 bp, Unknown
  misc_feature (1)..( 3000): cDNA_ID_2991474_gDNA_ID_2214701_Annot_ID_189680 3000 nt of promoter + ATG
aggaggagcagaattctgttgcgcttctcattcatatgttatataatgatgacccagaagagatgtttaaggtgcattgagctcttgcacattcagattcattaatgtgtgtcatatctttatgctgactttaggctttctagttattggcttacattaatatttttaatgtttaatggcatttattcccagttgcctttattctttgtttgtaattttcaactgagacatagattatacttatccccaggagtcatcatttccttcaaaattctattaaggttttggctttcagtgtttgaagctgtttaattgaatttcagatagtcaatgtcctgaagaagcatttcctgacaggagggccaaagcgcttaaaattcaccattcctccccttgttgtttctactctaaaggtttgatttcttaagcgaagttattctttaaagcccctcataatttatgttgagcttaatttgcgatgacatggtttggttgtttctatttatgtgccataccgcatagaagagtatctgatatagtttgttaattttgttcttcttcaaattctgtaatttttgttgtctgttttgtttaaattgtagctaatcaggcgattgccagtggaaggagacaatccttttggaaaagaggcttccgttactgctactaaaatattccaatttctaaatcaggtaagtttcataacttttcactgccttgtgtgttcagatctgtttttaggtagaacaatgtgtctcagagctacattacttttttaaaacttagccaaagttagttcatacaagctgattgacaacgttgaaaattctcaatcaacagtttgtagatattagctaaagagactgctgttattgctctgtctccactacagtcatcagttcttgtatttattgttggatttttttgcttgttgcagattatcgaagcgctacctaatgttccatcacctgacctggcattccggttgtacttgcaatgtgctgaggtaaaactacgtacctgtttatttagtatgcacttgctcggtaaaatgctcacagatctttcctatttcatcaggctgcggataagtgtgatgaagaaccaattgcatacgaatttttcacccaggcatacatcttatacgaagaagaaatttcggttagttatgttttcgcggacgttcatatgtctcgtgtctaaaccaaagcaagtaggtgagtttaactctctctcgtgcgtcaaaaacttgccttttgaacaggactcaaaggcccaggtgactgcgttacaacttataattggaactctgcagaggatgcaagtatttggtgttgagaatagagatacattaacgcacaaggctacgggggtatttcatcatgatatgataattagtctcttaccatattcaattgtctctgcttaaaggctgacaagggaaaacttatactcttgcagtatgcagcgaaacttctaaagaaacctgatcaatgtcgagctgtttatgcctgttctcatttgttctggctggaagatcgtgagaccatacaagatggagaaaggtaatactttcttctgtgcgatagaacacagtgtgtttaaaatagctcattaggtttcttacttgaaatcagggttctactttgtctgaaacgagcgcttaaaattgcaaattcggctcaacaagtggccaacacagctcggggtagtacagggtctgttaccctcttcatcgagatactaaacaagtaagcgctttttattgtttgttttacttctcattttcccagatcagcaagcagcattatgtaatgtgaattatggcaggtacctctatttctatgagaaaggggttccacagataacagttgaatcagtagaaagcctgataaaactgatcaagaacgaagaatcgatgccctctgatccatctgctgaatcattctttgcaactacgcttgagttcatggagttccaaaagcagaaagagggtgccattggtgagagataccaggcgatcaaagtatagaatctcatgttggtcaaaagaagtcggtttgtttttattaaaaaaaaaaaaagctttgctttgagtcgtttgagaatcggaaagggactgatattgtgttgcttgctgctcgaaatgtaaacccgggtttaggtctagttttattcctcggattttcaaggcggttcatggtctgtaacttgtggagtttgatgtgtgtttatacgaatctttagtattctgagtttaacattggatattacatattagataatgtccttcatgaaaaaagtattcattttatgtattctgttgaatgattattgacgcataaaaacattttcaataccattgtataacgcataattaacaacctttgtgaggcttcagccttcaaatatatcaatagaaattcagtttacgaaatcaacttaaaaaattttgaaaaaataataaaatttaaaaaaaaaacaaattgtaggttaaatttttttaaaaacaaaataaaacagaaaagaaacgagaaaaaaaaaaagcaaaacaatcggagaaagttgatggaggagattgttcgttttgtgaacgcttcaatggcataaatttccggccatcacatttcttctactttctctttctctctcccttgttgttgttctctagaattcgattcatcgttgttaacgtcgtccattcttcttctttgatcccttctttgatctctcacatttccgattccaatttagggtttcctctcttttcacatttctagggtttttcttgttccctttgtaccggagatggtgaattgaaaggaaaaataaaacgcttttgagagcttatatttgaggttgtttcctcaggttttgtagatctgaggttgctatttttgaattagagattcttttttttttttttcaaaattttgtttgttgtgatcatacatagacgtacgtagctccatttctggtggagaaggaagaagaagagaa

SEQ ID NO: 14124 - DNA, 3000 bp, Unknown
  misc_feature (1)..( 3000): cDNA_ID_3021858_gDNA_ID_2214701_Annot_ID_189679 3000 nt of promoter + ATG
cttcatgctccaaaacatgttcgatcttgcaggtgaaagtgcagaacttggaattaatcccttggacatgtttagtgcaaccttctgtatttcttacacagtctctccatggcctcaacattataaactgcttccctccaacgtaaccatgattctgtaaaaaaaatatcaatcatgtgtttaaataaattacctttagagaaattggtggatgagaacaatttgtctattttgttacttgaatttgggaacaatcaaagagatcagagatttggttcagttcaaaggcgttaagatcaagcatggtgcacacctgcactgattcaaagatgcaaaatttatgataaagtaatatatataattagggcatatagaaaaaaattagaacatacttgaacatgaggttgaatatggttgggatctatgccctcggggcacactacgtcgcaggactcgaacctgaagatgttttttcggaaaccacaagtatgcttttggtagtttccatctaagtcttcctctgtcaatacttgaaaccatctcggtttactcatcataaatctatgaggagaagcgatgaataataataacaaaattggtgttgaaggatgataaatctatggagaggtaggaagaagaaatgagcgatgttcaaatctagggtttcacaaaaatagaaaaataaattgttgtttcttttctttttttctctaacaatacaattataatttgtgaagacaaatatagtatataatgatttgttctattcattttatattaattaatatttatatatttagtaattttattatataagttttagttttggaaagttagtcattaacataaatgagagacatgccaaatttaaatttgttcatatatttataagaaaaggaaaaaattttaattctaaaatctatctctacattattaaaagagaaatacaaatgataatataccctttaatttggaatatattcttgaaatactattgattttttatttagattttttttttagaaacttcattatcggatcgtgttggttggcaaatatccaacaaatattttagatacaaataatataaaaatgtcgagaaaataaattagtgagtgcatattttgtccattcaccaaaataaactcagttacgtatgtaccagtgagagcatgttttgtacatgaaccttttttatactctgtagctcaataactataaaggacttttctcgtgtaccaattcatgagacatgtacttgagctctaagacagttatcaagaatagagtaccggtttctatgtctctgcgccatatgcccacagctcccatgcctggtgtaatccagcaatgcttaaagcttgctagctgtaatgaatgttccttcaatccttcacaagaagaaagccaggttggactaactaggctatcttaaaatatacgatcaagagatttatattccagctgagaataaaagaaacctggcttaagtcacccgtagtctcatccaatgtgttgtactgtttttaaatgtcttgaaggatcttgcgctgcaaccaagtctgaccctttcacattttgatcaggttacttgtgtgtttcgcactttctaaaaacttcatccaatacatgaagcatggcgttatagctctcttcagataaagatggctccttactcaatttcaaagaacggacacagagatctgtgccaccgttgagatactaagaatataatttctctatatttttgcatcttttatcacagttgacacatactgagaagggatactaagaatttaagttatttttctttgaatataaaataaatgtggattactatttattattcaaatatcatccatacattttatatctaaatatagaatttaatttctctacatttttgcatcttttatcacacttgacacatactgagaagggatactaagaatttaagttatttttctctaaatataaaataaatgtggattactatttattattcaaatatcatccataagattgagtgtgtaaaataataatagaatgcaaaagactgaaatgaagcaaattttattaagttaaatatcaaagaaaaaatattgattactattgtactattcaaaatttaaatattatcgatcaaaattatttttttttaccttacacccgcctaaatatgcggatcttatctagtattctataatactaagttactaacattaaagaaactaacaaaaattttggtccaagaaaaaattatcaatttttttgtttcaatgattgatcgaccatttcctagattccaaaggtacctcccccatcgaccattttacacacttgtctactttagaattgtttgttagattggtaagtaggtaagcttttgtaatctccttttcttgttgttttagctgggttcagcttggaatcttttttaattaatggaaatttaaaatacaaaaaaaaaaagttatacaaatggttctaatttctatttaaaattttatgggcctgctatgtataaaaaatagaaaaaacattttaatgggcctaatgtcaaaaaaacagaaacaattgttttctatgggcctgcttttgggtcttatggttcgaaacaatggtccatgtgaagcgtgcaccgtcaagtaacctacaaaaccacgacatcgtttagtgctattcctgtttccaaacacaccttaagttcgttatcaaccccatcctctttttttctataaataacgaagcaacgagttaacgagaaaaattctggatcggagagagctacgaagcctgggaattttcgttacctccttcgttcttctctgatctcgaattcaataccaaattcttcaatctcccgaatctgattttcttatcactatccctggataacaaaagcccccaaagtaaaaacccaattgcgattccctcgtaaaccaatctagggttttcgcgagttcgtctctgagcttgtttgtttgtgatcgtgtgaga

SEQ ID NO: 14125 - DNA, 3000 bp, Unknown
  misc_feature (1)..( 3000): cDNA_ID_3021862_gDNA_ID_2214701_Annot_ID_189678 3000 nt of promoter + ATG
atccctatcctttctatctttttcattcctcttgtgttttctatctttcttcacttcctcctttgccccctggatttccaaaccaatgaaagaaacaacaataagtgtccataactttcttatccagtaaacctccaaaggacaaagaaggagagtagaaacacacaaacaatgtagaaattgtcaatgacttactctacttctataagttttaggaggctattcaatttcaaccacatttgtcagtattcagtccaatgaatcaatttcatgctttgagataaattagttaactttttaagtaagatttgaattcccatctatatggcaaattacttctccatgataatcaaagtttccaactttgacaaaagattatcaaaatcaaagaagcaggaagctgagcaataaaaaaatcacatgaaccaagaacataaaaaagaaccaaagtcatggacttttaaattgctcaacaaatcaaccttgatcgattcgatcagactttctttccaaacataaccaggtggtggaaacggataacaccgagacattctcacacgatcacaaacaaacaagctcagagacgaactcgcgaaaaccctagattggtttacgagggaatcgcaattgggtttttactttgggggcttttgttatccagggatagtgataagaaaatcagattcgggagattgaagaatttggtattgaattcgagatcagagaagaacgaaggaggtaacgaaaattcccaggcttcgtagctctctccgatccagaatttttctcgttaactcgttgcttcgttatttatagaaaaaaagaggatggggttgataacgaacttaaggtgtgtttggaaacaggaatagcactaaacgatgtcgtggttttgtaggttacttgacggtgcacgcttcacatggaccattgtttcgaaccataagacccaaaagcaggcccatagaaaacaattgtttctgtttttttgacattaggcccattaaaatgttttttctattttttatacatagcaggcccataaaattttaaatagaaattagaaccatttgtataactttttttttttgtattttaaatttccattaattaaaaaagattccaagctgaacccagctaaaacaacaagaaaaggagattacaaaagcttacctacttaccaatctaacaaacaattctaaagtagacaagtgtgtaaaatggtcgatgggggaggtacctttggaatctaggaaatggtcgatcaatcattgaaacaaaaaaattgataattttttcttggaccaaaatttttgttagtttctttaatgttagtaacttagtattatagaatactagataagatccgcatatttaggcgggtgtaaggtaaaaaaaaataattttgatcgataatatttaaattttgaatagtacaatagtaatcaatattttttctttgatatttaacttaataaaatttgcttcatttcagtcttttgcattctattattattttacacactcaatcttatggatgatatttgaataataaatagtaatccacatttattttatatttagagaaaaataacttaaattcttagtatcccttctcagtatgtgtcaagtgtgataaaagatgcaaaaatgtagagaaattaaattctatatttagatataaaatgtatggatgatatttgaataataaatagtaatccacatttattttatattcaaagaaaaataacttaaattcttagtatcccttctcagtatgtgtcaactgtgataaaagatgcaaaaatatagagaaattatattcttagtatctcaacggtggcacagatctctgtgtccgttctttgaaattgagtaaggagccatctttatctgaagagagctataacgccatgcttcatgtattggatgaagtttttagaaagtgcgaaacacacaagtaacctgatcaaaatgtgaaagggtcagacttggttgcagcgcaagatccttcaagacatttaaaaacagtacaacacattggatgagactacgggtgacttaagccaggtttcttttattctcagctggaatataaatctcttgatcgtatattttaagatagcctagttagtccaacctggctttcttcttgtgaaggattgaaggaacattcattacagctagcaagctttaagcattgctggattacaccaggcatgggagctgtgggcatatggcgcagagacatagaaaccggtactctattcttgataactgtcttagagctcaagtacatgtctcatgaattggtacacgagaaaagtcctttatagttattgagctacagagtataaaaaaggttcatgtacaaaacatgctctcactggtacatacgtaactgagtttattttggtgaatggacaaaatatgcactcactaatttattttctcgacatttttatattatttgtatctaaaatatttgttggatatttgccaaccaacacgatccgataatgaagtttctaaaaaaaaaatctaaataaaaaatcaatagtatttcaagaatatattccaaattaaagggtatattatcatttgtatttctcttttaataatgtagagatagattttagaattaaaattttttccttttcttataaatatatgaacaaatttaaatttggcatgtctctcatttatgttaatgactaactttccaaaactaaaacttatataataaaattactaaatatataaatattaattaatataaaatgaatagaacaaatcattatatactatatttgtcttcacaaattataattgtattgttagagaaaaaaagaaaagaaacaacaatttatttttctatttttgtgaaaccctagatttgaacatcgctcatttcttcttcctacctctccatagatttatcatccttcaacaccaattttgttattattattcatcgcttctcctcatagatttatgatg

SEQ ID NO: 14126 - DNA, 3000 bp, Unknown; identical to SEQ ID NO: 14122
  misc_feature (1)..( 3000): cDNA_ID_3021866_gDNA_ID_2214701_Annot_ID_189677 3000 nt of promoter + ATG

SEQ ID NO: 14127 - DNA, 3000 bp, Unknown
  misc_feature (1)..( 3000): cDNA_ID_3021876_gDNA_ID_2214701_Annot_ID_189673 3000 nt of promoter + ATG
tgtccatagttgagtcacaacactttgtttctctttgtctgaagattcattatttttacctttagggtaagaacttggtttcatctatgacacaccaatgttagaaacaaatatcgaattaaagataagaaaggctagcttaagagcagaattaatccaaccaattaaaacaatgttttagagtattattgacctgattttgaatatagtgttaagattatcaacaatttgtataaatatttctggtataatattatgagagttttgaatctaataagattagaaagcaaatatatagaactttatgttaaaagttataattataagagaactaagtaagaacctgaatcgtgtagtttttgaataaaggatgatcataaattggatgattattcatatgaacgcagtctattatatctccatctggactctgtataaagattatcgaatattcacgaattaatattttaatgaaaaaaattgttaggtgtaattatttttgtgtgaaccaacaaatttcattaaccttgatagatttaagagcaggtttgttgagtttctttaagattttttctacttttgcatcacgagtatcagaaaactcactaccagaaactatcgccgctacgattagaatgctgagcacaaaacgagcaatcatcattcgattgattattaagagtatccaaaatattttttttctttggctaagtagatgattaaggtgagtgccttatatatatatctacaatgaagaattttttttgcaaagcatatgttaacaaatggtaagaaaattatacttcaaaactttttattcattagagcaagactcttaatttaaagcaaattaaagtgtatttaatttgttccttgaaatagcttaatctatttttgactaaataaattgtatatggacatgtcaaaagtcaagtaagctatttcaaggaacaaattaaattttgatttaagttttattattttatcaaaaaatacaatttttaatgaagatgaaaataagtttttatatatagaaaaatacagatttaaatgattttaaagagaaaggttgggtttttacttttgaaaccttccattcaaatagaaggtttaagtattttcagatttagccagatttgatttagtcttagtttattttcctggttttgaatttgatttgttaatttctttttaaaatgtgtttttgttttaatgaaacgaaaactgttaaaaatttaatccaaaccggttttagattagtttttaatcttgttgtggtttaggattgaaaagattcatttcatgtggttctttaaaattgtcatatctctcgtttggagtttctatagtatttctgatatagttttagttttgatgtcaacttgattttcattttaccattatacatgtagatgaaatcatattttgtgaacataattcttttttttctgccaaagattagacaattaatatcctcttgaattttgaaaaaaataatgtataacacaattaaatttagagagcggtatgctatctatgtgttacacattgaaagtgtctgtattatgctatctattaaaactatgagacgcatgcatgtatttacctaacaattaatgtccatgttactctaaacttcaagtccaagaaagcatcaccaaagcttcattcaacttgttcattttgcatttatccatgatttttaagctcattgattgtaaattacgaattgtggcattgtatcgtaactttcttcagattcacatctttaacagtttatatcactcatgccaaacaaaaatcgcatcaatcatatttctataagttttatcagtctaccaaataaactctgttgatttaatataatctattagagcatccacaacacaagttattttttcatcaaaaaaaaaaagttttgggttatggatactctaataaacacaagctattgaagtgccatcaagcccaatactatgagacaaacaagcccatgtaattagggttctctagcaagtagaagtcatccaactctccttcttcatgtgatgaaacatcaaatctagaatcatttgcttttggtgaaaatttaaagtctttccttttgctttctatgcatcttaataaagctgcaattaatgagctatttattttcagttttagatttctcctttaataagctgaatgagcataaacctatctaggtttagaaatgtcaacacaatcttttgaagtattatgaatctcttcaaactcatgtacacgctctcgaaacaacaagacaaagtaaataaagcaagacacaaccataaattaatcgagcaatattgtactatcttggtgtaatgtatggaactaattaccgactacggagatcataacacatttattaatacataattacgttttaaaaaacgagaatgacgaaaagttggtccaacactccaactacatataactaatatcaagctttaaatacttgaatgacgtgttgacgaaacaaatatttatcaatacaattgcgtaaccataataataattcaataggacttttattaatcgtgtgattacaaattttacacacacgttgaatattcgacaaatatgacttgatgtggtcctacttcgatgacttctacgttgacttttgctgtttgaggtagagaaggaaaattacctgccatcttttttttactataattaaataaaataaaataaaaactttactttattatattttcgggaaaataaattgacttcaaagtttcatcatcatacaaaggagaaaactttgaagcttcttactttctttacttcacgatccttcttttgcctaatttctcggtttcatttccaaaattctcttttgattctttcttactctttcgctagagaagatttagactgggttttgagtatttctcggaaattttcgtgttttttttttctgggaaagtttccgagatctcggtggagtactttttttggcgacgaaccagt

SEQ ID NO: 14128 - DNA, 3000 bp, Unknown
  misc_feature (1)..( 3000): cDNA_ID_3021839_gDNA_ID_2214701_Annot_ID_189668 3000 nt of promoter + ATG
gaatgtgttgttaattatcccccttgcacaaaataagtggtccatgagcatattaatatttacaatatcactgcttgttgtaattttataatactaataacacagttagcgaattagatttgtcgatgatacccgacatcattaatgacaacttcaaaacagtgactgtatcacaaattattggacaagaagtttaccttactaataattgtgattaattaagtaatcaagaaggagaagaagaagcaaattgagatttgaggacagaggaatatgctgacattgattttgcacaaaaaaaaaatgctgacattgacatttattttataaatactaatagtgcacatgtgtcatgtgtgatatataaatactgtatgtaggaaattttgccttttggatttgatcaaattggattttaaatagattttggcacgacggaagacgaaatgtggtagaaatcatatttctagatttcaagtagattttgaaatttgcaacgttgcaaggcaacaaatttattttgactgtttacgtctctttttgttagaaaaatttcagaaaatgtttgatgaatataataaaataagcaaaaaaaaaaacttgttcatttttaagaatttattaaccaagcaaaccaaatcattactaattcaaatatcactctgcttaaatagtgtcacactatcaccattactgtcacaaatcttacttaacaacaaaacacatacagtggaaactctataaattaatactcgataaattaataaatacaataaaataattaattttgctagtctcaagtcgggccaatgtaaaaattaagcaaaatcgataagataataagataataatttttttgaaatttctatgtaaaaatatggttccaataatatcataaattaataatcatagatcttaaacaaatattttaagactaattttatatgaaacttttgttaaaactacaattgcaattctttttagattacagttggtatgatctcttttgtactcacacaactctttgagtatttgatccatcatatttggttttgtaacatttttttctatgaaaaatcattgttaagatttgtgtaaagaaaaattggattaagctatacgttaacgtcgtagatatacgaacacaatatcttgtaagaaaataaattaaaaaagtcaaaaataaaataaaatatataacataattgaatatacaaacaacaaaatacgagaaaatctaaattaaaaatattgtttaaaaaaaaataatattgtgttttacgtaaatattctttaaattaatatttattaatttatcttattaattaatatttattaatttattatataaattaataaaattatgtggtcctatcattattaatttatagagtttctgctatatttataattatcgccccaaaataataaaaacagtacaggaaagtcattatgaacatcattacacaaagcccattacaaaattcgcccataagcccaatctaacaacggcagagattcagagtcagttccgacggcgctgaccaaagaaacgcgtctctctctctggagaaaatttcctcacagagaaagaagaaaaagacgagagacgtgaagaagaaatcagaattcagaattgagaagcaaacaatggcttcaacgatctacacttgcaaagaatgcggatcagatctgaatctaaaccctaacgatttatttccaccggatttctacttcgaagccggtaacaaaggaacactctcattcgccgccgtcgacgccgagaaattccgattcgagaaagaagataagatcatgcctttcttcgaaaccctaaattactggggaatccaacggaaacgaaccaagatcaagtgcactagctgcaaccacctcatcggttacatctacgacgatggtcctcctctcactggtggtattggccaatacggatttggtccgagtcaagtcattcctcgtgctcctcggtatcgattcaaaaccaaggcggttcaagtctcgtcccagacttagctaaagcagagggtttaatgcttttacatagatatgtataaacttgttaaaagggttaataggattgtagatgtttgttgcttaaaactcagatagtaaggtcgttagacttgccatcggtcttggcgcttgcttcagcgccaagacggatggcaatacggaggtttaaccgccttttggaactgatttttgttgcttgcttttgaagaaacatctacaatcatattctctcctttgtctcttgtctattgtagctagtatagttaagatatgtatgttaagtatgttgttggcttggattttgatcatatttgtagtgtttgtgtttgttgtgagtttgaatcacatggttgactgatttgttcaatgatttgggacgaatattttcgtagtttgttcaataatcatcggttgttttgtttggtgattcgagttttgtacgaggaactttagaagctgattgttttaagaacaaactctatcggcttaaagagaatgtgaagaacagaacaaaaaccaatagtgttagtttaatggaggacgtcatttgaaaatgacgttttggtgatattgattgtgatggccatttatgattcaacggctgtgattgaatgatgtaacattagttgcttcaagaccatatattttatattatccatacactacctaattgcttaaaatattgttgatgttgatgaagattggaagttacatctacttgtctacttgtcgtttcttgtatagttggagtttatagtttgtcttaacgtacaagataatttgaaaggtagacgtagacgttggatacttatttggtaggctcttaagaatcttaggtgtatctctttagtttgaaggttagattcagaatctctgtagattcattagtagctttttctgtgtgatctttgtgttgtatatatatagatcgaattgattttagctggtgaaaggtgaagttgtggt

SEQ ID NO: 14129 - DNA, 3000 bp, Unknown; identical to SEQ ID NO: 14118
  misc_feature (1)..( 3000): cDNA_ID_3021888_gDNA_ID_2214701_Annot_ID_189666 3000 nt of promoter + ATG

SEQ ID NO: 14130 - DNA, 3000 bp, Unknown
  misc_feature (1)..( 3000): cDNA_ID_2710924_gDNA_ID_2214701_Annot_ID_136874 3000 nt of promoter + ATG
gtacctcccccatcgaccattttacacacttgtctactttagaattgtttgttagattggtaagtaggtaagcttttgtaatctccttttcttgttgttttagctgggttcagcttggaatcttttttaattaatggaaatttaaaatacaaaaaaaaaaagttatacaaatggttctaatttctatttaaaattttatgggcctgctatgtataaaaaatagaaaaaacattttaatgggcctaatgtcaaaaaaacagaaacaattgttttctatgggcctgcttttgggtcttatggttcgaaacaatggtccatgtgaagcgtgcaccgtcaagtaacctacaaaaccacgacatcgtttagtgctattcctgtttccaaacacaccttaagttcgttatcaaccccatcctctttttttctataaataacgaagcaacgagttaacgagaaaaattctggatcggagagagctacgaagcctgggaattttcgttacctccttcgttcttctctgatctcgaattcaataccaaattcttcaatctcccgaatctgattttcttatcactatccctggataacaaaagcccccaaagtaaaaacccaattgcgattccctcgtaaaccaatctagggttttcgcgagttcgtctctgagcttgtttgtttgtgatcgtgtgagaatgtctcggtgttatccgtttccaccacctggttatgtttggaaagaaagtctgatcgaatcgatcaaggttgatttgttgagcaatttaaaagtccatgactttggttcttttttatgttcttggttcatgtgatttttttattgctcagcttcctgcttctttgattttgataatcttttgtcaaagttggaaactttgattatcatggagaagtaatttgccatatagatgggaattcaaatcttacttaaaaagttaactaatttatctcaaagcatgaaattgattcattggactgaatactgacaaatgtggttgaaattgaatagcctcctaaaacttatagaagtagagtaagtcattgacaatttctacattgtttgtgtgtttctactctccttctttgtcctttggaggtttactggataagaaagttatggacacttattgttgtttctttcattggtttggaaatccagggggcaaaggaggaagtgaagaaagatagaaaacacaagaggaatgaaaaagatagaaaggatagggataatgaggcggggaggagcaggaagcatcggcataagagacggcggaaagatgaaggcgccattgctagtggcaaattagtaagcagtgaggtcgagttgttagagaagagctgccagactgtggaacttgagcttcaaacatcgtctcagaattcttgtgatagcactcttcatagcaatgagagaccaaagcaaattcagagtcagccccttgatggtaggcataacataacgactctggtgagcttgtttgcttttacttgttgttgggtctgtttgcttatggtgtcattctttcttggtttaaagaaaccagcatacggactcggttacctgacaaagggcaggaagatcctgaggatggggtgatgatgaccagcaaggatcaaaaacagcgcttttcccgggaaatgttagatgcttctcaagctgctactgctcctaatgagtctgttggtcattcaagggtctgtcaagagaaaagaatagatccaacttttggttcgtcgagagagatcacaacaaaactcaacaaagagaagaagtcagttccttcgaaagataacagaaaagttagtaaagagaagaagatgccatcattatcttcatgtaaccctctggaacaagagaaaccgacctctagtcatcaagaaacccctggaccttccaagctattatgcaggaaatgccctccttccatggctgggcaactcttgaatcttatcgagaactgggctcctgatcgggttgagagcaagctcactgactctgaagatcaagaatggtggttgttcatcaagtttggagccaaaagtccacaagttagcaatcagaaaaccaaccagggaagtagttccatggtgtggccgactgctagatttcttcctgaagccgaagtacacgcattgccattcactgtcccgttctgatttcaacaaagttggtcgagagagagtgagagagagagagagagagtggttaacatgaccaacatatagttttcccaagtattttagagtagccttgaaacttaagaaactcagaattatgtgtgattctttgtagatgtactggtaatatagtaaatcaccaattacgtaaatggtaaatatatgtgctggttagatagtaaattacatgagagtttcgaacttctttggctacttccttatcaatcgtaaatcttatttacgatctttgttttttttttctcataagtgttgcctctcattataaagagtttgccaacggtacaaaagtggaacaatccactttcaaactacagacaacacattaaacagaaaacaacattggaagaccaaacaggtggtatccatgttgcagagaaaactatttataatttgatttggttcgattttaatcaaaatgcaaatcaaaaatataataaaataacaaagtagttacaatattttatattaattgatatgtttattcataatacataaaatataaaattgaaataaattttgtttatccggttcggttgagttccaatatagcagaaacgattgcggttaaaattctggattttattcggtttgatgaaatagaatatggaccgttagatctaaagttaagtagaaacaacgaacggtggatagcgaggaaaacgtacacgtgtgaagcatgacataatttttttcccatccaaagactttcacaaggtcttttttttgaaacctgaaaagtgagaaacccagagatcgagattgagatttagagaagacgaagatcagaag

SEQ ID NO: 14131 - DNA, 3000 bp, Unknown; identical to SEQ ID NO: 14123
  misc_feature (1)..( 3000): cDNA_ID_2991474_gDNA_ID_2214701_Annot_ID_136875 3000 nt of promoter + ATG

SEQ ID NO: 14132 - DNA, 287 bp, Unknown
  misc_feature (1)..( 287): cDNA_ID_2705235_gDNA_ID_2214702_Annot_ID_136876 3000 nt of promoter + ATG
ctccctacatttccgattcaaaaccattacagctacacaatggacaaacagagcaaaagtttccaaaacaagaaaaataaaacccaaaaaaaaaaaaaaaaaaaaaaaaaaccagaaaatcaccatcaccggaatccgtctagcggaacgacggagacatcttccttctttgcatgttaccgccgtttcttggccgtagaagatataaatattgatagtcgtatataaaaaaaaaacatataagacaaggtacataagaaaaaaacaatttcgttaaagaaaaaatg

SEQ ID NO: 14133 - DNA, 3000 bp, Unknown
  misc_feature (1)..( 3000): cDNA_ID_2711004_gDNA_ID_2214702_Annot_ID_136881 3000 nt of promoter + ATG
acgcatgtatttgttgaccaatattatagagagtttgtctaacctagaggatattttggtcataaacattacacacacttttttgttccttaaaaacaattctttgtattcatctctttaattttccttaacaaacgttacattacggactgcatcgaccgacccactatgtagttgtattaatggtttgtgttaacccaaaatcgattgcgtgtctcaaaagacgaaaaaaaaaacgactgtcttatacaaaattcattaattatgatccaagtcttgtgttaattacggtcaacattttaagttaaaattaattatttattatatatgtggtggatttaaataattattttcatcctgaacattaaagggttaataatttacctaaatgactcaccaaaaaattaatttacctaaatgaccatgatgaatatctaattatttaggtaaatgagcaaatgacaaacatataatcaaagaaacactttaatatatataaacatgtaaacaccaattatttaggtaaataatgtattttctatcatttgactttaatgtctttatatatatatatatatatatatatatagatacatatgtgttttgcacaatcattttattttaataaacaacgtactgtataaatcacataaataaaatagcataatatttttgctaattaaaagtcgcttatgtcatccaatacagttgagtgtgtttttaaattgttttatgtaatatataaaagttcatggttaattaggatgaatattcaaaattaaaggacaaactctgtttctattcgctacatatatagttttacggaatacactctgcacaagtcatcataaaacaactggaatggaatatgcgatgaatctctttaataataatatgtgggatctgactgtggattctaatctaatatttctattataagcaatttggacgattcgtgccattttaaaaatggttgagggatttttttatggggttgaatattgtcattgcgccttatcagaaacacaaaaacaaaaaaaatattgtcattacatgcatgatgttgatgaattatttttcaatcatataaacttgtggttgaagaaaaagcacaatatttaacaaacaaaaacataacctgaaacaatataaacttactttctaaattaataaaacatttgaccgaatggggaatctaaaagtgtgtcatataagatattgatttaaagacctagatgacgtatgggcttacataatatgtggtcaacattgaatattatagtcagagcaaacttcgcacgaacaaatcaactccaatctcacaccaatagcataagaccatgccgtagtctatatgattgccacaaaagaattattcttattggccaactttgacctagtgttatatttgtatttatatcttttaattaagtatttattgaattatgtatatacattgattgttgcattcatcttttttacttagtatgccatctattcaattagatgaacacattgtaatactataataaattacgtatgtttagttacgatagtgctttaattttgatctaaaccacatgatctagtcagaacgctttgatcgatatttgtttgtgtttattttttttgttgttgctaaattgtaaatatcagtaaggaatgaaagttggggcgtacaagaagttagacctataaatataattgctactttgccaaaaaggtataaaaacaagggaacatatacaagagaattttatgagattcaataaaagagctttagtggagccacacggttgcatcagtcttgagaagctgcgcaaatgtcgtcttgctgagattgagttacggagtaacttgtatattgttttggagtaacttgtgcttgggttcaattggtttactagtactttatgtagcaagttatagaacagttcatatctgtatatacagtttgtgagggtggcatttccacagtctctattggtattgtatgtttatgagacaattcatgttacgtatatgaattgttacaaaactttatgttgtgaccagctacaaaattagttaccaagtcaatatccatggccacgacaacacaatagcggccactatactagtgaacaaatcatcggtagctatacttcttggaaatggtaatgaatactacaaaaataaccccacaatattcttaagttttttgtgtggctacacgcctacactagcttagtcatggataaagtcgtttacatatgtgatatgtccgcctaaccaatgaggattctgatttctgaatcgggcagatttgtccggaacacgatctatgctcatgtaggtcctcatcactcttgcaatgatctttaccacaattaattcacaaattcaacttaaaatcttataagttgaaaaagctccgatcctccctctttgttcacattaaaacaaaacagaacttattgaacacatatctgcatgactgcattttaaaaagaaaactagctgtattgggctatgttgtgggcttcgctagcccatgtaggttgaatatctcttgtcatagtaatgaccatctatattgaaataaaattcttatgataacacaaaccatattaaatctgaacattgattcacgcaaatagagatagttggcaccaaaagtctaagacgcacactcatcttcataggaaacccaaaccctaagaaatggaaaattaacagcttcatagttcaaacgcagaataaaaataactacaaaggtaatattcagttttcacataaatcattttccttttttctataacaaatggatttccttttttaaacaggaaaatacctgaaaaagttaaggcaaaggtggctactaaattatttatatatctacgttcccttagctctctgaacttgagtctaagataaagaaactctcgacgacatcttgagaatcgaacgagaatgatccaaaatctgcaaaaattaccccaagacctccaatcctcggca

SEQ ID NO: 14134 - DNA, 3000 bp, Unknown
  misc_feature (1)..( 3000): cDNA_ID_2706080_gDNA_ID_2214702_Annot_ID_136883 3000 nt of promoter + ATG
cctcaatcgactgaccacccacaatagaagtcaccctaaaccctagataatgcgcaaacttaacagtttcctcctcaatctgctgagcaagctctctagtaggggccataacaacagcataaggcccctcagtctcattctcttcgctcatcggtggcaatctagagatgtaagctaacatgggtaaaacaaaagcagcagtcttaccagaaccagtctctgcaatgccgataacatcacgctgttgcagtccaagtggtatagctgccatttgaataggagaaggtttcttgtatccagctctctccacagctttcaaaagctcagaagtaagcttactctcttcccagctcctcatcggacgaggaatcctcgaacccttgtaagagatattgaaatcttctctgaaaatacgccaatccctttcagtcatctcctctaatctcttatcactccaatgcctgtcaaccctcatatcaaacgagtcataagtatcagcagcttcttctctcactctctgagcagcagcttcctctggtttctctacaataccatctttcttacgaatctcgtctcgcatctctttctcatgcttagccgcttgtttcttctgctcacgacggtccataccagcacgaaaccctctcccaaagagaagctgagcttcatgagggttttggtaaagaacgttcatatccctagaagtatcctcagtgttttcccaatcaaaagagaaacgaaacttctcgcttggcctaatgactctcttcttcggcttcttacctccaagatactgctctttaatggcgtcaagttccttctccttctctctctcaactaatttctcaacacgcgccttctccctagccttaacctcctcttccctctccttttctctatttctccgatccggttcacgatctcgttcacgacggtcacgctcacggtctctctctcgctctctatccctatccctgtctctatccctatcgcggtctcgatctcgccctctatctctctccctatctcggtcacgttctcggtctcggtcccgatctctatctcgatccttatcccgattggtatctccattggagacatcttccgtctcgggctcggggcgaccaagttgctcacgacggacacgttgctcggagatttgatcctggcggcgttttagggctaactcttcccgctgttttttggtgaggaagacaggcttcttagcaatggaggaatcgagagtattgacggaggtagatccgacgacttcgttgattgttcgcttcatcggtggttagctggagattattcgcttggtcgattagcaggaggggaaagcaaacaagacctagaacctttcttctcttcttctctcgctctgatttctttttcacttggattctctttttctacatttttccaaaaccccccaattctagcaaactctcaagggttttaggcccattagtttttcttttgcattccgaattcaaatctaattttgtttttaggcccattagtgttttttcagcggagattatgtagagtagttagattttctcttgggtgaagattacaaacccatttcaagggttagagaactcgcttgtagtagtgtggtgtgacacagttcattcatcattagggattaaaccaactacactaattctgtctttccaacatgaagttttctggtaatgcaaacgaaaccgattatcttcgacatcaatgttcagataaagttgaaaactgatataatggttgctaaggagacgacaaaatgttttttgtggaagcagagaaactaaaacctgattcgttctaattgatgctctcaaaacataaccctgcttaaatgctgatgttcctaaactcaaccctgctaaatatgctaattcatcgtataatctatacatatcacctaatcttagttaagcaattaccaaagataatgcttcaccccaaggccattgcaagtcaatatgagctccttgtactcattcaatagttcctgcaacagaagatacacagggatttatcaaactcaaaagctttggaagtagtttctctctcgaatgaaattaataactttcgtctaccgtgttgtgctcatagatacgacgcatccttttcttatcgtactcctgccttgcaattgggtcgctcaacactgttcagttacaagatcaaattctttattgctaaagtccacagaatcaatggctaaatgaaaacagattcctttcccctaaactagtaaacttctttccttcaataatacattctgcattacatagttagaagaagaccaatgaaacaaattcacattctaagcttactactacttcaaagcctagctcaacaaacaaacacaactacatctacacgatgaaagagaagcaaaaccttgataagcctcgttgatttcttgaaacctagacgtagcagaatcctcttctttaaatttgtccggatgccatttctgcaacacaactccaacacaatcatcactgaagaactcacactcagagactgtcacaaattagtgggaaaatgaagtggaaaagagaaggaaccagagcaagacggataaagctggaacgaatctcatcatcagaagcgtcacagttcaattccagaactttatagtgatcctgcaacacccaattcacaaaaaccaaaactttaacaaattcaaaaccaaacaattatcaaatttttgtttttttgtttgtttaccttgtaatcctcgaaatcgaaaaaatcgaagccatggctgtctccccaatcggaacaccacattctccagagcaaacaaacgattccaagcttcctcaaatttacgattttcctcctctcgtcactgtgggcttcttcagataaaattttattattattatgcaatttcgttttagacccctaaactattacattattacagttaaaggacatttcgcagcttccagaaacatttagagacggctgagatacacagtg

SEQ ID NO: 14135 - DNA, 3000 bp, Unknown
  misc_feature (1)..( 3000): cDNA_ID_2710982_gDNA_ID_2214702_Annot_ID_136888 3000 nt of promoter + ATG
cctcagatgattctatctttctggaacaataaatgacaaaaccatgctactagataccaagtagtgatacaaatcaaccgattgcttcagagttgagtatcaaaatcaaaagtctgaacatctaaacgttctgtatctaagaaatcaaacgagcttcatatctatcaatcaaccatttgctttctagtttaagggagacaaagagcaataccaaaaccagttgcacaatagatagctgagtgcttcagagctgatgaacaaaagactgatcattctgtatctatgaaactaaacgagcttcatatctatcaatcaaacatttgctttatagattatgaaattcaagagcataccacaaccactttcacaacagatcaaccaatatcaaaaaggctagaacaaatgatcgaacactttatctagctaaaactagttgatatttggtttgcgatacaagatccagactaatccacatataaaagagcttgatatctatcaatcgaacatatatatgctttctagtttaagcgatacatgagcataccataaccaatttcacaacagatcaaccaatatcaaatgctagaacaaatgatcaaacaccttagcttcatctagctatatctacttgataaattgatttgcgatacaagatccagatctaattcatgtaccaacgataacaattagaagaaacgctccatcaacaaatgcacatgagcgatcgacatgaatatctcgataactgcatagtgaatgatgaaatcgaagtttacataacctaatcagagagaaacatgtaacggagagatatatgacctggaaatgctttcttccttcttcttacggccatcttcgtgcgctttctctctgaattgctgcaacgccgacatgattcctttgaaatcgctacacgatcaacacggaaacacaatcgcgagtcacatttcagcaaaaaaacagaagaaacgaagaaaaagaagaagacgaagcaaaagaaaacacgagaacggacctagaaacatcgacatccaattcgtccgggagttttgctttcggtgttggcttcttgagcgattgcggcggctctggccgagttctcttagtgcctcttctggtagacgacattgcagacgaaacttagagagtgtgagattcgatgaagcgaaatcaatagctctggcgagtggcgattatctgctctctctcgctcgtgtgatttggatttgaatttgaattttgaaattctgtttgtttgttagaagacttcacacttcacaataatatatagcccacttacgtattgtggatgccgtcgtagctgatcacgtactctcactattttcgttttcttttttgatttttttttcttctttaagttatggctaacataattactattataaaaataaaaaattattctatgcatataattcttcaaattgtgggtaacaaaagtcactgttacttctatttacatcaatttttaacccaaatgaaatatgagacttgatacatcatgggcctctatttttttgtcaaaacatcattgggcctcatggcttaaaaatgcgtatgaaaacttccttcaactcaaacccaaattaactcaaattattgcatgtcgatctcattgttatcttgagattgatcattgaagtatagaaagttagaaactttcacccctaggcctagtttatggtttactctagcgtatatctgtcttacctcttctctcaaagcttaaggccattgtgtttacgtttatgtatatcttcacgctttatttttatttttttggtttaggttaataccaatcctaaaaactaaatacatatcaccgtaccatttaacgttttatcaaagttctgtggttcaacactctaaatattacatgtgacgctataccatacgtttgcgaagcttggaatttttcaaaaagtatttgatctcacatagctttattcagaacctccaaaagaattgcacttataatctccaaggcattgtatagtttaggaaatgaaatcttatgcatgacgtgaaacgatgaaagtataaatcttttttgtaaaacactagaccaaaagagtttccactattaattaacatcaatttttaatagttattttcctgatttaagaataattacacgggcattgttttaccagtttcattaaaatctagttgactttttaacgtattttatcttatcctgatctaagaataattttataggcaccgttttgctaatttaatcaaattggaaacccaaataaatagaaacagaagtgtggatattaattgaacttttaaatgtgttgtaatgtgttgaagccgcaccaggcgcatcttgttgccatgcccatgttaaggaccacaaaacatggaacatgaatgaaaactcatgcactaatactatctatatcccagatatttgcattgaaagttacactgtaaatttacatattgtccaatagaatttgtaaaattatatctatatttttttttactaactctcattaaattcacaaactataagaaattcacatatacatgactataattttctcataaaactttcaaatcataacattaatttgttgaatattaacatatatatgactaaacactgtattgaattcagctgtgatgcattcgttaattattatcttttcatcagaaaaaataaacttcaggtaggttgacgaagttttcatttattctattaaaaaaacccgggaagtgactgtactacaaatcaatatcgagtttcttgcttcaagtattcaaacctgttaggagatctaaatctaaatctttaacgggactacatcgatcggaaacttctcgccagttgtgtacatgtgctgtgtatgcctctactctctagtatctatatgaagtataaaaaattgtagcccgatatctcctataaatacacccaagtcacatcaacccaaagtcacacacacaaagaaaaacaaaagaacaaagatg
